United States Patent Application Publication US 2024/0327933 A1 - sequence listing, part 2

SEQ ID NO: 30004 - DNA, 20 bp, Artificial Sequence
  Synthetic
ttttcagcaacactcagttt

SEQ ID NO: 30005 - DNA, 20 bp, Artificial Sequence
  Synthetic
gattcttgcttgtggaacaa

SEQ ID NO: 30006 - DNA, 23 bp, Artificial Sequence
  Synthetic
gcaataattcttttacactgtca

SEQ ID NO: 30007 - DNA, 20 bp, Artificial Sequence
  Synthetic
gggactttcggaatctaact

SEQ ID NO: 30008 - DNA, 19 bp, Artificial Sequence
  Synthetic
ctttgccttctcctgtgag

SEQ ID NO: 30009 - DNA, 21 bp, Artificial Sequence
  Synthetic
catcgtccccattttgataat

SEQ ID NO: 30010 - DNA, 19 bp, Artificial Sequence
  Synthetic
tctttgtcggacctgcgag

SEQ ID NO: 30011 - DNA, 23 bp, Artificial Sequence
  Synthetic
acttccattaattttaagaccca

SEQ ID NO: 30012 - DNA, 18 bp, Artificial Sequence
  Synthetic
ttcttcctccagagcctc

SEQ ID NO: 30013 - DNA, 22 bp, Artificial Sequence
  Synthetic
agattctccttcatttgttgaa

SEQ ID NO: 30014 - DNA, 18 bp, Artificial Sequence
  Synthetic
tcagcaattggtgtgctg

SEQ ID NO: 30015 - DNA, 19 bp, Artificial Sequence
  Synthetic
tgaacttttgccaaggcgg

SEQ ID NO: 30016 - DNA, 24 bp, Artificial Sequence
  Synthetic
ggtgtttctaaagagataacttct

SEQ ID NO: 30017 - DNA, 25 bp, Artificial Sequence
  Synthetic
cacttttggtatagttacagtttga

SEQ ID NO: 30018 - DNA, 18 bp, Artificial Sequence
  Synthetic
agtgttcacctgaagcag

SEQ ID NO: 30019 - DNA, 18 bp, Artificial Sequence
  Synthetic
atacatttgctcgcgacg

SEQ ID NO: 30020 - DNA, 22 bp, Artificial Sequence
  Synthetic
tcctctggtattatctccaact

SEQ ID NO: 30021 - DNA, 18 bp, Artificial Sequence
  Synthetic
cgggtgcggtgttaatag

SEQ ID NO: 30022 - DNA, 18 bp, Artificial Sequence
  Synthetic
gttttaggtgcttggcag

SEQ ID NO: 30023 - DNA, 21 bp, Artificial Sequence
  Synthetic
tccatcagtacctttgtgatc

SEQ ID NO: 30024 - DNA, 20 bp, Artificial Sequence
  Synthetic
ttgtgaaggactctgaaagt

SEQ ID NO: 30025 - DNA, 18 bp, Artificial Sequence
  Synthetic
gaagtaccaagtcgcctc

SEQ ID NO: 30026 - DNA, 25 bp, Artificial Sequence
  Synthetic
atctgtatgttcattatcataagcc

SEQ ID NO: 30027 - DNA, 25 bp, Artificial Sequence
  Synthetic
tgatataggattaccatctaatgca

SEQ ID NO: 30028 - DNA, 18 bp, Artificial Sequence
  Synthetic
agctgccagtgtaggtat

SEQ ID NO: 30029 - DNA, 18 bp, Artificial Sequence
  Synthetic
atcctccaactcgaacac

SEQ ID NO: 30030 - DNA, 22 bp, Artificial Sequence
  Synthetic
cttaatgaaggtgaatcaacac

SEQ ID NO: 30031 - DNA, 19 bp, Artificial Sequence
  Synthetic
aaatcgagtaggacgttcc

SEQ ID NO: 30032 - DNA, 21 bp, Artificial Sequence
  Synthetic
ttcacatccaaccataaacac

SEQ ID NO: 30033 - DNA, 25 bp, Artificial Sequence
  Synthetic
ccttctggaaaaaaagaataaggaa

SEQ ID NO: 30034 - DNA, 18 bp, Artificial Sequence
  Synthetic
gttttgaccttgggcctg

SEQ ID NO: 30035 - DNA, 18 bp, Artificial Sequence
  Synthetic
cagaaaatcagcagctgc

SEQ ID NO: 30036 - DNA, 18 bp, Artificial Sequence
  Synthetic
ctgtgtaggcggtcttga

SEQ ID NO: 30037 - DNA, 18 bp, Artificial Sequence
  Synthetic
tggggttggagggtaatc

SEQ ID NO: 30038 - DNA, 18 bp, Artificial Sequence
  Synthetic
caacaagccctccattct

SEQ ID NO: 30039 - DNA, 24 bp, Artificial Sequence
  Synthetic
tactcaagagataaagttcttccg

SEQ ID NO: 30040 - DNA, 18 bp, Artificial Sequence
  Synthetic
taagaaccctgaacctgc

SEQ ID NO: 30041 - DNA, 20 bp, Artificial Sequence
  Synthetic
tccaaggcatctcttcatag

SEQ ID NO: 30042 - DNA, 19 bp, Artificial Sequence
  Synthetic
tgatccaacctcagctgta

SEQ ID NO: 30043 - DNA, 18 bp, Artificial Sequence
  Synthetic
tcaccaggaaccatagca

SEQ ID NO: 30044 - DNA, 25 bp, Artificial Sequence
  Synthetic
ctccaaatctgtaaatctagctaaa

SEQ ID NO: 30045 - DNA, 20 bp, Artificial Sequence
  Synthetic
gttgaccaactgagtctgaa

SEQ ID NO: 30046 - DNA, 21 bp, Artificial Sequence
  Synthetic
tgcactcctgtaatatccatt

SEQ ID NO: 30047 - DNA, 21 bp, Artificial Sequence
  Synthetic
aggagcaaaacattccaagtt

SEQ ID NO: 30048 - DNA, 21 bp, Artificial Sequence
  Synthetic
tgatgtatgtctggattctcc

SEQ ID NO: 30049 - DNA, 18 bp, Artificial Sequence
  Synthetic
acctactggagtgaacca

SEQ ID NO: 30050 - DNA, 18 bp, Artificial Sequence
  Synthetic
gggggtggaagtacttca

SEQ ID NO: 30051 - DNA, 22 bp, Artificial Sequence
  Synthetic
caatctaatcagtctcccagta

SEQ ID NO: 30052 - DNA, 19 bp, Artificial Sequence
  Synthetic
cctacccttctcctcaaga

SEQ ID NO: 30053 - DNA, 18 bp, Artificial Sequence
  Synthetic
ttgcgggagaaatgctta

SEQ ID NO: 30054 - DNA, 18 bp, Artificial Sequence
  Synthetic
acaagcagccaatcatct

SEQ ID NO: 30055 - DNA, 23 bp, Artificial Sequence
  Synthetic
tttggaacatttcttgagtaacc

SEQ ID NO: 30056 - DNA, 22 bp, Artificial Sequence
  Synthetic
ctaactgagtcttacccactat

SEQ ID NO: 30057 - DNA, 23 bp, Artificial Sequence
  Synthetic
agaacaattttccatcatgacag

SEQ ID NO: 30058 - DNA, 22 bp, Artificial Sequence
  Synthetic
catctccgaatcttatcattgt

SEQ ID NO: 30059 - DNA, 21 bp, Artificial Sequence
  Synthetic
acttcaatttggtcattcgtg

SEQ ID NO: 30060 - DNA, 18 bp, Artificial Sequence
  Synthetic
ttaaactccagtgtgccg

SEQ ID NO: 30061 - DNA, 22 bp, Artificial Sequence
  Synthetic
gagactgtgattcttcctgatg

SEQ ID NO: 30062 - DNA, 19 bp, Artificial Sequence
  Synthetic
ttgtcattgggaatgcttc

SEQ ID NO: 30063 - DNA, 18 bp, Artificial Sequence
  Synthetic
tgtcctgttccctcagaa

SEQ ID NO: 30064 - DNA, 23 bp, Artificial Sequence
  Synthetic
agtttgttcatttctgagtcagt

SEQ ID NO: 30065 - DNA, 18 bp, Artificial Sequence
  Synthetic
caggcccacatgatgaac

SEQ ID NO: 30066 - DNA, 19 bp, Artificial Sequence
  Synthetic
acaggctaacaacaggtct

SEQ ID NO: 30067 - DNA, 23 bp, Artificial Sequence
  Synthetic
aaataatctaacagtcgcaaaca

SEQ ID NO: 30068 - DNA, 19 bp, Artificial Sequence
  Synthetic
tccacctctgctactgtag

SEQ ID NO: 30069 - DNA, 23 bp, Artificial Sequence
  Synthetic
ttcttcaaacagcttttccaaat

SEQ ID NO: 30070 - DNA, 20 bp, Artificial Sequence
  Synthetic
gtcctgttccataaatagcc

SEQ ID NO: 30071 - DNA, 22 bp, Artificial Sequence
  Synthetic
gtaacagttgcttacatccttc

SEQ ID NO: 30072 - DNA, 21 bp, Artificial Sequence
  Synthetic
ttccctctgatcttctgaaac

SEQ ID NO: 30073 - DNA, 21 bp, Artificial Sequence
  Synthetic
cctttgcctgtactaataccc

SEQ ID NO: 30074 - DNA, 18 bp, Artificial Sequence
  Synthetic
cctcagcaatggtctcaa

SEQ ID NO: 30075 - DNA, 18 bp, Artificial Sequence
  Synthetic
agcatccccagaatgttc

SEQ ID NO: 30076 - DNA, 18 bp, Artificial Sequence
  Synthetic
gtaggagtccgtgctttg

SEQ ID NO: 30077 - DNA, 18 bp, Artificial Sequence
  Synthetic
aacagcccataccaaacg

SEQ ID NO: 30078 - DNA, 23 bp, Artificial Sequence
  Synthetic
catgtccccatcttcaataatag

SEQ ID NO: 30079 - DNA, 25 bp, Artificial Sequence
  Synthetic
cagcctttaaataataatggttgtc

SEQ ID NO: 30080 - DNA, 25 bp, Artificial Sequence
  Synthetic
tttctattattattggttcacacgg

SEQ ID NO: 30081 - DNA, 22 bp, Artificial Sequence
  Synthetic
aattgataacacttgccaggat

SEQ ID NO: 30082 - DNA, 20 bp, Artificial Sequence
  Synthetic
accaatactgtccataagcc

SEQ ID NO: 30083 - DNA, 20 bp, Artificial Sequence
  Synthetic
tatgtctatgacgggcctat

SEQ ID NO: 30084 - DNA, 21 bp, Artificial Sequence
  Synthetic
cgatttggaattaggtgtgga

SEQ ID NO: 30085 - DNA, 19 bp, Artificial Sequence
  Synthetic
taggatcacgagccaaggg

SEQ ID NO: 30086 - DNA, 16 bp, Artificial Sequence
  Synthetic
tgggcgcgtctctctg

SEQ ID NO: 30087 - DNA, 16 bp, Artificial Sequence
  Synthetic
atgcgccacacggagg

SEQ ID NO: 30088 - DNA, 17 bp, Artificial Sequence
  Synthetic
aactgtgccctgttgcg

SEQ ID NO: 30089 - DNA, 17 bp, Artificial Sequence
  Synthetic
ctggtccggcagctcta

SEQ ID NO: 30090 - DNA, 18 bp, Artificial Sequence
  Synthetic
tacaccctctctcgcgcc

SEQ ID NO: 30091 - DNA, 19 bp, Artificial Sequence
  Synthetic
tgacgacgtcctggctttc

SEQ ID NO: 30092 - DNA, 17 bp, Artificial Sequence
  Synthetic
tgctggtcggagagtgc

SEQ ID NO: 30093 - DNA, 23 bp, Artificial Sequence
  Synthetic
atacttacttgagtgatggagtt

SEQ ID NO: 30094 - DNA, 24 bp, Artificial Sequence
  Synthetic
agacctattctttgtattgggaaa

SEQ ID NO: 30095 - DNA, 20 bp, Artificial Sequence
  Synthetic
tgttgttcaacattcgcaag

SEQ ID NO: 30096 - DNA, 21 bp, Artificial Sequence
  Synthetic
accggcttaactatacagttt

SEQ ID NO: 30097 - DNA, 18 bp, Artificial Sequence
  Synthetic
tctcggcagtttgtttca

SEQ ID NO: 30098 - DNA, 19 bp, Artificial Sequence
  Synthetic
gtgactatgagcagaccga

SEQ ID NO: 30099 - DNA, 23 bp, Artificial Sequence
  Synthetic
aagttaacctgtgtttttaacga

SEQ ID NO: 30100 - DNA, 20 bp, Artificial Sequence
  Synthetic
tcaacgcctggaaaaaaatt

SEQ ID NO: 30101 - DNA, 18 bp, Artificial Sequence
  Synthetic
ttggagaccgttgaacat

SEQ ID NO: 30102 - DNA, 21 bp, Artificial Sequence
  Synthetic
actcagaatacggtagcattt

SEQ ID NO: 30103 - DNA, 18 bp, Artificial Sequence
  Synthetic
taacgtagtgttgccgga

SEQ ID NO: 30104 - DNA, 19 bp, Artificial Sequence
  Synthetic
ttaactttttcaccacgcc

SEQ ID NO: 30105 - DNA, 21 bp, Artificial Sequence
  Synthetic
agtgcaagttaagcagtttac

SEQ ID NO: 30106 - DNA, 19 bp, Artificial Sequence
  Synthetic
taaaaaaacggccaacctc

SEQ ID NO: 30107 - DNA, 20 bp, Artificial Sequence
  Synthetic
tgtttgagctgaagatggtg

SEQ ID NO: 30108 - DNA, 21 bp, Artificial Sequence
  Synthetic
aggtgttttcggttttcttac

SEQ ID NO: 30109 - DNA, 21 bp, Artificial Sequence
  Synthetic
gtaagataacaggtaccgtgt

SEQ ID NO: 30110 - DNA, 23 bp, Artificial Sequence
  Synthetic
aatacctgtttataaactccgaa

SEQ ID NO: 30111 - DNA, 19 bp, Artificial Sequence
  Synthetic
tgaaatgctacacggacac

SEQ ID NO: 30112 - DNA, 20 bp, Artificial Sequence
  Synthetic
gcccgtctttagaaagagcg

SEQ ID NO: 30113 - DNA, 20 bp, Artificial Sequence
  Synthetic
tggagagaaacgcgaaggga

SEQ ID NO: 30114 - DNA, 16 bp, Artificial Sequence
  Synthetic
tctgacacaggccgcc

SEQ ID NO: 30115 - DNA, 20 bp, Artificial Sequence
  Synthetic
gacagatcttgccggtatcg

SEQ ID NO: 30116 - DNA, 19 bp, Artificial Sequence
  Synthetic
caccctgtgtgtgactgtc

SEQ ID NO: 30117 - DNA, 19 bp, Artificial Sequence
  Synthetic
agttccatgctattcccca

SEQ ID NO: 30118 - DNA, 22 bp, Artificial Sequence
  Synthetic
tgtctatgtaacttctcatccc

SEQ ID NO: 30119 - DNA, 20 bp, Artificial Sequence
  Synthetic
tcttggactttccttcagtc

SEQ ID NO: 30120 - DNA, 25 bp, Artificial Sequence
  Synthetic
actctacatttattgggtattttgg

SEQ ID NO: 30121 - DNA, 22 bp, Artificial Sequence
  Synthetic
tggattttgtttgtaccattca

SEQ ID NO: 30122 - DNA, 22 bp, Artificial Sequence
  Synthetic
cataatgcatcaaacatttggt

SEQ ID NO: 30123 - DNA, 22 bp, Artificial Sequence
  Synthetic
gcaatgttacatttacccaaat

SEQ ID NO: 30124 - DNA, 21 bp, Artificial Sequence
  Synthetic
ggggaatatctcaaacctttc

SEQ ID NO: 30125 - DNA, 20 bp, Artificial Sequence
  Synthetic
tattgctatttccggcttga

SEQ ID NO: 30126 - DNA, 23 bp, Artificial Sequence
  Synthetic
atgtatattctgaaatgggaggc

SEQ ID NO: 30127 - DNA, 24 bp, Artificial Sequence
  Synthetic
ctttgttagtaatctcgtcaatgg

SEQ ID NO: 30128 - DNA, 19 bp, Artificial Sequence
  Synthetic
ggagatagagccggccttg

SEQ ID NO: 30129 - DNA, 19 bp, Artificial Sequence
  Synthetic
tctgtcgctgcgttccatg

SEQ ID NO: 30130 - DNA, 17 bp, Artificial Sequence
  Synthetic
agagcaggagcaggctc

SEQ ID NO: 30131 - DNA, 19 bp, Artificial Sequence
  Synthetic
gatctggccctcaggtgac

SEQ ID NO: 30132 - DNA, 16 bp, Artificial Sequence
  Synthetic
ggcgttcgggggactt

SEQ ID NO: 30133 - DNA, 20 bp, Artificial Sequence
  Synthetic
cacgtcgaacagatgtctga

SEQ ID NO: 30134 - DNA, 18 bp, Artificial Sequence
  Synthetic
gacgatcacccaagccgt

SEQ ID NO: 30135 - DNA, 18 bp, Artificial Sequence
  Synthetic
ctctcgtgccgttgcctt

SEQ ID NO: 30136 - DNA, 19 bp, Artificial Sequence
  Synthetic
gtttaacggcgtgttcgac

SEQ ID NO: 30137 - DNA, 18 bp, Artificial Sequence
  Synthetic
cgtgggggcagaactgag

SEQ ID NO: 30138 - DNA, 18 bp, Artificial Sequence
  Synthetic
gtaagatacggcgtcctg

SEQ ID NO: 30139 - DNA, 23 bp, Artificial Sequence
  Synthetic
gcttatgctatatgaacagactg

SEQ ID NO: 30140 - DNA, 19 bp, Artificial Sequence
  Synthetic
tgtttaagggggttcgttt

SEQ ID NO: 30141 - DNA, 18 bp, Artificial Sequence
  Synthetic
aatcttacttgtcgggcg

SEQ ID NO: 30142 - DNA, 19 bp, Artificial Sequence
  Synthetic
ggtctcgacttcgtgaatg

SEQ ID NO: 30143 - DNA, 20 bp, Artificial Sequence
  Synthetic
tctcgttttttgctgtgaaa

SEQ ID NO: 30144 - DNA, 18 bp, Artificial Sequence
  Synthetic
tatcgtcctccgcaagtt

SEQ ID NO: 30145 - DNA, 20 bp, Artificial Sequence
  Synthetic
ctgtaacagggagaagtttg

SEQ ID NO: 30146 - DNA, 22 bp, Artificial Sequence
  Synthetic
tttcatttgctcttccatatgt

SEQ ID NO: 30147 - DNA, 19 bp, Artificial Sequence
  Synthetic
ttacttgtccaaaggtcga

SEQ ID NO: 30148 - DNA, 18 bp, Artificial Sequence
  Synthetic
atccaaccgcagattgtc

SEQ ID NO: 30149 - DNA, 19 bp, Artificial Sequence
  Synthetic
taattcggtttttaggcgc

SEQ ID NO: 30150 - DNA, 23 bp, Artificial Sequence
  Synthetic
aagttttgtagatatgggcttag

SEQ ID NO: 30151 - DNA, 18 bp, Artificial Sequence
  Synthetic
tagtcgttggtgtcccat

SEQ ID NO: 30152 - DNA, 25 bp, Artificial Sequence
  Synthetic
cttttttaatgaagctgaacaactc

SEQ ID NO: 30153 - DNA, 20 bp, Artificial Sequence
  Synthetic
ttttcagttcaaacgcagac

SEQ ID NO: 30154 - DNA, 25 bp, Artificial Sequence
  Synthetic
cgttagtaaatataacagtaggaga

SEQ ID NO: 30155 - DNA, 22 bp, Artificial Sequence
  Synthetic
caaagatctacactctttgctc

SEQ ID NO: 30156 - DNA, 22 bp, Artificial Sequence
  Synthetic
aataaacttatgctgaaccgag

SEQ ID NO: 30157 - DNA, 18 bp, Artificial Sequence
  Synthetic
taacgacgttgtccacca

SEQ ID NO: 30158 - DNA, 18 bp, Artificial Sequence
  Synthetic
tagagccggccttggaac

SEQ ID NO: 30159 - DNA, 18 bp, Artificial Sequence
  Synthetic
cgtcactcgaggaaacgc

SEQ ID NO: 30160 - DNA, 18 bp, Artificial Sequence
  Synthetic
ggtgactccgcagactgg

SEQ ID NO: 30161 - DNA, 16 bp, Artificial Sequence
  Synthetic
agggtgacgacggacc

SEQ ID NO: 30162 - DNA, 17 bp, Artificial Sequence
  Synthetic
tcgttccgcacatacgc

SEQ ID NO: 30163 - DNA, 18 bp, Artificial Sequence
  Synthetic
atacaactggcaagtgca

SEQ ID NO: 30164 - DNA, 24 bp, Artificial Sequence
  Synthetic
cgatattcttccctcatagacttt

SEQ ID NO: 30165 - DNA, 20 bp, Artificial Sequence
  Synthetic
tgtttcccaacaagagtggc

SEQ ID NO: 30166 - DNA, 21 bp, Artificial Sequence
  Synthetic
agcccttagtagtatcaaggt

SEQ ID NO: 30167 - DNA, 21 bp, Artificial Sequence
  Synthetic
aatttctgtcccaattgctct

SEQ ID NO: 30168 - DNA, 20 bp, Artificial Sequence
  Synthetic
ttgcactggtcacataattc

SEQ ID NO: 30169 - DNA, 20 bp, Artificial Sequence
  Synthetic
caatgtggttggttttttcc

SEQ ID NO: 30170 - DNA, 22 bp, Artificial Sequence
  Synthetic
cagtgacaaaatacacaatgtg

SEQ ID NO: 30171 - DNA, 23 bp, Artificial Sequence
  Synthetic
catcttctgaaactacatcacct

SEQ ID NO: 30172 - DNA, 22 bp, Artificial Sequence
  Synthetic
cactccaaaaagttccttaaac

SEQ ID NO: 30173 - DNA, 24 bp, Artificial Sequence
  Synthetic
gaactttgtaatttaggtggttgt

SEQ ID NO: 30174 - DNA, 25 bp, Artificial Sequence
  Synthetic
cacaatctctaacatatttagcttg

SEQ ID NO: 30175 - DNA, 19 bp, Artificial Sequence
  Synthetic
gcccatttgtcttgctgta

SEQ ID NO: 30176 - DNA, 21 bp, Artificial Sequence
  Synthetic
ttctactgtctttcctccttt

SEQ ID NO: 30177 - DNA, 24 bp, Artificial Sequence
  Synthetic
cttccagttgtattataggtgtag

SEQ ID NO: 30178 - DNA, 20 bp, Artificial Sequence
  Synthetic
gatacgaccactagcctcta

SEQ ID NO: 30179 - DNA, 22 bp, Artificial Sequence
  Synthetic
tctgaaatagtatgcaggattc

SEQ ID NO: 30180 - DNA, 25 bp, Artificial Sequence
  Synthetic
ggtttcagaattaaataaagacgtg

SEQ ID NO: 30181 - DNA, 25 bp, Artificial Sequence
  Synthetic
tcactttttaattctagtacaggac

SEQ ID NO: 30182 - DNA, 23 bp, Artificial Sequence
  Synthetic
acaacacatacatacattccaga

SEQ ID NO: 30183 - DNA, 24 bp, Artificial Sequence
  Synthetic
ccaaactgctattagctaaatgtt

SEQ ID NO: 30184 - DNA, 18 bp, Artificial Sequence
  Synthetic
gaacacacagccaagttg

SEQ ID NO: 30185 - DNA, 22 bp, Artificial Sequence
  Synthetic
cgtttcttatagtcacagtgta

SEQ ID NO: 30186 - DNA, 18 bp, Artificial Sequence
  Synthetic
tgttgttcgtcccgtcta

SEQ ID NO: 30187 - DNA, 19 bp, Artificial Sequence
  Synthetic
ccggcacttctgtatcaat

SEQ ID NO: 30188 - DNA, 20 bp, Artificial Sequence
  Synthetic
tacaatatagcttggcctgc

SEQ ID NO: 30189 - DNA, 22 bp, Artificial Sequence
  Synthetic
tgtgcattactgtctacatctg

SEQ ID NO: 30190 - DNA, 24 bp, Artificial Sequence
  Synthetic
acaattatgttttggtgtaccttg

SEQ ID NO: 30191 - DNA, 18 bp, Artificial Sequence
  Synthetic
gaattttctcctggcacg

SEQ ID NO: 30192 - DNA, 18 bp, Artificial Sequence
  Synthetic
tcccatatgcacttccca

SEQ ID NO: 30193 - DNA, 19 bp, Artificial Sequence
  Synthetic
ttccttgcgacacactctg

SEQ ID NO: 30194 - DNA, 20 bp, Artificial Sequence
  Synthetic
gtaccagtgatacactaggg

SEQ ID NO: 30195 - DNA, 18 bp, Artificial Sequence
  Synthetic
aaacacagaggcagactg

SEQ ID NO: 30196 - DNA, 18 bp, Artificial Sequence
  Synthetic
attgcctgtaccctgaac

SEQ ID NO: 30197 - DNA, 18 bp, Artificial Sequence
  Synthetic
gcctactaaaacgcacac

SEQ ID NO: 30198 - DNA, 20 bp, Artificial Sequence
  Synthetic
taggaggcagataaaccttg

SEQ ID NO: 30199 - DNA, 18 bp, Artificial Sequence
  Synthetic
gtgggtcctgcttttcag

SEQ ID NO: 30200 - DNA, 18 bp, Artificial Sequence
  Synthetic
agaacgtatgctgcaagc

SEQ ID NO: 30201 - DNA, 19 bp, Artificial Sequence
  Synthetic
gcatatcaacatcaaccgg

SEQ ID NO: 30202 - DNA, 20 bp, Artificial Sequence
  Synthetic
ggactcaaagtgagcacacg

SEQ ID NO: 30203 - DNA, 21 bp, Artificial Sequence
  Synthetic
gcatttgctacatcttgagat

SEQ ID NO: 30204 - DNA, 18 bp, Artificial Sequence
  Synthetic
taccagggtagtgcacaa

SEQ ID NO: 30205 - DNA, 19 bp, Artificial Sequence
  Synthetic
aaactaaatcgcagactgc

SEQ ID NO: 30206 - DNA, 25 bp, Artificial Sequence
  Synthetic
catggagtatttattatctgcagtt

SEQ ID NO: 30207 - DNA, 22 bp, Artificial Sequence
  Synthetic
ggttatttctgagtcaaacctg

SEQ ID NO: 30208 - DNA, 21 bp, Artificial Sequence
  Synthetic
ttgtctccatcatatccatca

SEQ ID NO: 30209 - DNA, 25 bp, Artificial Sequence
  Synthetic
gttctttaacactatctacaaaacc

SEQ ID NO: 30210 - DNA, 23 bp, Artificial Sequence
  Synthetic
atttcttaagccatgaatcagac

SEQ ID NO: 30211 - DNA, 18 bp, Artificial Sequence
  Synthetic
tatagctggtggtggtgg

SEQ ID NO: 30212 - DNA, 19 bp, Artificial Sequence
  Synthetic
aatagttgtaccactcccg

SEQ ID NO: 30213 - DNA, 19 bp, Artificial Sequence
  Synthetic
ctctccaagtacctctcac

SEQ ID NO: 30214 - DNA, 25 bp, Artificial Sequence
  Synthetic
ccacagttacttgattattgtacaa

SEQ ID NO: 30215 - DNA, 23 bp, Artificial Sequence
  Synthetic
tctctactctttgcactcttaaa

SEQ ID NO: 30216 - DNA, 20 bp, Artificial Sequence
  Synthetic
accctctgttttacaacgat

SEQ ID NO: 30217 - DNA, 23 bp, Artificial Sequence
  Synthetic
tgttaggaaactgtatacattgt

SEQ ID NO: 30218 - DNA, 23 bp, Artificial Sequence
  Synthetic
ttaaaacagtattttggctctgt

SEQ ID NO: 30219 - DNA, 18 bp, Artificial Sequence
  Synthetic
tccgtcgtttggctcctc

SEQ ID NO: 30220 - DNA, 18 bp, Artificial Sequence
  Synthetic
gcccatgtatcaccttct

SEQ ID NO: 30221 - DNA, 20 bp, Artificial Sequence
  Synthetic
ccacatctaaagcaaaccgt

SEQ ID NO: 30222 - DNA, 18 bp, Artificial Sequence
  Synthetic
aattgtagctcgctcacc

SEQ ID NO: 30223 - DNA, 20 bp, Artificial Sequence
  Synthetic
acagccatctgcaaaaaatt

SEQ ID NO: 30224 - DNA, 22 bp, Artificial Sequence
  Synthetic
tgaacacttgattctgtttagg

SEQ ID NO: 30225 - DNA, 18 bp, Artificial Sequence
  Synthetic
tctttgcaaccaaaacgg

SEQ ID NO: 30226 - DNA, 18 bp, Artificial Sequence
  Synthetic
aatcgtctgcccaaagac

SEQ ID NO: 30227 - DNA, 20 bp, Artificial Sequence
  Synthetic
cacacgagactcttcacacc

SEQ ID NO: 30228 - DNA, 18 bp, Artificial Sequence
  Synthetic
tgagttttcatgcgagcc

SEQ ID NO: 30229 - DNA, 25 bp, Artificial Sequence
  Synthetic
cagtatagagtttagtgtatcttgt

SEQ ID NO: 30230 - DNA, 22 bp, Artificial Sequence
  Synthetic
gaattttgtggcattacattgg

SEQ ID NO: 30231 - DNA, 25 bp, Artificial Sequence
  Synthetic
ggtacacaattaatgtatggtacaa

SEQ ID NO: 30232 - DNA, 22 bp, Artificial Sequence
  Synthetic
gacactaaagtctggtagaaga

SEQ ID NO: 30233 - DNA, 24 bp, Artificial Sequence
  Synthetic
ctgtactaaagctatcacaaacac

SEQ ID NO: 30234 - DNA, 18 bp, Artificial Sequence
  Synthetic
atggtggttgaagatgcc

SEQ ID NO: 30235 - DNA, 19 bp, Artificial Sequence
  Synthetic
ccaggtggtacaaacatga

SEQ ID NO: 30236 - DNA, 21 bp, Artificial Sequence
  Synthetic
gtgtcttccatagctctgaag

SEQ ID NO: 30237 - DNA, 18 bp, Artificial Sequence
  Synthetic
taagtgcgcattcctgta

SEQ ID NO: 30238 - DNA, 20 bp, Artificial Sequence
  Synthetic
acaatgtccttcaccaatca

SEQ ID NO: 30239 - DNA, 22 bp, Artificial Sequence
  Synthetic
gccatttaactacctttgaagt

SEQ ID NO: 30240 - DNA, 18 bp, Artificial Sequence
  Synthetic
atgccaatccactcaagg

SEQ ID NO: 30241 - DNA, 20 bp, Artificial Sequence
  Synthetic
gacaccatctgacagaacat

SEQ ID NO: 30242 - DNA, 20 bp, Artificial Sequence
  Synthetic
gtggtggcttactacagttc

SEQ ID NO: 30243 - DNA, 19 bp, Artificial Sequence
  Synthetic
tcaattgagccatggactg

SEQ ID NO: 30244 - DNA, 23 bp, Artificial Sequence
  Synthetic
gtaatgatatggcagtttcttct

SEQ ID NO: 30245 - DNA, 25 bp, Artificial Sequence
  Synthetic
tcagcaaaatatttcctaagtagtg

SEQ ID NO: 30246 - DNA, 19 bp, Artificial Sequence
  Synthetic
gttctgggttgatgtcaag

SEQ ID NO: 30247 - DNA, 19 bp, Artificial Sequence
  Synthetic
tccacaatcctggtcttac

SEQ ID NO: 30248 - DNA, 18 bp, Artificial Sequence
  Synthetic
cgctttaaaccacactgg

SEQ ID NO: 30249 - DNA, 19 bp, Artificial Sequence
  Synthetic
acaaacacaacgaatggac

SEQ ID NO: 30250 - DNA, 20 bp, Artificial Sequence
  Synthetic
ttctcttgtctgctgtgatt

SEQ ID NO: 30251 - DNA, 23 bp, Artificial Sequence
  Synthetic
catgttttaacctttcaaccttc

SEQ ID NO: 30252 - DNA, 19 bp, Artificial Sequence
  Synthetic
gaaatctggttttgcggac

SEQ ID NO: 30253 - DNA, 23 bp, Artificial Sequence
  Synthetic
cttactatcaactgaatcagcct

SEQ ID NO: 30254 - DNA, 21 bp, Artificial Sequence
  Synthetic
catccccatgacattgtcaat

SEQ ID NO: 30255 - DNA, 18 bp, Artificial Sequence
  Synthetic
caggaccgttgatttccc

SEQ ID NO: 30256 - DNA, 19 bp, Artificial Sequence
  Synthetic
ttacttgcaaccgcccaaa

SEQ ID NO: 30257 - DNA, 19 bp, Artificial Sequence
  Synthetic
ggcactcaagagtagtctc

SEQ ID NO: 30258 - DNA, 18 bp, Artificial Sequence
  Synthetic
taggtataggcggcagag

SEQ ID NO: 30259 - DNA, 23 bp, Artificial Sequence
  Synthetic
cttactgtaaataaagctgaagc

SEQ ID NO: 30260 - DNA, 19 bp, Artificial Sequence
  Synthetic
ccttgcatgcgtcacacat

SEQ ID NO: 30261 - DNA, 24 bp, Artificial Sequence
  Synthetic
tttcaaattcctcgctataatcct

SEQ ID NO: 30262 - DNA, 20 bp, Artificial Sequence
  Synthetic
gcctccctcatttcttcctc

SEQ ID NO: 30263 - DNA, 19 bp, Artificial Sequence
  Synthetic
aggctgacttgtccagagt

SEQ ID NO: 30264 - DNA, 20 bp, Artificial Sequence
  Synthetic
gtgcagccctttaccacatt

SEQ ID NO: 30265 - DNA, 18 bp, Artificial Sequence
  Synthetic
gctgcatcctggtgtgtc

SEQ ID NO: 30266 - DNA, 16 bp, Artificial Sequence
  Synthetic
tgtcatggcggctgcg

SEQ ID NO: 30267 - DNA, 20 bp, Artificial Sequence
  Synthetic
cccctgctatgactggatca

SEQ ID NO: 30268 - DNA, 20 bp, Artificial Sequence
  Synthetic
gcattcccttccaagttgca

SEQ ID NO: 30269 - DNA, 19 bp, Artificial Sequence
  Synthetic
gacggcagttgcatctcct

SEQ ID NO: 30270 - DNA, 17 bp, Artificial Sequence
  Synthetic
aggacatgacgctggcc

SEQ ID NO: 30271 - DNA, 16 bp, Artificial Sequence
  Synthetic
tgcgagaccgtctgcg

SEQ ID NO: 30272 - DNA, 19 bp, Artificial Sequence
  Synthetic
gaccccctggtggaaaacg

SEQ ID NO: 30273 - DNA, 19 bp, Artificial Sequence
  Synthetic
tgccaccaagcttgacaat

SEQ ID NO: 30274 - DNA, 17 bp, Artificial Sequence
  Synthetic
actaacgagcccctgcg

SEQ ID NO: 30275 - DNA, 16 bp, Artificial Sequence
  Synthetic
ctttcgcgccgagcag

SEQ ID NO: 30276 - DNA, 18 bp, Artificial Sequence
  Synthetic
tgcgacgactcggacttt

SEQ ID NO: 30277 - DNA, 18 bp, Artificial Sequence
  Synthetic
ttcaggagtgggcactgg

SEQ ID NO: 30278 - DNA, 20 bp, Artificial Sequence
  Synthetic
gcggctctttgttacctacg

SEQ ID NO: 30279 - DNA, 18 bp, Artificial Sequence
  Synthetic
tctccgtcctcgaggagc

SEQ ID NO: 30280 - DNA, 19 bp, Artificial Sequence
  Synthetic
ctaccaggacaactcgggc

SEQ ID NO: 30281 - DNA, 15 bp, Artificial Sequence
  Synthetic
tgcgccgctggatca

SEQ ID NO: 30282 - DNA, 18 bp, Artificial Sequence
  Synthetic
caccgaaaccatgcgtcg

SEQ ID NO: 30283 - DNA, 20 bp, Artificial Sequence
  Synthetic
cgcaattctaacagcgtcca

SEQ ID NO: 30284 - DNA, 20 bp, Artificial Sequence
  Synthetic
tgttgacatggacgacttcc

SEQ ID NO: 30285 - DNA, 16 bp, Artificial Sequence
  Synthetic
tctggaaccgcgtccg

SEQ ID NO: 30286 - DNA, 16 bp, Artificial Sequence
  Synthetic
ggcggctatcgggctt

SEQ ID NO: 30287 - DNA, 16 bp, Artificial Sequence
  Synthetic
ttgtacagcgccggcg

SEQ ID NO: 30288 - DNA, 16 bp, Artificial Sequence
  Synthetic
tgcacgatggcctccg

SEQ ID NO: 30289 - DNA, 17 bp, Artificial Sequence
  Synthetic
acggccttgtggatgcg

SEQ ID NO: 30290 - DNA, 16 bp, Artificial Sequence
  Synthetic
gttgcatcgcggcctc

SEQ ID NO: 30291 - DNA, 16 bp, Artificial Sequence
  Synthetic
tgaaccgctcgcgctg

SEQ ID NO: 30292 - DNA, 18 bp, Artificial Sequence
  Synthetic
gtgaagggtgcgatcagc

SEQ ID NO: 30293 - DNA, 16 bp, Artificial Sequence
  Synthetic
gccccctcctgcatca

SEQ ID NO: 30294 - DNA, 19 bp, Artificial Sequence
  Synthetic
cccacagaaacccgtcgtt

SEQ ID NO: 30295 - DNA, 18 bp, Artificial Sequence
  Synthetic
tcccgcccaagtccaaca

SEQ ID NO: 30296 - DNA, 19 bp, Artificial Sequence
  Synthetic
aatgctgtttctgccctcc

SEQ ID NO: 30297 - DNA, 18 bp, Artificial Sequence
  Synthetic
ggctctcggtgaagtcca

SEQ ID NO: 30298 - DNA, 21 bp, Artificial Sequence
  Synthetic
caatctctagctccttctcag

SEQ ID NO: 30299 - DNA, 20 bp, Artificial Sequence
  Synthetic
ggcgagatcgttgtaaaagc

SEQ ID NO: 30300 - DNA, 20 bp, Artificial Sequence
  Synthetic
tgttattgctgggcgagatg

SEQ ID NO: 30301 - DNA, 16 bp, Artificial Sequence
  Synthetic
tagtcgcgcgcgtcag

SEQ ID NO: 30302 - DNA, 19 bp, Artificial Sequence
  Synthetic
gatcagggacgaggaggac

SEQ ID NO: 30303 - DNA, 20 bp, Artificial Sequence
  Synthetic
atagctacgcttgctcctga

SEQ ID NO: 30304 - DNA, 16 bp, Artificial Sequence
  Synthetic
tccacggtctgcacgc

SEQ ID NO: 30305 - DNA, 20 bp, Artificial Sequence
  Synthetic
tggaaggatgcaacacgtag

SEQ ID NO: 30306 - DNA, 17 bp, Artificial Sequence
  Synthetic
aggaacccgccactcag

SEQ ID NO: 30307 - DNA, 18 bp, Artificial Sequence
  Synthetic
taggtccggagcgttgag

SEQ ID NO: 30308 - DNA, 18 bp, Artificial Sequence
  Synthetic
aagggcctcctcgtacga

SEQ ID NO: 30309 - DNA, 19 bp, Artificial Sequence
  Synthetic
cttaatagcatcggcggcg

SEQ ID NO: 30310 - DNA, 18 bp, Artificial Sequence
  Synthetic
gatccacgggcacaaagc

SEQ ID NO: 30311 - DNA, 21 bp, Artificial Sequence
  Synthetic
ttcgtttgcatagataggctc

SEQ ID NO: 30312 - DNA, 19 bp, Artificial Sequence
  Synthetic
ttccacaccgtgattctca

SEQ ID NO: 30313 - DNA, 20 bp, Artificial Sequence
  Synthetic
cgccaatgttaacgtaagcg

SEQ ID NO: 30314 - DNA, 16 bp, Artificial Sequence
  Synthetic
tgtgcgccatggggaa

SEQ ID NO: 30315 - DNA, 19 bp, Artificial Sequence
  Synthetic
gccctggtagccaatgttg

SEQ ID NO: 30316 - DNA, 16 bp, Artificial Sequence
  Synthetic
tgggtgacggagggca

SEQ ID NO: 30317 - DNA, 15 bp, Artificial Sequence
  Synthetic
tcgcgcacaatggcc

SEQ ID NO: 30318 - DNA, 18 bp, Artificial Sequence
  Synthetic
tgctcgaggctgagacag

SEQ ID NO: 30319 - DNA, 19 bp, Artificial Sequence
  Synthetic
agcgaaagtagggggagtg

SEQ ID NO: 30320 - DNA, 18 bp, Artificial Sequence
  Synthetic
cggtcccaactgcgattt

SEQ ID NO: 30321 - DNA, 18 bp, Artificial Sequence
  Synthetic
ttagcgggaaaagctgcg

SEQ ID NO: 30322 - DNA, 17 bp, Artificial Sequence
  Synthetic
aactgggagtgcaccgg

SEQ ID NO: 30323 - DNA, 18 bp, Artificial Sequence
  Synthetic
tctgaacgtgtgcaaccc

SEQ ID NO: 30324 - DNA, 16 bp, Artificial Sequence
  Synthetic
aaaggagcccctcgcc

SEQ ID NO: 30325 - DNA, 19 bp, Artificial Sequence
  Synthetic
agcagcacatcctcctgtc

SEQ ID NO: 30326 - DNA, 18 bp, Artificial Sequence
  Synthetic
gatccatgatgcgacgca

SEQ ID NO: 30327 - DNA, 17 bp, Artificial Sequence
  Synthetic
agcacagtctgccccag

SEQ ID NO: 30328 - DNA, 19 bp, Artificial Sequence
  Synthetic
ctcataaagtcgggcagcc

SEQ ID NO: 30329 - DNA, 16 bp, Artificial Sequence
  Synthetic
ggagctgggggttgca

SEQ ID NO: 30330 - DNA, 20 bp, Artificial Sequence
  Synthetic
ccaggtagacccctttaccc

SEQ ID NO: 30331 - DNA, 18 bp, Artificial Sequence
  Synthetic
tgtgggccctccatgatc

SEQ ID NO: 30332 - DNA, 20 bp, Artificial Sequence
  Synthetic
gctgcagctgatcttcgttt

SEQ ID NO: 30333 - DNA, 20 bp, Artificial Sequence
  Synthetic
agttgtatgcctttgcctcg

SEQ ID NO: 30334 - DNA, 18 bp, Artificial Sequence
  Synthetic
ttcagtcgtagccgtcga

SEQ ID NO: 30335 - DNA, 19 bp, Artificial Sequence
  Synthetic
aaagttcacctgttcctgg

SEQ ID NO: 30336 - DNA, 24 bp, Artificial Sequence
  Synthetic
tactgtacatataacactcctctc

SEQ ID NO: 30337 - DNA, 21 bp, Artificial Sequence
  Synthetic
agcaatttttccttctgctca

SEQ ID NO: 30338 - DNA, 23 bp, Artificial Sequence
  Synthetic
tctacttttcccttactgtcatg

SEQ ID NO: 30339 - DNA, 18 bp, Artificial Sequence
  Synthetic
ttgccatttggaggtcca

SEQ ID NO: 30340 - DNA, 18 bp, Artificial Sequence
  Synthetic
atcactcccaccacgatt

SEQ ID NO: 30341 - DNA, 18 bp, Artificial Sequence
  Synthetic
ggctgaggattcccgatt

SEQ ID NO: 30342 - DNA, 20 bp, Artificial Sequence
  Synthetic
tgtattcgggactgtggtga

SEQ ID NO: 30343 - DNA, 18 bp, Artificial Sequence
  Synthetic
aactgatttctgcgggga

SEQ ID NO: 30344 - DNA, 20 bp, Artificial Sequence
  Synthetic
gcaaagggtcttaaggaggg

SEQ ID NO: 30345 - DNA, 22 bp, Artificial Sequence
  Synthetic
caaaggtggttcagtattaact

SEQ ID NO: 30346 - DNA, 21 bp, Artificial Sequence
  Synthetic
atcctgatcaattctgcaatt

SEQ ID NO: 30347 - DNA, 21 bp, Artificial Sequence
  Synthetic
gtattcacatccagtttcctg

SEQ ID NO: 30348 - DNA, 18 bp, Artificial Sequence
  Synthetic
aatcaccgacccccgttt

SEQ ID NO: 30349 - DNA, 20 bp, Artificial Sequence
  Synthetic
cagtgtgtttataaggggca

SEQ ID NO: 30350 - DNA, 25 bp, Artificial Sequence
  Synthetic
gcagattatcataatgtaagttctg

SEQ ID NO: 30351 - DNA, 19 bp, Artificial Sequence
  Synthetic
cctgcgtgacttgcacttt

SEQ ID NO: 30352 - DNA, 22 bp, Artificial Sequence
  Synthetic
gtttctattatgaaggtttgcc

SEQ ID NO: 30353 - DNA, 20 bp, Artificial Sequence
  Synthetic
tctactaaccatgcttcagc

SEQ ID NO: 30354 - DNA, 20 bp, Artificial Sequence
  Synthetic
tgtactcgttcctactggat

SEQ ID NO: 30355 - DNA, 18 bp, Artificial Sequence
  Synthetic
ggaagtgtgtttgcgaaa

SEQ ID NO: 30356 - DNA, 19 bp, Artificial Sequence
  Synthetic
gggcctaatgtgaagacag

SEQ ID NO: 30357 - DNA, 25 bp, Artificial Sequence
  Synthetic
gcttctaatctattgaagaatcctt

SEQ ID NO: 30358 - DNA, 22 bp, Artificial Sequence
  Synthetic
ccatgtccaaatatgttcttcc

SEQ ID NO: 30359 - DNA, 18 bp, Artificial Sequence
  Synthetic
tcttctgcaccacgaatc

SEQ ID NO: 30360 - DNA, 24 bp, Artificial Sequence
  Synthetic
cttctattgtccaagtatcctgtt

SEQ ID NO: 30361 - DNA, 18 bp, Artificial Sequence
  Synthetic
tatcgtcggctttgcatg

SEQ ID NO: 30362 - DNA, 20 bp, Artificial Sequence
  Synthetic
tgcccatattctcaggtaga

SEQ ID NO: 30363 - DNA, 18 bp, Artificial Sequence
  Synthetic
ttacgcttgatggtcgtc

SEQ ID NO: 30364 - DNA, 21 bp, Artificial Sequence
  Synthetic
tggactttttgtgttgttgtt

SEQ ID NO: 30365 - DNA, 21 bp, Artificial Sequence
  Synthetic
ctctcttatcaagtcaggctt

SEQ ID NO: 30366 - DNA, 23 bp, Artificial Sequence
  Synthetic
atctcctaccttgactattctga

SEQ ID NO: 30367 - DNA, 23 bp, Artificial Sequence
  Synthetic
ctagagctactttattggcatta

SEQ ID NO: 30368 - DNA, 18 bp, Artificial Sequence
  Synthetic
aacggggaggattccttt

SEQ ID NO: 30369 - DNA, 18 bp, Artificial Sequence
  Synthetic
ttggaacacagcatcgac

SEQ ID NO: 30370 - DNA, 23 bp, Artificial Sequence
  Synthetic
ttgcttttgttcttgtttgtgat

SEQ ID NO: 30371 - DNA, 18 bp, Artificial Sequence
  Synthetic
tcagctaatgcaatgccc

SEQ ID NO: 30372 - DNA, 25 bp, Artificial Sequence
  Synthetic
cctggtatttctgataaaattggta

SEQ ID NO: 30373 - DNA, 23 bp, Artificial Sequence
  Synthetic
cccttttattggcatatagttct

SEQ ID NO: 30374 - DNA, 24 bp, Artificial Sequence
  Synthetic
ccaatatgaactatttgttttccc

SEQ ID NO: 30375 - DNA, 25 bp, Artificial Sequence
  Synthetic
gataatgaaggtagtctaacacatc

SEQ ID NO: 30376 - DNA, 19 bp, Artificial Sequence
  Synthetic
ccttcactcgagtagtctg

SEQ ID NO: 30377 - DNA, 23 bp, Artificial Sequence
  Synthetic
tgattaacattggtacatctgtt

SEQ ID NO: 30378 - DNA, 18 bp, Artificial Sequence
  Synthetic
gacaggacttcatgaggc

SEQ ID NO: 30379 - DNA, 25 bp, Artificial Sequence
  Synthetic
gagtgatacatgatgtagtagtgta

SEQ ID NO: 30380 - DNA, 24 bp, Artificial Sequence
  Synthetic
tcagagactgaaaaaatggatctt

SEQ ID NO: 30381 - DNA, 24 bp, Artificial Sequence
  Synthetic
agtgataaaggttctagtagtgat

SEQ ID NO: 30382 - DNA, 20 bp, Artificial Sequence
  Synthetic
atcttggaacacctgagaca

SEQ ID NO: 30383 - DNA, 22 bp, Artificial Sequence
  Synthetic
gtgatttcttcatagacgtgag

SEQ ID NO: 30384 - DNA, 21 bp, Artificial Sequence
  Synthetic
acctgctttgatgaatctctt

SEQ ID NO: 30385 - DNA, 23 bp, Artificial Sequence
  Synthetic
tttacatatttctgagccttcaa

SEQ ID NO: 30386 - DNA, 22 bp, Artificial Sequence
  Synthetic
gtagcagtatctctcaatctgt

SEQ ID NO: 30387 - DNA, 24 bp, Artificial Sequence
  Synthetic
ccagaatcgtttgaatattttagg

SEQ ID NO: 30388 - DNA, 18 bp, Artificial Sequence
  Synthetic
cccttaacccccagaagg

SEQ ID NO: 30389 - DNA, 19 bp, Artificial Sequence
  Synthetic
gttcatgcagggtcctaat

SEQ ID NO: 30390 - DNA, 21 bp, Artificial Sequence
  Synthetic
attgatgtgttctgttgactg

SEQ ID NO: 30391 - DNA, 18 bp, Artificial Sequence
  Synthetic
tatagtgttggctagcgc

SEQ ID NO: 30392 - DNA, 25 bp, Artificial Sequence
  Synthetic
ttatcagatagcttctcttgttcaa

SEQ ID NO: 30393 - DNA, 21 bp, Artificial Sequence
  Synthetic
ctcattccatttggtgttgtc

SEQ ID NO: 30394 - DNA, 25 bp, Artificial Sequence
  Synthetic
ggttgattcattaaagtatttcagg

SEQ ID NO: 30395 - DNA, 19 bp, Artificial Sequence
  Synthetic
cctgcttgtattccctcat

SEQ ID NO: 30396 - DNA, 18 bp, Artificial Sequence
  Synthetic
gttgaagagccatttggg

SEQ ID NO: 30397 - DNA, 21 bp, Artificial Sequence
  Synthetic
cattaccacagcattgtttac

SEQ ID NO: 30398 - DNA, 18 bp, Artificial Sequence
  Synthetic
aatccgagccctagacac

SEQ ID NO: 30399 - DNA, 23 bp, Artificial Sequence
  Synthetic
agcaattcttctgttgttaattc

SEQ ID NO: 30400 - DNA, 19 bp, Artificial Sequence
  Synthetic
gcctgtacctgatgctcct

SEQ ID NO: 30401 - DNA, 18 bp, Artificial Sequence
  Synthetic
tgcaccaccagcctaact

SEQ ID NO: 30402 - DNA, 18 bp, Artificial Sequence
  Synthetic
tttacagcctctgccaca

SEQ ID NO: 30403 - DNA, 18 bp, Artificial Sequence
  Synthetic
gtttcgccatacacctcg

SEQ ID NO: 30404 - DNA, 23 bp, Artificial Sequence
  Synthetic
atgcttacacattgtaattgcat

SEQ ID NO: 30405 - DNA, 19 bp, Artificial Sequence
  Synthetic
accaaaaatggctgcttga

SEQ ID NO: 30406 - DNA, 21 bp, Artificial Sequence
  Synthetic
taacattgcattttccaaacg

SEQ ID NO: 30407 - DNA, 22 bp, Artificial Sequence
  Synthetic
caaatttaactgttagtctgcg

SEQ ID NO: 30408 - DNA, 19 bp, Artificial Sequence
  Synthetic
acatatgagcagcagtgta

SEQ ID NO: 30409 - DNA, 18 bp, Artificial Sequence
  Synthetic
tagagggatcggcagcac

SEQ ID NO: 30410 - DNA, 20 bp, Artificial Sequence
  Synthetic
tgtgcattgggatttcctca

SEQ ID NO: 30411 - DNA, 20 bp, Artificial Sequence
  Synthetic
gccctgtactgtaagtgtgg

SEQ ID NO: 30412 - DNA, 18 bp, Artificial Sequence
  Synthetic
tataccttgccgtcacca

SEQ ID NO: 30413 - DNA, 20 bp, Artificial Sequence
  Synthetic
attagggtcaggaagctgta

SEQ ID NO: 30414 - DNA, 20 bp, Artificial Sequence
  Synthetic
taataagagtcaggcagtgc

SEQ ID NO: 30415 - DNA, 18 bp, Artificial Sequence
  Synthetic
gggggatgtagcagtaca

SEQ ID NO: 30416 - DNA, 21 bp, Artificial Sequence
  Synthetic
gtggaaaacttgtctcgtaaa

SEQ ID NO: 30417 - DNA, 18 bp, Artificial Sequence
  Synthetic
tcatacaaaccaggcacc

SEQ ID NO: 30418 - DNA, 20 bp, Artificial Sequence
  Synthetic
caacaaaaaaggcgggagac

SEQ ID NO: 30419 - DNA, 20 bp, Artificial Sequence
  Synthetic
agtttcctggctagaaaagt

SEQ ID NO: 30420 - DNA, 18 bp, Artificial Sequence
  Synthetic
gggtttggacaggacttt

SEQ ID NO: 30421 - DNA, 19 bp, Artificial Sequence
  Synthetic
ggctgttcacagttggtat

SEQ ID NO: 30422 - DNA, 16 bp, Artificial Sequence
  Synthetic
atgggggatgcggagg

SEQ ID NO: 30423 - DNA, 18 bp, Artificial Sequence
  Synthetic
taggggccaatgggaggc

SEQ ID NO: 30424 - DNA, 19 bp, Artificial Sequence
  Synthetic
ttgactttcaaacaacccg

SEQ ID NO: 30425 - DNA, 19 bp, Artificial Sequence
  Synthetic
ttctaagtaagcgccccaa

SEQ ID NO: 30426 - DNA, 16 bp, Artificial Sequence
  Synthetic
acccgctgaacccacc

SEQ ID NO: 30427 - DNA, 16 bp, Artificial Sequence
  Synthetic
attcagcggccccgtg

SEQ ID NO: 30428 - DNA, 20 bp, Artificial Sequence
  Synthetic
gccccaccttatcgttcaag

SEQ ID NO: 30429 - DNA, 18 bp, Artificial Sequence
  Synthetic
ccgccttctgccatggta

SEQ ID NO: 30430 - DNA, 19 bp, Artificial Sequence
  Synthetic
gccccccttggtagatgtt

SEQ ID NO: 30431 - DNA, 18 bp, Artificial Sequence
  Synthetic
gtttcgggcgaacgtgag

SEQ ID NO: 30432 - DNA, 20 bp, Artificial Sequence
  Synthetic
ctacggatcatgctctcacc

SEQ ID NO: 30433 - DNA, 18 bp, Artificial Sequence
  Synthetic
caggagaacgcattcggc

SEQ ID NO: 30434 - DNA, 18 bp, Artificial Sequence
  Synthetic
ccgttcccttttcagcgc

SEQ ID NO: 30435 - DNA, 20 bp, Artificial Sequence
  Synthetic
gtacttatggcagcctttgt

SEQ ID NO: 30436 - DNA, 16 bp, Artificial Sequence
  Synthetic
gtccggacggccttga

SEQ ID NO: 30437 - DNA, 20 bp, Artificial Sequence
  Synthetic
ggtcacatctcacgcatacg

SEQ ID NO: 30438 - DNA, 16 bp, Artificial Sequence
  Synthetic
atacccccacacggcg

SEQ ID NO: 30439 - DNA, 17 bp, Artificial Sequence
  Synthetic
tgcaggagtggacgctg

SEQ ID NO: 30440 - DNA, 20 bp, Artificial Sequence
  Synthetic
cgttgaatctctacacggca

SEQ ID NO: 30441 - DNA, 18 bp, Artificial Sequence
  Synthetic
cgctggcaattgacctgc

SEQ ID NO: 30442 - DNA, 16 bp, Artificial Sequence
  Synthetic
ggctcctcagggtgct

SEQ ID NO: 30443 - DNA, 18 bp, Artificial Sequence
  Synthetic
gcccccagttggattccg

SEQ ID NO: 30444 - DNA, 18 bp, Artificial Sequence
  Synthetic
cgtccccgtggatacctg

SEQ ID NO: 30445 - DNA, 20 bp, Artificial Sequence
  Synthetic
ccgctattacaatgttggcg

SEQ ID NO: 30446 - DNA, 20 bp, Artificial Sequence
  Synthetic
cggaattggagtctccggat

SEQ ID NO: 30447 - DNA, 20 bp, Artificial Sequence
  Synthetic
cggactggtccatgtgttcc

SEQ ID NO: 30448 - DNA, 20 bp, Artificial Sequence
  Synthetic
attccaagcaggggtttagc

SEQ ID NO: 30449 - DNA, 20 bp, Artificial Sequence
  Synthetic
gctttggagaacccctttgg

SEQ ID NO: 30450 - DNA, 19 bp, Artificial Sequence
  Synthetic
gggcgccattactcgaatg

SEQ ID NO: 30451 - DNA, 17 bp, Artificial Sequence
  Synthetic
tgcagtgtcccaacccg

SEQ ID NO: 30452 - DNA, 17 bp, Artificial Sequence
  Synthetic
acgccatgcttgggtca

SEQ ID NO: 30453 - DNA, 19 bp, Artificial Sequence
  Synthetic
cagtcgaacagggtgttgg

SEQ ID NO: 30454 - DNA, 19 bp, Artificial Sequence
  Synthetic
gagcagcagcaggatgagc

SEQ ID NO: 30455 - DNA, 20 bp, Artificial Sequence
  Synthetic
agtcctactttaccggtggc

SEQ ID NO: 30456 - DNA, 20 bp, Artificial Sequence
  Synthetic
aacccgctcgaacttatggt

SEQ ID NO: 30457 - DNA, 20 bp, Artificial Sequence
  Synthetic
tggaggtccttcccttcaac

SEQ ID NO: 30458 - DNA, 16 bp, Artificial Sequence
  Synthetic
taactggcgccgtggc

SEQ ID NO: 30459 - DNA, 16 bp, Artificial Sequence
  Synthetic
aacaggctggcgtggg

SEQ ID NO: 30460 - DNA, 16 bp, Artificial Sequence
  Synthetic
tgagcccacggacgga

SEQ ID NO: 30461 - DNA, 21 bp, Artificial Sequence
  Synthetic
atatgtcagcctctgataacg

SEQ ID NO: 30462 - DNA, 16 bp, Artificial Sequence
  Synthetic
tcctcctcggtcccgt

SEQ ID NO: 30463 - DNA, 20 bp, Artificial Sequence
  Synthetic
cctgactgtggagtgtgtac

SEQ ID NO: 30464 - DNA, 23 bp, Artificial Sequence
  Synthetic
ggtcatatgcatactgtaccata

SEQ ID NO: 30465 - DNA, 19 bp, Artificial Sequence
  Synthetic
taggaactgcaacaagctc

SEQ ID NO: 30466 - DNA, 23 bp, Artificial Sequence
  Synthetic
gcaaaaggaaatggattcttaaa

SEQ ID NO: 30467 - DNA, 19 bp, Artificial Sequence
  Synthetic
catgcctccgtgctatagg

SEQ ID NO: 30468 - DNA, 16 bp, Artificial Sequence
  Synthetic
caacgcttgggtgggc

SEQ ID NO: 30469 - DNA, 23 bp, Artificial Sequence
  Synthetic
ttgaaatgtattggaccatatgt

SEQ ID NO: 30470 - DNA, 22 bp, Artificial Sequence
  Synthetic
gcagcaaatacaaaaaaaacac

SEQ ID NO: 30471 - DNA, 20 bp, Artificial Sequence
  Synthetic
tggctcagtgtatagtgggt

SEQ ID NO: 30472 - DNA, 18 bp, Artificial Sequence
  Synthetic
tagatgcggaggtggcag

SEQ ID NO: 30473 - DNA, 18 bp, Artificial Sequence
  Synthetic
cccacagtgagaagccta

SEQ ID NO: 30474 - DNA, 18 bp, Artificial Sequence
  Synthetic
atttgttccctacgcagc

SEQ ID NO: 30475 - DNA, 18 bp, Artificial Sequence
  Synthetic
ctgtaaactggcagacgg

SEQ ID NO: 30476 - DNA, 18 bp, Artificial Sequence
  Synthetic
ttaagctgggttggcaac

SEQ ID NO: 30477 - DNA, 22 bp, Artificial Sequence
  Synthetic
ggactcaaagctaatactgaat

SEQ ID NO: 30478 - DNA, 23 bp, Artificial Sequence
  Synthetic
ccaaatgattctttaaactttgc

SEQ ID NO: 30479 - DNA, 22 bp, Artificial Sequence
  Synthetic
aactgaaatgtcattaccatct

SEQ ID NO: 30480 - DNA, 21 bp, Artificial Sequence
  Synthetic
ttttctctgccaaattcagaa

SEQ ID NO: 30481 - DNA, 20 bp, Artificial Sequence
  Synthetic
ccgatatctgcgttttccgt

SEQ ID NO: 30482 - DNA, 18 bp, Artificial Sequence
  Synthetic
cacttccacctcccaaag

SEQ ID NO: 30483 - DNA, 19 bp, Artificial Sequence
  Synthetic
gctgcacttctagtactgc

SEQ ID NO: 30484 - DNA, 22 bp, Artificial Sequence
  Synthetic
tagttcctaatctgctaagcct

SEQ ID NO: 30485 - DNA, 21 bp, Artificial Sequence
  Synthetic
tcattggaagcaaaatcatct

SEQ ID NO: 30486 - DNA, 20 bp, Artificial Sequence
  Synthetic
agccttagtcctactgtcag

SEQ ID NO: 30487 - DNA, 23 bp, Artificial Sequence
  Synthetic
ctactattaaaagctgggtttgt

SEQ ID NO: 30488 - DNA, 21 bp, Artificial Sequence
  Synthetic
tcaaaatatcaggccacttac

SEQ ID NO: 30489 - DNA, 20 bp, Artificial Sequence
  Synthetic
gtaagggcgatttaggatca

SEQ ID NO: 30490 - DNA, 25 bp, Artificial Sequence
  Synthetic
ggttattcctttgtttaacaatcct

SEQ ID NO: 30491 - DNA, 18 bp, Artificial Sequence
  Synthetic
caaaagcagggtggagtg

SEQ ID NO: 30492 - DNA, 20 bp, Artificial Sequence
  Synthetic
ggagaattacccctcattct

SEQ ID NO: 30493 - DNA, 20 bp, Artificial Sequence
  Synthetic
ttcacagtcctcagttaact

SEQ ID NO: 30494 - DNA, 19 bp, Artificial Sequence
  Synthetic
gtaaaagcaagcgacatgc

SEQ ID NO: 30495 - DNA, 23 bp, Artificial Sequence
  Synthetic
tctgaatcttctgtaaatccatt

SEQ ID NO: 30496 - DNA, 19 bp, Artificial Sequence
  Synthetic
tgtaagtcgcgagagaccc

SEQ ID NO: 30497 - DNA, 20 bp, Artificial Sequence
  Synthetic
acgtcttttattggcttgca

SEQ ID NO: 30498 - DNA, 18 bp, Artificial Sequence
  Synthetic
ctacagtgccacctagtg

SEQ ID NO: 30499 - DNA, 18 bp, Artificial Sequence
  Synthetic
gctatcagcagtaccacc

SEQ ID NO: 30500 - DNA, 23 bp, Artificial Sequence
  Synthetic
tcttctaattcaaattcactcct

SEQ ID NO: 30501 - DNA, 25 bp, Artificial Sequence
  Synthetic
ggcctatttaaaattcttacatcag

SEQ ID NO: 30502 - DNA, 25 bp, Artificial Sequence
  Synthetic
cgttttctttttcgagaatacaaac

SEQ ID NO: 30503 - DNA, 24 bp, Artificial Sequence
  Synthetic
tctaaataccctgaattgattacc

SEQ ID NO: 30504 - DNA, 22 bp, Artificial Sequence
  Synthetic
caattgattttgtttgggatca

SEQ ID NO: 30505 - DNA, 18 bp, Artificial Sequence
  Synthetic
atttgcaccctgagctct

SEQ ID NO: 30506 - DNA, 22 bp, Artificial Sequence
  Synthetic
gatatgttttgaagtgccaaat

SEQ ID NO: 30507 - DNA, 25 bp, Artificial Sequence
  Synthetic
gatgaaaattttagcaatacatccg

SEQ ID NO: 30508 - DNA, 19 bp, Artificial Sequence
  Synthetic
agcaaagtgtctgcattct

SEQ ID NO: 30509 - DNA, 24 bp, Artificial Sequence
  Synthetic
gcttctccatattttattttgacc

SEQ ID NO: 30510 - DNA, 19 bp, Artificial Sequence
  Synthetic
gtctctacaggcacattct

SEQ ID NO: 30511 - DNA, 18 bp, Artificial Sequence
  Synthetic
tcgttcgggagtaccatc

SEQ ID NO: 30512 - DNA, 18 bp, Artificial Sequence
  Synthetic
tatcaacgcctgtgacag

SEQ ID NO: 30513 - DNA, 22 bp, Artificial Sequence
  Synthetic
tcctgtctgtattctttccaag

SEQ ID NO: 30514 - DNA, 18 bp, Artificial Sequence
  Synthetic
gcctccaactcttgttca

SEQ ID NO: 30515 - DNA, 18 bp, Artificial Sequence
  Synthetic
tcgctacacccttctttg

SEQ ID NO: 30516 - DNA, 20 bp, Artificial Sequence
  Synthetic
gtgggctaagttgttgaact

SEQ ID NO: 30517 - DNA, 23 bp, Artificial Sequence
  Synthetic
cactatttgccattttagcataa

SEQ ID NO: 30518 - DNA, 19 bp, Artificial Sequence
  Synthetic
attgaaacgagcgttgagt

SEQ ID NO: 30519 - DNA, 20 bp, Artificial Sequence
  Synthetic
ggagacttttgcaagctttg

SEQ ID NO: 30520 - DNA, 19 bp, Artificial Sequence
  Synthetic
gttgttaatgcggacttca

SEQ ID NO: 30521 - DNA, 17 bp, Artificial Sequence
  Synthetic
ctgtggctgtggctgtg

SEQ ID NO: 30522 - DNA, 19 bp, Artificial Sequence
  Synthetic
tacttctccctcccctccc

SEQ ID NO: 30523 - DNA, 23 bp, Artificial Sequence
  Synthetic
cgcttcttatctctgtatctgta

SEQ ID NO: 30524 - DNA, 20 bp, Artificial Sequence
  Synthetic
ctacagcttgtgtgatgttg

SEQ ID NO: 30525 - DNA, 19 bp, Artificial Sequence
  Synthetic
gtaaagagggcggcttaat

SEQ ID NO: 30526 - DNA, 22 bp, Artificial Sequence
  Synthetic
ggcagttcctgaacatttaaat

SEQ ID NO: 30527 - DNA, 23 bp, Artificial Sequence
  Synthetic
gaattattacagttggcaaatcg

SEQ ID NO: 30528 - DNA, 23 bp, Artificial Sequence
  Synthetic
caaaatatggatgtcctacagtt

SEQ ID NO: 30529 - DNA, 24 bp, Artificial Sequence
  Synthetic
tcctgtctatcatctttagaagtt

SEQ ID NO: 30530 - DNA, 20 bp, Artificial Sequence
  Synthetic
acggtagggaaatagatgga

SEQ ID NO: 30531 - DNA, 18 bp, Artificial Sequence
  Synthetic
gttgtagcccagcttgaa

SEQ ID NO: 30532 - DNA, 21 bp, Artificial Sequence
  Synthetic
ctccttcttccgtaaaagctc

SEQ ID NO: 30533 - DNA, 22 bp, Artificial Sequence
  Synthetic
cttcttgcattgatttcctttc

SEQ ID NO: 30534 - DNA, 21 bp, Artificial Sequence
  Synthetic
tgctcattacaaaagccttct

SEQ ID NO: 30535 - DNA, 18 bp, Artificial Sequence
  Synthetic
accacagaaagcctgact

SEQ ID NO: 30536 - DNA, 20 bp, Artificial Sequence
  Synthetic
ttttgctgctgattgttctg

SEQ ID NO: 30537 - DNA, 18 bp, Artificial Sequence
  Synthetic
aaacagtttctgggtggc

SEQ ID NO: 30538 - DNA, 18 bp, Artificial Sequence
  Synthetic
cctcttgggtgtcagaaa

SEQ ID NO: 30539 - DNA, 20 bp, Artificial Sequence
  Synthetic
acaaacacattgacatcagc

SEQ ID NO: 30540 - DNA, 20 bp, Artificial Sequence
  Synthetic
cctccatttgaccttgtgct

SEQ ID NO: 30541 - DNA, 23 bp, Artificial Sequence
  Synthetic
gaaggtccaataggtatagtagg

SEQ ID NO: 30542 - DNA, 20 bp, Artificial Sequence
  Synthetic
tgtagcaaaattaactgccc

SEQ ID NO: 30543 - DNA, 22 bp, Artificial Sequence
  Synthetic
cctaaatttaagtctggtggtg

SEQ ID NO: 30544 - DNA, 21 bp, Artificial Sequence
  Synthetic
ctgacaaatcaactgtccaaa

SEQ ID NO: 30545 - DNA, 18 bp, Artificial Sequence
  Synthetic
tgaaaattctcccggcag

SEQ ID NO: 30546 - DNA, 24 bp, Artificial Sequence
  Synthetic
ggctgttaatatactttcgcttta

SEQ ID NO: 30547 - DNA, 22 bp, Artificial Sequence
  Synthetic
tttagcaagaataacagctctt

SEQ ID NO: 30548 - DNA, 23 bp, Artificial Sequence
  Synthetic
tctgctaataatgcatagtgaaa

SEQ ID NO: 30549 - DNA, 22 bp, Artificial Sequence
  Synthetic
gaacctttcactaagaggacat

SEQ ID NO: 30550 - DNA, 20 bp, Artificial Sequence
  Synthetic
cttggttttggaagggattc

SEQ ID NO: 30551 - DNA, 21 bp, Artificial Sequence
  Synthetic
ggcaaagtttgtacatcaagt

SEQ ID NO: 30552 - DNA, 18 bp, Artificial Sequence
  Synthetic
tgcatagaagccctttgg

SEQ ID NO: 30553 - DNA, 25 bp, Artificial Sequence
  Synthetic
cctacaataaatatctgagtttgct

SEQ ID NO: 30554 - DNA, 23 bp, Artificial Sequence
  Synthetic
gcaaagaaaaacaattcattacc

SEQ ID NO: 30555 - DNA, 19 bp, Artificial Sequence
  Synthetic
ggtggaggaacaaaagcta

SEQ ID NO: 30556 - DNA, 22 bp, Artificial Sequence
  Synthetic
atgtttggaatgatactgacag

SEQ ID NO: 30557 - DNA, 24 bp, Artificial Sequence
  Synthetic
aatcttaaacacattccataaccg

SEQ ID NO: 30558 - DNA, 19 bp, Artificial Sequence
  Synthetic
aatagtaggttcctggccc

SEQ ID NO: 30559 - DNA, 18 bp, Artificial Sequence
  Synthetic
tagtgggatctgccatgg

SEQ ID NO: 30560 - DNA, 20 bp, Artificial Sequence
  Synthetic
ggcccttgtattactctgta

SEQ ID NO: 30561 - DNA, 20 bp, Artificial Sequence
  Synthetic
ctaacgccaattctgcatat

SEQ ID NO: 30562 - DNA, 20 bp, Artificial Sequence
  Synthetic
gggctcgaggtactagcaac

SEQ ID NO: 30563 - DNA, 25 bp, Artificial Sequence
  Synthetic
agctagcatatttctgattacatct

SEQ ID NO: 30564 - DNA, 22 bp, Artificial Sequence
  Synthetic
ggtggtcctatagggtctatag

SEQ ID NO: 30565 - DNA, 23 bp, Artificial Sequence
  Synthetic
taatgtgaaccaattgatatggt

SEQ ID NO: 30566 - DNA, 18 bp, Artificial Sequence
  Synthetic
agttgttggcacctgttg

SEQ ID NO: 30567 - DNA, 18 bp, Artificial Sequence
  Synthetic
aatctcctggctgtttgg

SEQ ID NO: 30568 - DNA, 21 bp, Artificial Sequence
  Synthetic
tctagcccaaaaatgtctagc

SEQ ID NO: 30569 - DNA, 23 bp, Artificial Sequence
  Synthetic
tcacagttttctttcttacagta

SEQ ID NO: 30570 - DNA, 21 bp, Artificial Sequence
  Synthetic
aaaagagtaaagccgtccaaa

SEQ ID NO: 30571 - DNA, 19 bp, Artificial Sequence
  Synthetic
accgttttcgttgcaagta

SEQ ID NO: 30572 - DNA, 20 bp, Artificial Sequence
  Synthetic
tctcccaattccatcaatca

SEQ ID NO: 30573 - DNA, 20 bp, Artificial Sequence
  Synthetic
cctctttttcgaagtcgtac

SEQ ID NO: 30574 - DNA, 22 bp, Artificial Sequence
  Synthetic
tgttctcatttgaagcaatttg

SEQ ID NO: 30575 - DNA, 18 bp, Artificial Sequence
  Synthetic
ggttttgcaccttccatc

SEQ ID NO: 30576 - DNA, 21 bp, Artificial Sequence
  Synthetic
cgatgtttcttgtacctcaca

SEQ ID NO: 30577 - DNA, 18 bp, Artificial Sequence
  Synthetic
ttgtctagcttgctgtgg

SEQ ID NO: 30578 - DNA, 18 bp, Artificial Sequence
  Synthetic
ttttactccttcccggca

SEQ ID NO: 30579 - DNA, 19 bp, Artificial Sequence
  Synthetic
aacacagctttgcctgtac

SEQ ID NO: 30580 - DNA, 23 bp, Artificial Sequence
  Synthetic
ctgtgcattactatctacatctg

SEQ ID NO: 30581 - DNA, 19 bp, Artificial Sequence
  Synthetic
actttcctgtgtttggtgg

SEQ ID NO: 30582 - DNA, 19 bp, Artificial Sequence
  Synthetic
cgacaacagtttcaacagg

SEQ ID NO: 30583 - DNA, 20 bp, Artificial Sequence
  Synthetic
aacaggtagaaaacaacgag

SEQ ID NO: 30584 - DNA, 19 bp, Artificial Sequence
  Synthetic
acgtttgatacagctgagt

SEQ ID NO: 30585 - DNA, 24 bp, Artificial Sequence
  Synthetic
tcataactatgtacaccagatgtg

SEQ ID NO: 30586 - DNA, 20 bp, Artificial Sequence
  Synthetic
caagcctactaaaacgcaca

SEQ ID NO: 30587 - DNA, 18 bp, Artificial Sequence
  Synthetic
ggtgtaggaggcaggtaa

SEQ ID NO: 30588 - DNA, 19 bp, Artificial Sequence
  Synthetic
acttattgggatcgggcaa

SEQ ID NO: 30589 - DNA, 23 bp, Artificial Sequence
  Synthetic
acatactgtttaatttggcttga

SEQ ID NO: 30590 - DNA, 19 bp, Artificial Sequence
  Synthetic
ttagctagtgggtcctctt

SEQ ID NO: 30591 - DNA, 25 bp, Artificial Sequence
  Synthetic
catacaaaaacatacattcatgcac

SEQ ID NO: 30592 - DNA, 21 bp, Artificial Sequence
  Synthetic
gcataaaatggacactactgt

SEQ ID NO: 30593 - DNA, 20 bp, Artificial Sequence
  Synthetic
agacacatagttggctacca

SEQ ID NO: 30594 - DNA, 22 bp, Artificial Sequence
  Synthetic
acagtccaattctatttcatgt

SEQ ID NO: 30595 - DNA, 19 bp, Artificial Sequence
  Synthetic
attctgtaccaggcttgct

SEQ ID NO: 30596 - DNA, 19 bp, Artificial Sequence
  Synthetic
attgcatcccctgttttcc

SEQ ID NO: 30597 - DNA, 23 bp, Artificial Sequence
  Synthetic
cctcagatgctaataatgcatat

SEQ ID NO: 30598 - DNA, 24 bp, Artificial Sequence
  Synthetic
gatgttattagtaatggaggacat

SEQ ID NO: 30599 - DNA, 18 bp, Artificial Sequence
  Synthetic
tgcacagtgtctccatca

SEQ ID NO: 30600 - DNA, 23 bp, Artificial Sequence
  Synthetic
ttctgtgttatagcttgattcat

SEQ ID NO: 30601 - DNA, 19 bp, Artificial Sequence
  Synthetic
cacatatcctgtacgaccc

SEQ ID NO: 30602 - DNA, 22 bp, Artificial Sequence
  Synthetic
cagatacttgtgtagtgtcact

SEQ ID NO: 30603 - DNA, 22 bp, Artificial Sequence
  Synthetic
cacttctagtaaacatagtggc

SEQ ID NO: 30604 - DNA, 23 bp, Artificial Sequence
  Synthetic
gttacatactcttcagtgcttac

SEQ ID NO: 30605 - DNA, 21 bp, Artificial Sequence
  Synthetic
gtggtgttctttaattcaagc

SEQ ID NO: 30606 - DNA, 18 bp, Artificial Sequence
  Synthetic
cacaactggatggcgatg

SEQ ID NO: 30607 - DNA, 18 bp, Artificial Sequence
  Synthetic
aatccaagttgcctgcag

SEQ ID NO: 30608 - DNA, 18 bp, Artificial Sequence
  Synthetic
atcgcagagcttcccatt

SEQ ID NO: 30609 - DNA, 20 bp, Artificial Sequence
  Synthetic
aaatggtttgttctgctcaa

SEQ ID NO: 30610 - DNA, 20 bp, Artificial Sequence
  Synthetic
tgatgttccaacggaaatgt

SEQ ID NO: 30611 - DNA, 21 bp, Artificial Sequence
  Synthetic
tggcatactagagtttatcgc

SEQ ID NO: 30612 - DNA, 21 bp, Artificial Sequence
  Synthetic
gtgactccatctattgccttt

SEQ ID NO: 30613 - DNA, 20 bp, Artificial Sequence
  Synthetic
cctttgcattatccctaagc

SEQ ID NO: 30614 - DNA, 21 bp, Artificial Sequence
  Synthetic
aaagatagaccagctaccatg

SEQ ID NO: 30615 - DNA, 19 bp, Artificial Sequence
  Synthetic
cgtccaattccaccaatca

SEQ ID NO: 30616 - DNA, 18 bp, Artificial Sequence
  Synthetic
ccattattagcttggcgc

SEQ ID NO: 30617 - DNA, 23 bp, Artificial Sequence
  Synthetic
aattcttgtttttcgtccattct

SEQ ID NO: 30618 - DNA, 21 bp, Artificial Sequence
  Synthetic
acttgattccatagtctccat

SEQ ID NO: 30619 - DNA, 18 bp, Artificial Sequence
  Synthetic
aggttttgtgacactgcc

SEQ ID NO: 30620 - DNA, 20 bp, Artificial Sequence
  Synthetic
cctagtccactgtcctcaaa

SEQ ID NO: 30621 - DNA, 23 bp, Artificial Sequence
  Synthetic
gtacatgcaatacattacacaat

SEQ ID NO: 30622 - DNA, 24 bp, Artificial Sequence
  Synthetic
agtccattcctcatatatacatcc

SEQ ID NO: 30623 - DNA, 18 bp, Artificial Sequence
  Synthetic
catctatgtctgtgcggc

SEQ ID NO: 30624 - DNA, 18 bp, Artificial Sequence
  Synthetic
ctgcagatacctgtccac

SEQ ID NO: 30625 - DNA, 23 bp, Artificial Sequence
  Synthetic
gtttcattctatacctccaacat

SEQ ID NO: 30626 - DNA, 24 bp, Artificial Sequence
  Synthetic
tgtctaaaggtatagattcaccta

SEQ ID NO: 30627 - DNA, 18 bp, Artificial Sequence
  Synthetic
gggccaacaagtgtatga

SEQ ID NO: 30628 - DNA, 23 bp, Artificial Sequence
  Synthetic
ctgcaaaacattaaaaaccagac

SEQ ID NO: 30629 - DNA, 18 bp, Artificial Sequence
  Synthetic
gacaggtgcctttaggag

SEQ ID NO: 30630 - DNA, 24 bp, Artificial Sequence
  Synthetic
cataatacagcattattagcaccc

SEQ ID NO: 30631 - DNA, 18 bp, Artificial Sequence
  Synthetic
aaaagcgcctaccaagag

SEQ ID NO: 30632 - DNA, 18 bp, Artificial Sequence
  Synthetic
actgtaaaagcaccgctc

SEQ ID NO: 30633 - DNA, 20 bp, Artificial Sequence
  Synthetic
aaatggagtctggaacactg

SEQ ID NO: 30634 - DNA, 20 bp, Artificial Sequence
  Synthetic
atctacatctgcatgcattg

SEQ ID NO: 30635 - DNA, 19 bp, Artificial Sequence
  Synthetic
tggggctttatgttttgca

SEQ ID NO: 30636 - DNA, 21 bp, Artificial Sequence
  Synthetic
tggtgaattttgtaagcttct

SEQ ID NO: 30637 - DNA, 16 bp, Artificial Sequence
  Synthetic
actggagtctgcggcg

SEQ ID NO: 30638 - DNA, 20 bp, Artificial Sequence
  Synthetic
ttgcaatcaatggatcccga

SEQ ID NO: 30639 - DNA, 21 bp, Artificial Sequence
  Synthetic
tgctaggattcatagtgcaat

SEQ ID NO: 30640 - DNA, 19 bp, Artificial Sequence
  Synthetic
cttgctctacatgcctttg

SEQ ID NO: 30641 - DNA, 18 bp, Artificial Sequence
  Synthetic
ttctggtttgcatggtcc

SEQ ID NO: 30642 - DNA, 25 bp, Artificial Sequence
  Synthetic
gttgagcttctaatattaattgtgc

SEQ ID NO: 30643 - DNA, 21 bp, Artificial Sequence
  Synthetic
ggatccatagcaacatctact

SEQ ID NO: 30644 - DNA, 23 bp, Artificial Sequence
  Synthetic
cgttattagcaccttgtgaatta

SEQ ID NO: 30645 - DNA, 19 bp, Artificial Sequence
  Synthetic
catcggtccttacacgttt

SEQ ID NO: 30646 - DNA, 18 bp, Artificial Sequence
  Synthetic
aaaacatggaagggctgc

SEQ ID NO: 30647 - DNA, 24 bp, Artificial Sequence
  Synthetic
gatgaaactattacttcctcactt

SEQ ID NO: 30648 - DNA, 22 bp, Artificial Sequence
  Synthetic
tgcttgatctacaataaaccat

SEQ ID NO: 30649 - DNA, 21 bp, Artificial Sequence
  Synthetic
ttgctgtttctttcagaactt

SEQ ID NO: 30650 - DNA, 23 bp, Artificial Sequence
  Synthetic
gtctgactcaatatgtttcagaa

SEQ ID NO: 30651 - DNA, 20 bp, Artificial Sequence
  Synthetic
cgtcttcgtcgaagtggaat

SEQ ID NO: 30652 - DNA, 23 bp, Artificial Sequence
  Synthetic
attttccagaagcatttgttagc

SEQ ID NO: 30653 - DNA, 20 bp, Artificial Sequence
  Synthetic
attacagtagtctcagctgg

SEQ ID NO: 30654 - DNA, 22 bp, Artificial Sequence
  Synthetic
agaagatttaggcctaacatct

SEQ ID NO: 30655 - DNA, 18 bp, Artificial Sequence
  Synthetic
cttgttgaacccgccttc

SEQ ID NO: 30656 - DNA, 22 bp, Artificial Sequence
  Synthetic
tcataataaaagtgcactgcct

SEQ ID NO: 30657 - DNA, 18 bp, Artificial Sequence
  Synthetic
atactctggccacaggtt

SEQ ID NO: 30658 - DNA, 22 bp, Artificial Sequence
  Synthetic
cacctttctcaattaaagcaaa

SEQ ID NO: 30659 - DNA, 22 bp, Artificial Sequence
  Synthetic
cctttctaacttgtactccttc

SEQ ID NO: 30660 - DNA, 19 bp, Artificial Sequence
  Synthetic
gtttccccagcatattcca

SEQ ID NO: 30661 - DNA, 17 bp, Artificial Sequence
  Synthetic
tcggctagcagtctcgc

SEQ ID NO: 30662 - DNA, 18 bp, Artificial Sequence
  Synthetic
accctgtgaagaggcagc

SEQ ID NO: 30663 - DNA, 18 bp, Artificial Sequence
  Synthetic
aggagcaaccaggcaagt

SEQ ID NO: 30664 - DNA, 18 bp, Artificial Sequence
  Synthetic
gtagctgacgccaccact

SEQ ID NO: 30665 - DNA, 20 bp, Artificial Sequence
  Synthetic
ccaaagtaagcgaggccaaa

SEQ ID NO: 30666 - DNA, 19 bp, Artificial Sequence
  Synthetic
caataccacacggcgatgg

SEQ ID NO: 30667 - DNA, 19 bp, Artificial Sequence
  Synthetic
caagcggagtatgtggcac

SEQ ID NO: 30668 - DNA, 19 bp, Artificial Sequence
  Synthetic
ggtgcaggtggatcagtcc

SEQ ID NO: 30669 - DNA, 19 bp, Artificial Sequence
  Synthetic
acgtcaccagagggacaac

SEQ ID NO: 30670 - DNA, 20 bp, Artificial Sequence
  Synthetic
tgtcaaagacaaggcctgga

SEQ ID NO: 30671 - DNA, 18 bp, Artificial Sequence
  Synthetic
ccgagccgagctgagaca

SEQ ID NO: 30672 - DNA, 18 bp, Artificial Sequence
  Synthetic
tctggaggacaggcccac

SEQ ID NO: 30673 - DNA, 20 bp, Artificial Sequence
  Synthetic
gcatcttctcgatgggaaca

SEQ ID NO: 30674 - DNA, 20 bp, Artificial Sequence
  Synthetic
tggcatggcattcatcacat

SEQ ID NO: 30675 - DNA, 20 bp, Artificial Sequence
  Synthetic
gggatcaccgaaacatccaa

SEQ ID NO: 30676 - DNA, 18 bp, Artificial Sequence
  Synthetic
cgaacataccggatggcc

SEQ ID NO: 30677 - DNA, 18 bp, Artificial Sequence
  Synthetic
tatccaagacggcgaggg

SEQ ID NO: 30678 - DNA, 19 bp, Artificial Sequence
  Synthetic
gccaacactacccactgcc

SEQ ID NO: 30679 - DNA, 18 bp, Artificial Sequence
  Synthetic
atgtagtgggtcggcgac

SEQ ID NO: 30680 - DNA, 18 bp, Artificial Sequence
  Synthetic
gtttcggcaggtcttggg

SEQ ID NO: 30681 - DNA, 18 bp, Artificial Sequence
  Synthetic
cttcccggatcatgggct

SEQ ID NO: 30682 - DNA, 18 bp, Artificial Sequence
  Synthetic
acctctcagcgagttccg

SEQ ID NO: 30683 - DNA, 18 bp, Artificial Sequence
  Synthetic
tagctggctttttcccgc

SEQ ID NO: 30684 - DNA, 19 bp, Artificial Sequence
  Synthetic
aaccgaccctctgaccttt

SEQ ID NO: 30685 - DNA, 18 bp, Artificial Sequence
  Synthetic
ggtcataagcgggctggg

SEQ ID NO: 30686 - DNA, 16 bp, Artificial Sequence
  Synthetic
atgggctctgggcgtg

SEQ ID NO: 30687 - DNA, 22 bp, Artificial Sequence
  Synthetic
ttccatggttttatttcaggat

SEQ ID NO: 30688 - DNA, 18 bp, Artificial Sequence
  Synthetic
gtagtcgtctgggtgatc

SEQ ID NO: 30689 - DNA, 19 bp, Artificial Sequence
  Synthetic
ggtaatggcccatttgttg

SEQ ID NO: 30690 - DNA, 24 bp, Artificial Sequence
  Synthetic
gctccatttaaatcattcaaccta

SEQ ID NO: 30691 - DNA, 18 bp, Artificial Sequence
  Synthetic
tgtctcctgtcacagtca

SEQ ID NO: 30692 - DNA, 18 bp, Artificial Sequence
  Synthetic
tcttcccttccactttgg

SEQ ID NO: 30693 - DNA, 20 bp, Artificial Sequence
  Synthetic
tgcttctttgataccctcaa

SEQ ID NO: 30694 - DNA, 20 bp, Artificial Sequence
  Synthetic
tcgtgcatccattcttaatc

SEQ ID NO: 30695 - DNA, 18 bp, Artificial Sequence
  Synthetic
gatgtccttggcatgagt

SEQ ID NO: 30696 - DNA, 23 bp, Artificial Sequence
  Synthetic
ggcaaaatcttaactttctcaaa

SEQ ID NO: 30697 - DNA, 20 bp, Artificial Sequence
  Synthetic
ggaaacataggttcccacat

SEQ ID NO: 30698 - DNA, 21 bp, Artificial Sequence
  Synthetic
ggacattgtgaaaaggtagtg

SEQ ID NO: 30699 - DNA, 21 bp, Artificial Sequence
  Synthetic
ccttttgagtggattctttgt

SEQ ID NO: 30700 - DNA, 25 bp, Artificial Sequence
  Synthetic
caagttttctcactatacattcatg

SEQ ID NO: 30701 - DNA, 25 bp, Artificial Sequence
  Synthetic
gcacatcataattaggagtatcaat

SEQ ID NO: 30702 - DNA, 18 bp, Artificial Sequence
  Synthetic
gccacctctggtagaaga

SEQ ID NO: 30703 - DNA, 22 bp, Artificial Sequence
  Synthetic
actgtagttaatcacaccattt

SEQ ID NO: 30704 - DNA, 20 bp, Artificial Sequence
  Synthetic
tgatgtgtcttttgccatct

SEQ ID NO: 30705 - DNA, 24 bp, Artificial Sequence
  Synthetic
ccccatctttttttgtaactatag

SEQ ID NO: 30706 - DNA, 19 bp, Artificial Sequence
  Synthetic
cagcttgcttctttcatcc

SEQ ID NO: 30707 - DNA, 21 bp, Artificial Sequence
  Synthetic
ttttctaggtaagctccaaga

SEQ ID NO: 30708 - DNA, 18 bp, Artificial Sequence
  Synthetic
tggttgattttgcctggc

SEQ ID NO: 30709 - DNA, 18 bp, Artificial Sequence
  Synthetic
actttgtggtttgccgag

SEQ ID NO: 30710 - DNA, 18 bp, Artificial Sequence
  Synthetic
tttttgtgggcttggtgg

SEQ ID NO: 30711 - DNA, 25 bp, Artificial Sequence
  Synthetic
ctttttaatgactactggtttgttg

SEQ ID NO: 30712 - DNA, 19 bp, Artificial Sequence
  Synthetic
gcactaagatagcctttgc

SEQ ID NO: 30713 - DNA, 18 bp, Artificial Sequence
  Synthetic
tgctacagctttgcttgt

SEQ ID NO: 30714 - DNA, 25 bp, Artificial Sequence
  Synthetic
gagatttacttcacttggtaatgtt

SEQ ID NO: 30715 - DNA, 21 bp, Artificial Sequence
  Synthetic
gagtttcgatgaagttcagat

SEQ ID NO: 30716 - DNA, 21 bp, Artificial Sequence
  Synthetic
cttatcttgggtgaatttggc

SEQ ID NO: 30717 - DNA, 25 bp, Artificial Sequence
  Synthetic
catatcttgtaagactttcaggaaa

SEQ ID NO: 30718 - DNA, 25 bp, Artificial Sequence
  Synthetic
gttagttatagattttgtaccggat

SEQ ID NO: 30719 - DNA, 24 bp, Artificial Sequence
  Synthetic
ccatacttttctgttaatatgcga

SEQ ID NO: 30720 - DNA, 18 bp, Artificial Sequence
  Synthetic
caggcattgagcgggttt

SEQ ID NO: 30721 - DNA, 16 bp, Artificial Sequence
  Synthetic
gctgagcccaggtcct

SEQ ID NO: 30722 - DNA, 18 bp, Artificial Sequence
  Synthetic
gcagggccagaaggaaga

SEQ ID NO: 30723 - DNA, 20 bp, Artificial Sequence
  Synthetic
tcccgacaagcagatcgata

SEQ ID NO: 30724 - DNA, 18 bp, Artificial Sequence
  Synthetic
aggaccttcgcccagttc

SEQ ID NO: 30725 - DNA, 18 bp, Artificial Sequence
  Synthetic
tctttgcgggcacaatgc

SEQ ID NO: 30726 - DNA, 18 bp, Artificial Sequence
  Synthetic
ggcttccggatgtttgcg

SEQ ID NO: 30727 - DNA, 16 bp, Artificial Sequence
  Synthetic
gccggtggacaaggct

SEQ ID NO: 30728 - DNA, 15 bp, Artificial Sequence
  Synthetic
tgcccgctgaggcaa

SEQ ID NO: 30729 - DNA, 20 bp, Artificial Sequence
  Synthetic
gccatttgcacgtaatgacc

SEQ ID NO: 30730 - DNA, 18 bp, Artificial Sequence
  Synthetic
atctcctggcccctacgg

SEQ ID NO: 30731 - DNA, 19 bp, Artificial Sequence
  Synthetic
ggtgtcaatgagcgggaac

SEQ ID NO: 30732 - DNA, 16 bp, Artificial Sequence
  Synthetic
gctctggggcactgct

SEQ ID NO: 30733 - DNA, 18 bp, Artificial Sequence
  Synthetic
caaggacagtgccgatgc

SEQ ID NO: 30734 - DNA, 19 bp, Artificial Sequence
  Synthetic
tcgacacgacgacaacatc

SEQ ID NO: 30735 - DNA, 20 bp, Artificial Sequence
  Synthetic
gttcatgtacgctcgtagcc

SEQ ID NO: 30736 - DNA, 16 bp, Artificial Sequence
  Synthetic
gccagagcagccagga

SEQ ID NO: 30737 - DNA, 18 bp, Artificial Sequence
  Synthetic
acatgtgcttcgcccaaa

SEQ ID NO: 30738 - DNA, 20 bp, Artificial Sequence
  Synthetic
gccataccctgcaagaatgt

SEQ ID NO: 30739 - DNA, 20 bp, Artificial Sequence
  Synthetic
actccgagcttatccactga

SEQ ID NO: 30740 - DNA, 18 bp, Artificial Sequence
  Synthetic
tgcagacaccctccacag

SEQ ID NO: 30741 - DNA, 20 bp, Artificial Sequence
  Synthetic
cgcctctgctgttatatggg

SEQ ID NO: 30742 - DNA, 16 bp, Artificial Sequence
  Synthetic
ttgtagtccggccgcg

SEQ ID NO: 30743 - DNA, 18 bp, Artificial Sequence
  Synthetic
atccggatccccaggctc

SEQ ID NO: 30744 - DNA, 20 bp, Artificial Sequence
  Synthetic
agcttcctctacggatagca

SEQ ID NO: 30745 - DNA, 19 bp, Artificial Sequence
  Synthetic
aattcaacccgctgtcctg

SEQ ID NO: 30746 - DNA, 20 bp, Artificial Sequence
  Synthetic
agcaagtgagggtgttacca

SEQ ID NO: 30747 - DNA, 20 bp, Artificial Sequence
  Synthetic
agtatcatcctcgcccacag

SEQ ID NO: 30748 - DNA, 18 bp, Artificial Sequence
  Synthetic
ccacatatggcagccctg

SEQ ID NO: 30749 - DNA, 23 bp, Artificial Sequence
  Synthetic
tcatcaataaagtggaaatctga

SEQ ID NO: 30750 - DNA, 23 bp, Artificial Sequence
  Synthetic
tcagattttatcttgttggcttt

SEQ ID NO: 30751 - DNA, 21 bp, Artificial Sequence
  Synthetic
catctttgcaatcctcaaagt

SEQ ID NO: 30752 - DNA, 20 bp, Artificial Sequence
  Synthetic
gcattcaacaaagctgtgtt

SEQ ID NO: 30753 - DNA, 18 bp, Artificial Sequence
  Synthetic
ccttgacacttggcctat

SEQ ID NO: 30754 - DNA, 21 bp, Artificial Sequence
  Synthetic
ttgaaaacagatttagccagt

SEQ ID NO: 30755 - DNA, 18 bp, Artificial Sequence
  Synthetic
ggtctctagccggtcaaa

SEQ ID NO: 30756 - DNA, 22 bp, Artificial Sequence
  Synthetic
tcttcgaacttttgacctaatt

SEQ ID NO: 30757 - DNA, 18 bp, Artificial Sequence
  Synthetic
acaccgtcttcttgcaaa

SEQ ID NO: 30758 - DNA, 21 bp, Artificial Sequence
  Synthetic
cactggcttaacaccttaaat

SEQ ID NO: 30759 - DNA, 24 bp, Artificial Sequence
  Synthetic
acactattatcaataaagtccacc

SEQ ID NO: 30760 - DNA, 20 bp, Artificial Sequence
  Synthetic
acgtcagtatggccatttgg

SEQ ID NO: 30761 - DNA, 18 bp, Artificial Sequence
  Synthetic
gccatctgtcgtctgtac

SEQ ID NO: 30762 - DNA, 18 bp, Artificial Sequence
  Synthetic
ctccaggcgtatgcattt

SEQ ID NO: 30763 - DNA, 23 bp, Artificial Sequence
  Synthetic
acatattgcattgtgttatcctg

SEQ ID NO: 30764 - DNA, 21 bp, Artificial Sequence
  Synthetic
gtactagatacagatgcagga

SEQ ID NO: 30765 - DNA, 21 bp, Artificial Sequence
  Synthetic
gctggtctatgtaaagcaaat

SEQ ID NO: 30766 - DNA, 23 bp, Artificial Sequence
  Synthetic
agaaaatatgggaaacgtttacg

SEQ ID NO: 30767 - DNA, 23 bp, Artificial Sequence
  Synthetic
gccctatttaacatatgcctaac

SEQ ID NO: 30768 - DNA, 20 bp, Artificial Sequence
  Synthetic
gcacacaatgttaggttagt

SEQ ID NO: 30769 - DNA, 18 bp, Artificial Sequence
  Synthetic
tccttttcctttgcaggg

SEQ ID NO: 30770 - DNA, 20 bp, Artificial Sequence
  Synthetic
agtctaggtaggctccaagg

SEQ ID NO: 30771 - DNA, 16 bp, Artificial Sequence
  Synthetic
gtgatgagcggccagc

SEQ ID NO: 30772 - DNA, 16 bp, Artificial Sequence
  Synthetic
ttggggggctgtaggc

SEQ ID NO: 30773 - DNA, 20 bp, Artificial Sequence
  Synthetic
tcggcctctgatataaggct

SEQ ID NO: 30774 - DNA, 20 bp, Artificial Sequence
  Synthetic
cagcccattgtcaagagcta

SEQ ID NO: 30775 - DNA, 20 bp, Artificial Sequence
  Synthetic
cgcttccagtgagttggatc

SEQ ID NO: 30776 - DNA, 18 bp, Artificial Sequence
  Synthetic
cctggaggcgttctggtt

SEQ ID NO: 30777 - DNA, 19 bp, Artificial Sequence
  Synthetic
gtgggctagtgtagttggc

SEQ ID NO: 30778 - DNA, 19 bp, Artificial Sequence
  Synthetic
gtagttgcaggtccgcatg

SEQ ID NO: 30779 - DNA, 18 bp, Artificial Sequence
  Synthetic
gttctgtgacagggcctg

SEQ ID NO: 30780 - DNA, 20 bp, Artificial Sequence
  Synthetic
gaaggtttgggtggagatgt

SEQ ID NO: 30781 - DNA, 18 bp, Artificial Sequence
  Synthetic
aggtctgcaggagagagc

SEQ ID NO: 30782 - DNA, 20 bp, Artificial Sequence
  Synthetic
ataggtaggtcgggtttgtc

SEQ ID NO: 30783 - DNA, 17 bp, Artificial Sequence
  Synthetic
tctttgggatcggcggg

SEQ ID NO: 30784 - DNA, 19 bp, Artificial Sequence
  Synthetic
tggcatggtagctggagta

SEQ ID NO: 30785 - DNA, 20 bp, Artificial Sequence
  Synthetic
gagaaggaaaaaccgcattt

SEQ ID NO: 30786 - DNA, 18 bp, Artificial Sequence
  Synthetic
gggacatggagccggtaa

SEQ ID NO: 30787 - DNA, 20 bp, Artificial Sequence
  Synthetic
agttgggggttgatggctat

SEQ ID NO: 30788 - DNA, 16 bp, Artificial Sequence
  Synthetic
agaggaaagccgcggc

SEQ ID NO: 30789 - DNA, 20 bp, Artificial Sequence
  Synthetic
cagtcgccttgtacacagtc

SEQ ID NO: 30790 - DNA, 19 bp, Artificial Sequence
  Synthetic
agtatttgcgcatggcctg

SEQ ID NO: 30791 - DNA, 24 bp, Artificial Sequence
  Synthetic
ttaaaaagtagagaaatggggatg

SEQ ID NO: 30792 - DNA, 18 bp, Artificial Sequence
  Synthetic
ttgtcgtcaacgcctgag

SEQ ID NO: 30793 - DNA, 19 bp, Artificial Sequence
  Synthetic
ggtctcgacctgagctcta

SEQ ID NO: 30794 - DNA, 21 bp, Artificial Sequence
  Synthetic
tcttgtcagctgtaattggat

SEQ ID NO: 30795 - DNA, 21 bp, Artificial Sequence
  Synthetic
cagggtttatgtcaactcttc

SEQ ID NO: 30796 - DNA, 20 bp, Artificial Sequence
  Synthetic
cacttcaatgtacacactgc

SEQ ID NO: 30797 - DNA, 23 bp, Artificial Sequence
  Synthetic
atatatccacagcttgttcttcc

SEQ ID NO: 30798 - DNA, 20 bp, Artificial Sequence
  Synthetic
ttcttgtgaaaacaccatgg

SEQ ID NO: 30799 - DNA, 20 bp, Artificial Sequence
  Synthetic
cctctcattgacatctctgt

SEQ ID NO: 30800 - DNA, 21 bp, Artificial Sequence
  Synthetic
agtttctgatgatccactgat

SEQ ID NO: 30801 - DNA, 21 bp, Artificial Sequence
  Synthetic
agtcaatgaagagaactgcat

SEQ ID NO: 30802 - DNA, 25 bp, Artificial Sequence
  Synthetic
ttagtacattagccttttctccttt

SEQ ID NO: 30803 - DNA, 20 bp, Artificial Sequence
  Synthetic
aatattagagtctccagccg

SEQ ID NO: 30804 - DNA, 18 bp, Artificial Sequence
  Synthetic
tttggagtgagtggaggt

SEQ ID NO: 30805 - DNA, 19 bp, Artificial Sequence
  Synthetic
cagtctctgtgtttgtcgt

SEQ ID NO: 30806 - DNA, 21 bp, Artificial Sequence
  Synthetic
gccattcgatctaaagacttc

SEQ ID NO: 30807 - DNA, 19 bp, Artificial Sequence
  Synthetic
ctaatctgcatcccaggtg

SEQ ID NO: 30808 - DNA, 23 bp, Artificial Sequence
  Synthetic
ggttgatttctggtgatatatgt

SEQ ID NO: 30809 - DNA, 18 bp, Artificial Sequence
  Synthetic
gactcagtgatgctgtgc

SEQ ID NO: 30810 - DNA, 20 bp, Artificial Sequence
  Synthetic
gttgattcccactaacttgc

SEQ ID NO: 30811 - DNA, 20 bp, Artificial Sequence
  Synthetic
tctcgtctgaatttgtgtgt

SEQ ID NO: 30812 - DNA, 16 bp, Artificial Sequence
  Synthetic
agagacgccgtcctcg

SEQ ID NO: 30813 - DNA, 17 bp, Artificial Sequence
  Synthetic
cgatgcggtggatgtgg

SEQ ID NO: 30814 - DNA, 16 bp, Artificial Sequence
  Synthetic
tgtctcggccggcatc

SEQ ID NO: 30815 - DNA, 16 bp, Artificial Sequence
  Synthetic
cgggatgggtggacgt

SEQ ID NO: 30816 - DNA, 17 bp, Artificial Sequence
  Synthetic
tctcttccgcgtctccc

SEQ ID NO: 30817 - DNA, 23 bp, Artificial Sequence
  Synthetic
tgtacgtagtgttatgaatggtt

SEQ ID NO: 30818 - DNA, 18 bp, Artificial Sequence
  Synthetic
caatgtccaagccgtggg

SEQ ID NO: 30819 - DNA, 18 bp, Artificial Sequence
  Synthetic
gatccagaccaaagcggc

SEQ ID NO: 30820 - DNA, 16 bp, Artificial Sequence
  Synthetic
gctgcggaccgtcaga

SEQ ID NO: 30821 - DNA, 16 bp, Artificial Sequence
  Synthetic
accagcgccgtggtct

SEQ ID NO: 30822 - DNA, 18 bp, Artificial Sequence
  Synthetic
gccggggatgtagtggac

SEQ ID NO: 30823 - DNA, 16 bp, Artificial Sequence
  Synthetic
gccagcagcccgatct

SEQ ID NO: 30824 - DNA, 18 bp, Artificial Sequence
  Synthetic
gtttactcccgctgctgc

SEQ ID NO: 30825 - DNA, 16 bp, Artificial Sequence
  Synthetic
cggtttacgcctcgcc

SEQ ID NO: 30826 - DNA, 15 bp, Artificial Sequence
  Synthetic
ttcgcccgctgttgc

SEQ ID NO: 30827 - DNA, 16 bp, Artificial Sequence
  Synthetic
accgctgtgtgcctca

SEQ ID NO: 30828 - DNA, 18 bp, Artificial Sequence
  Synthetic
cgtatgttgagcggggac

SEQ ID NO: 30829 - DNA, 16 bp, Artificial Sequence
  Synthetic
atcgctctggccgtgg

SEQ ID NO: 30830 - DNA, 16 bp, Artificial Sequence
  Synthetic
acgctgcgtcggtttc

SEQ ID NO: 30831 - DNA, 17 bp, Artificial Sequence
  Synthetic
ggccctgcgttcaagac

SEQ ID NO: 30832 - DNA, 18 bp, Artificial Sequence
  Synthetic
ctgctcggtgatggacac

SEQ ID NO: 30833 - DNA, 16 bp, Artificial Sequence
  Synthetic
gtgaaaggcacggcgt

SEQ ID NO: 30834 - DNA, 17 bp, Artificial Sequence
  Synthetic
gggctcgttgagaagcg

SEQ ID NO: 30835 - DNA, 16 bp, Artificial Sequence
  Synthetic
aagggcgccgctagtg

SEQ ID NO: 30836 - DNA, 16 bp, Artificial Sequence
  Synthetic
aaggcgcgtgaccacc

SEQ ID NO: 30837 - DNA, 17 bp, Artificial Sequence
  Synthetic
tgcacctctacgcccag

SEQ ID NO: 30838 - DNA, 20 bp, Artificial Sequence
  Synthetic
gtggttagcgagaatgcaga

SEQ ID NO: 30839 - DNA, 16 bp, Artificial Sequence
  Synthetic
tacatcgtcggcgccc

SEQ ID NO: 30840 - DNA, 17 bp, Artificial Sequence
  Synthetic
gccgagagtcgcctgta

SEQ ID NO: 30841 - DNA, 20 bp, Artificial Sequence
  Synthetic
gcgactgcatctacgagctg

SEQ ID NO: 30842 - DNA, 19 bp, Artificial Sequence
  Synthetic
gacgacctggtgatggtct

SEQ ID NO: 30843 - DNA, 17 bp, Artificial Sequence
  Synthetic
cgcgtcagctggtgttg

SEQ ID NO: 30844 - DNA, 18 bp, Artificial Sequence
  Synthetic
attcccgtcagccgtcag

SEQ ID NO: 30845 - DNA, 18 bp, Artificial Sequence
  Synthetic
gtccgctcgtgttccagg

SEQ ID NO: 30846 - DNA, 16 bp, Artificial Sequence
  Synthetic
tggagcccacgccgat

SEQ ID NO: 30847 - DNA, 18 bp, Artificial Sequence
  Synthetic
gcctgtggtggaatcgct

SEQ ID NO: 30848 - DNA, 16 bp, Artificial Sequence
  Synthetic
cattgtgcccgcccaa

SEQ ID NO: 30849 - DNA, 16 bp, Artificial Sequence
  Synthetic
gtatcggttgccgcgg

SEQ ID NO: 30850 - DNA, 16 bp, Artificial Sequence
  Synthetic
ggggaacacgcgacgt

SEQ ID NO: 30851 - DNA, 19 bp, Artificial Sequence
  Synthetic
ctgcgtcacatggaggatc

SEQ ID NO: 30852 - DNA, 18 bp, Artificial Sequence
  Synthetic
tgctcacctccagcatcg

SEQ ID NO: 30853 - DNA, 16 bp, Artificial Sequence
  Synthetic
tgccgccgctctgttc

SEQ ID NO: 30854 - DNA, 20 bp, Artificial Sequence
  Synthetic
gtgtcggcttacttcctctg

SEQ ID NO: 30855 - DNA, 20 bp, Artificial Sequence
  Synthetic
aagacaagatgtcctgctgc

SEQ ID NO: 30856 - DNA, 17 bp, Artificial Sequence
  Synthetic
tcggtgaagaccacggc

SEQ ID NO: 30857 - DNA, 18 bp, Artificial Sequence
  Synthetic
ggcgatctcagcctctgg

SEQ ID NO: 30858 - DNA, 18 bp, Artificial Sequence
  Synthetic
gacggtccaggtccatct

SEQ ID NO: 30859 - DNA, 18 bp, Artificial Sequence
  Synthetic
acgagagtccgtcgagga

SEQ ID NO: 30860 - DNA, 17 bp, Artificial Sequence
  Synthetic
cacgccgtgcagacact

SEQ ID NO: 30861 - DNA, 18 bp, Artificial Sequence
  Synthetic
gttgttgcgtggctttgc

SEQ ID NO: 30862 - DNA, 20 bp, Artificial Sequence
  Synthetic
ggctgcgttttgttcgattt

SEQ ID NO: 30863 - DNA, 16 bp, Artificial Sequence
  Synthetic
cgcgtctcctgcgtct

SEQ ID NO: 30864 - DNA, 16 bp, Artificial Sequence
  Synthetic
agtctgggccgtggct

SEQ ID NO: 30865 - DNA, 19 bp, Artificial Sequence
  Synthetic
cgaggagatcaagccctcg

SEQ ID NO: 30866 - DNA, 19 bp, Artificial Sequence
  Synthetic
ctgattgaggacgcggaaa

SEQ ID NO: 30867 - DNA, 17 bp, Artificial Sequence
  Synthetic
tcaaggcgcacgaatgc

SEQ ID NO: 30868 - DNA, 17 bp, Artificial Sequence
  Synthetic
ctgtaaccaccggcgtg

SEQ ID NO: 30869 - DNA, 16 bp, Artificial Sequence
  Synthetic
gacggcgtttcacccg

SEQ ID NO: 30870 - DNA, 20 bp, Artificial Sequence
  Synthetic
gcgattttatcctgcccaac

SEQ ID NO: 30871 - DNA, 20 bp, Artificial Sequence
  Synthetic
ggaggaggcaagaaagctgt

SEQ ID NO: 30872 - DNA, 18 bp, Artificial Sequence
  Synthetic
cacgagcatcgcaacaac

SEQ ID NO: 30873 - DNA, 18 bp, Artificial Sequence
  Synthetic
gctggacgccgagaactt

SEQ ID NO: 30874 - DNA, 20 bp, Artificial Sequence
  Synthetic
ggattactgccgcaagatgc

SEQ ID NO: 30875 - DNA, 20 bp, Artificial Sequence
  Synthetic
ctgtccttttgcgctctact

SEQ ID NO: 30876 - DNA, 18 bp, Artificial Sequence
  Synthetic
cagcaggttgaacgcaga

SEQ ID NO: 30877 - DNA, 18 bp, Artificial Sequence
  Synthetic
acgttagttggcggtgac

SEQ ID NO: 30878 - DNA, 18 bp, Artificial Sequence
  Synthetic
ccacggcaaaatcggaga

SEQ ID NO: 30879 - DNA, 15 bp, Artificial Sequence
  Synthetic
atgacgccgtcgcct

SEQ ID NO: 30880 - DNA, 18 bp, Artificial Sequence
  Synthetic
ctacacggccgagagtct

SEQ ID NO: 30881 - DNA, 16 bp, Artificial Sequence
  Synthetic
tcgcggactacgacgc

SEQ ID NO: 30882 - DNA, 16 bp, Artificial Sequence
  Synthetic
tggcaccgctgctgga

SEQ ID NO: 30883 - DNA, 16 bp, Artificial Sequence
  Synthetic
acggtctgcgtgcact

SEQ ID NO: 30884 - DNA, 16 bp, Artificial Sequence
  Synthetic
tgctgttgcacgggct

SEQ ID NO: 30885 - DNA, 18 bp, Artificial Sequence
  Synthetic
gggtgggaaaaggcctcc

SEQ ID NO: 30886 - DNA, 16 bp, Artificial Sequence
  Synthetic
tgttacccgcggcgac

SEQ ID NO: 30887 - DNA, 17 bp, Artificial Sequence
  Synthetic
gcaccagctcctccgtt

SEQ ID NO: 30888 - DNA, 16 bp, Artificial Sequence
  Synthetic
acgtagaccggcgcca

SEQ ID NO: 30889 - DNA, 17 bp, Artificial Sequence
  Synthetic
tgtcctacaacggccgt

SEQ ID NO: 30890 - DNA, 17 bp, Artificial Sequence
  Synthetic
agagacgacacagccgg

SEQ ID NO: 30891 - DNA, 18 bp, Artificial Sequence
  Synthetic
ccggacggtggttcatcc

SEQ ID NO: 30892 - DNA, 16 bp, Artificial Sequence
  Synthetic
acgctttcgtgcccgg

SEQ ID NO: 30893 - DNA, 16 bp, Artificial Sequence
  Synthetic
tccacaccgacgccga

SEQ ID NO: 30894 - DNA, 20 bp, Artificial Sequence
  Synthetic
gacaccatctttttcccgga

SEQ ID NO: 30895 - DNA, 18 bp, Artificial Sequence
  Synthetic
ccgtagacctgaccgact

SEQ ID NO: 30896 - DNA, 18 bp, Artificial Sequence
  Synthetic
gaagctttggtcgcctgc

SEQ ID NO: 30897 - DNA, 16 bp, Artificial Sequence
  Synthetic
accactacccgtcggc

SEQ ID NO: 30898 - DNA, 16 bp, Artificial Sequence
  Synthetic
tcgacgccatgccacc

SEQ ID NO: 30899 - DNA, 16 bp, Artificial Sequence
  Synthetic
gcggttgcctgtcagc

SEQ ID NO: 30900 - DNA, 16 bp, Artificial Sequence
  Synthetic
ggctgcgacgcgaaac

SEQ ID NO: 30901 - DNA, 17 bp, Artificial Sequence
  Synthetic
agaacgcggcttccgtc

SEQ ID NO: 30902 - DNA, 18 bp, Artificial Sequence
  Synthetic
ccgatccggtcatcgacc

SEQ ID NO: 30903 - DNA, 16 bp, Artificial Sequence
  Synthetic
tgggccagtgggagct

SEQ ID NO: 30904 - DNA, 16 bp, Artificial Sequence
  Synthetic
tgcggcctgggactca

SEQ ID NO: 30905 - DNA, 16 bp, Artificial Sequence
  Synthetic
tctggtcgccgtgctg

SEQ ID NO: 30906 - DNA, 16 bp, Artificial Sequence
  Synthetic
gacgcgctcaagacgc

SEQ ID NO: 30907 - DNA, 16 bp, Artificial Sequence
  Synthetic
attctccgggtcgcgc

SEQ ID NO: 30908 - DNA, 17 bp, Artificial Sequence
  Synthetic
cccgcgacaaaactgcg

SEQ ID NO: 30909 - DNA, 18 bp, Artificial Sequence
  Synthetic
cgccaggacagtcgcaaa

SEQ ID NO: 30910 - DNA, 19 bp, Artificial Sequence
  Synthetic
gcgagatgatgcacacgta

SEQ ID NO: 30911 - DNA, 20 bp, Artificial Sequence
  Synthetic
cggctagatgtttacgacgt

SEQ ID NO: 30912 - DNA, 19 bp, Artificial Sequence
  Synthetic
cttacctggacgaactgcg

SEQ ID NO: 30913 - DNA, 17 bp, Artificial Sequence
  Synthetic
cgcgcctcaacaatgcg

SEQ ID NO: 30914 - DNA, 17 bp, Artificial Sequence
  Synthetic
gtctgagcgtcgctgac

SEQ ID NO: 30915 - DNA, 16 bp, Artificial Sequence
  Synthetic
tcgcgctcgaccacct

SEQ ID NO: 30916 - DNA, 17 bp, Artificial Sequence
  Synthetic
gaagcgcaagagccacc

SEQ ID NO: 30917 - DNA, 16 bp, Artificial Sequence
  Synthetic
cgtccgcgacaacgtg

SEQ ID NO: 30918 - DNA, 16 bp, Artificial Sequence
  Synthetic
tccaccgagcacaggg

SEQ ID NO: 30919 - DNA, 16 bp, Artificial Sequence
  Synthetic
gaggtttcgcggcagc

SEQ ID NO: 30920 - DNA, 17 bp, Artificial Sequence
  Synthetic
agcccagcacgttaccc

SEQ ID NO: 30921 - DNA, 18 bp, Artificial Sequence
  Synthetic
tgctcgcccaggagacag

SEQ ID NO: 30922 - DNA, 18 bp, Artificial Sequence
  Synthetic
ccacatgatgatggcggc

SEQ ID NO: 30923 - DNA, 17 bp, Artificial Sequence
  Synthetic
actgtcgtttcccccgc

SEQ ID NO: 30924 - DNA, 16 bp, Artificial Sequence
  Synthetic
cgcgtgggtgccatac

SEQ ID NO: 30925 - DNA, 18 bp, Artificial Sequence
  Synthetic
ccacgaaaccgacaggcg

SEQ ID NO: 30926 - DNA, 17 bp, Artificial Sequence
  Synthetic
tggagcggactaccacc

SEQ ID NO: 30927 - DNA, 16 bp, Artificial Sequence
  Synthetic
tgctgtgcacctcggc

SEQ ID NO: 30928 - DNA, 17 bp, Artificial Sequence
  Synthetic
aggccctgatgatccgc

SEQ ID NO: 30929 - DNA, 17 bp, Artificial Sequence
  Synthetic
gccgaaccgctggctta

SEQ ID NO: 30930 - DNA, 19 bp, Artificial Sequence
  Synthetic
gctctacggagtgtgcaag

SEQ ID NO: 30931 - DNA, 17 bp, Artificial Sequence
  Synthetic
tgctctcgcacagctcc

SEQ ID NO: 30932 - DNA, 16 bp, Artificial Sequence
  Synthetic
tagcggctctccagcg

SEQ ID NO: 30933 - DNA, 19 bp, Artificial Sequence
  Synthetic
gggatccgcgtacagactg

SEQ ID NO: 30934 - DNA, 20 bp, Artificial Sequence
  Synthetic
ggccttgaacaccacgttac

SEQ ID NO: 30935 - DNA, 16 bp, Artificial Sequence
  Synthetic
caccagccgcgaaagg

SEQ ID NO: 30936 - DNA, 16 bp, Artificial Sequence
  Synthetic
tctcgagcgacaggcc

SEQ ID NO: 30937 - DNA, 16 bp, Artificial Sequence
  Synthetic
ttcagcgtccggcctc

SEQ ID NO: 30938 - DNA, 19 bp, Artificial Sequence
  Synthetic
ctttcctggacactctggc

SEQ ID NO: 30939 - DNA, 18 bp, Artificial Sequence
  Synthetic
tggctccttaccgtcaca

SEQ ID NO: 30940 - DNA, 18 bp, Artificial Sequence
  Synthetic
ttcctggccctgtgcttt

SEQ ID NO: 30941 - DNA, 19 bp, Artificial Sequence
  Synthetic
gctcatcacgcagacgatg

SEQ ID NO: 30942 - DNA, 18 bp, Artificial Sequence
  Synthetic
agctggacgtttaggcgt

SEQ ID NO: 30943 - DNA, 19 bp, Artificial Sequence
  Synthetic
cgctgaccatcaatgccac

SEQ ID NO: 30944 - DNA, 16 bp, Artificial Sequence
  Synthetic
tccagcggctcatggt

SEQ ID NO: 30945 - DNA, 17 bp, Artificial Sequence
  Synthetic
ctcgtactgctggccct

SEQ ID NO: 30946 - DNA, 18 bp, Artificial Sequence
  Synthetic
cgtcatactctagcctgg

SEQ ID NO: 30947 - DNA, 20 bp, Artificial Sequence
  Synthetic
gcactcaatgtaacgtcact

SEQ ID NO: 30948 - DNA, 18 bp, Artificial Sequence
  Synthetic
cacggcctcatcatgcaa

SEQ ID NO: 30949 - DNA, 16 bp, Artificial Sequence
  Synthetic
ccgctgacatcgccga

SEQ ID NO: 30950 - DNA, 17 bp, Artificial Sequence
  Synthetic
cggtacatgtggcggtc

SEQ ID NO: 30951 - DNA, 18 bp, Artificial Sequence
  Synthetic
gcttcgacacggtggaaa

SEQ ID NO: 30952 - DNA, 16 bp, Artificial Sequence
  Synthetic
aaacaccgccgcccac

SEQ ID NO: 30953 - DNA, 16 bp, Artificial Sequence
  Synthetic
cgggagcgaacgggat

SEQ ID NO: 30954 - DNA, 16 bp, Artificial Sequence
  Synthetic
ccggcgttttcgggac

SEQ ID NO: 30955 - DNA, 16 bp, Artificial Sequence
  Synthetic
acacgttgtacgccgc

SEQ ID NO: 30956 - DNA, 16 bp, Artificial Sequence
  Synthetic
agctacgccgcgagtc

SEQ ID NO: 30957 - DNA, 16 bp, Artificial Sequence
  Synthetic
agctggaagccgacgc

SEQ ID NO: 30958 - DNA, 18 bp, Artificial Sequence
  Synthetic
gtcgcctccacgagagaa

SEQ ID NO: 30959 - DNA, 19 bp, Artificial Sequence
  Synthetic
cagcgacatgttgcttcgt

SEQ ID NO: 30960 - DNA, 16 bp, Artificial Sequence
  Synthetic
ggccgtgcagtctgga

SEQ ID NO: 30961 - DNA, 20 bp, Artificial Sequence
  Synthetic
agcgttggtcgtaacattct

SEQ ID NO: 30962 - DNA, 18 bp, Artificial Sequence
  Synthetic
acgtgtggtgtaactgcg

SEQ ID NO: 30963 - DNA, 16 bp, Artificial Sequence
  Synthetic
cggtgttggtgctcgc

SEQ ID NO: 30964 - DNA, 19 bp, Artificial Sequence
  Synthetic
ccgcatgggaaagtacggt

SEQ ID NO: 30965 - DNA, 20 bp, Artificial Sequence
  Synthetic
cgggctgtcacatcaactct

SEQ ID NO: 30966 - DNA, 19 bp, Artificial Sequence
  Synthetic
tgaaaaacacgacgaaagc

SEQ ID NO: 30967 - DNA, 17 bp, Artificial Sequence
  Synthetic
tcgtctgccccagtacc

SEQ ID NO: 30968 - DNA, 16 bp, Artificial Sequence
  Synthetic
ggcagcccatcctcgt

SEQ ID NO: 30969 - DNA, 18 bp, Artificial Sequence
  Synthetic
agctcaccgaccacagac

SEQ ID NO: 30970 - DNA, 20 bp, Artificial Sequence
  Synthetic
cgatcgtcatgcgtgtctac

SEQ ID NO: 30971 - DNA, 18 bp, Artificial Sequence
  Synthetic
ggacagagcagccgtttc

SEQ ID NO: 30972 - DNA, 16 bp, Artificial Sequence
  Synthetic
ttgtctgggcgcccga

SEQ ID NO: 30973 - DNA, 19 bp, Artificial Sequence
  Synthetic
tcaagcctgttagaaccgc

SEQ ID NO: 30974 - DNA, 19 bp, Artificial Sequence
  Synthetic
tgttgcaccggctttatgc

SEQ ID NO: 30975 - DNA, 16 bp, Artificial Sequence
  Synthetic
gcgcgcctttggacaa

SEQ ID NO: 30976 - DNA, 18 bp, Artificial Sequence
  Synthetic
gatgaccctggcgttgtt

SEQ ID NO: 30977 - DNA, 16 bp, Artificial Sequence
  Synthetic
cgagggaacgagcggt

SEQ ID NO: 30978 - DNA, 18 bp, Artificial Sequence
  Synthetic
ggcctctatctgcgccag

SEQ ID NO: 30979 - DNA, 16 bp, Artificial Sequence
  Synthetic
gaacacggtctgcggc

SEQ ID NO: 30980 - DNA, 19 bp, Artificial Sequence
  Synthetic
cgaagccgtataccgtcag

SEQ ID NO: 30981 - DNA, 19 bp, Artificial Sequence
  Synthetic
ggcgactttcagggcatct

SEQ ID NO: 30982 - DNA, 17 bp, Artificial Sequence
  Synthetic
tggctcggcttctgtca

SEQ ID NO: 30983 - DNA, 18 bp, Artificial Sequence
  Synthetic
gccgtgacactttggctc

SEQ ID NO: 30984 - DNA, 18 bp, Artificial Sequence
  Synthetic
actacctggcgcacagtc

SEQ ID NO: 30985 - DNA, 16 bp, Artificial Sequence
  Synthetic
aacaccacgcggtccg

SEQ ID NO: 30986 - DNA, 16 bp, Artificial Sequence
  Synthetic
taccggagcccccaga

SEQ ID NO: 30987 - DNA, 16 bp, Artificial Sequence
  Synthetic
gccctgttgcgcgtgt

SEQ ID NO: 30988 - DNA, 16 bp, Artificial Sequence
  Synthetic
ttcgccgtcgccgtac

SEQ ID NO: 30989 - DNA, 18 bp, Artificial Sequence
  Synthetic
attgattcgcctcgttcg

SEQ ID NO: 30990 - DNA, 23 bp, Artificial Sequence
  Synthetic
tgaaaagatgtggatatgtgttt

SEQ ID NO: 30991 - DNA, 21 bp, Artificial Sequence
  Synthetic
tttgaatccatccacataggc

SEQ ID NO: 30992 - DNA, 18 bp, Artificial Sequence
  Synthetic
ctcactctggatccagct

SEQ ID NO: 30993 - DNA, 23 bp, Artificial Sequence
  Synthetic
ttatcattggaatcagttggaag

SEQ ID NO: 30994 - DNA, 18 bp, Artificial Sequence
  Synthetic
cagtccgcaagagcattt

SEQ ID NO: 30995 - DNA, 22 bp, Artificial Sequence
  Synthetic
tgaatataggctgttgaacaca

SEQ ID NO: 30996 - DNA, 21 bp, Artificial Sequence
  Synthetic
aaatgcagagagtaccattct

SEQ ID NO: 30997 - DNA, 22 bp, Artificial Sequence
  Synthetic
ataggtagcatcattcaggttg

SEQ ID NO: 30998 - DNA, 19 bp, Artificial Sequence
  Synthetic
tgatccatcattgcccttt

SEQ ID NO: 30999 - DNA, 18 bp, Artificial Sequence
  Synthetic
gttggttggtgttccctc

SEQ ID NO: 31000 - DNA, 19 bp, Artificial Sequence
  Synthetic
gtatcgaaacccacacgta

SEQ ID NO: 31001 - DNA, 21 bp, Artificial Sequence
  Synthetic
tccacatcaagatcatacagt

SEQ ID NO: 31002 - DNA, 20 bp, Artificial Sequence
  Synthetic
gggcaactctggatggtcta

SEQ ID NO: 31003 - DNA, 25 bp, Artificial Sequence
  Synthetic
attatacatgactcacaaaaaccac

SEQ ID NO: 31004 - DNA, 24 bp, Artificial Sequence
  Synthetic
tcaaattcctctctatagtcttct

SEQ ID NO: 31005 - DNA, 20 bp, Artificial Sequence
  Synthetic
cttgcacctgttgttccatg

SEQ ID NO: 31006 - DNA, 18 bp, Artificial Sequence
  Synthetic
ttccatccaaacccacca

SEQ ID NO: 31007 - DNA, 19 bp, Artificial Sequence
  Synthetic
tttccatcagcacaggtaa

SEQ ID NO: 31008 - DNA, 19 bp, Artificial Sequence
  Synthetic
acttctcagctcctcagtt

SEQ ID NO: 31009 - DNA, 18 bp, Artificial Sequence
  Synthetic
tcctctcgaactgcggtg

SEQ ID NO: 31010 - DNA, 20 bp, Artificial Sequence
  Synthetic
gttgttgctatgactggatt

SEQ ID NO: 31011 - DNA, 18 bp, Artificial Sequence
  Synthetic
caaaggcgtttccaagtt

SEQ ID NO: 31012 - DNA, 20 bp, Artificial Sequence
  Synthetic
aactggccaagcaaaacatc

SEQ ID NO: 31013 - DNA, 19 bp, Artificial Sequence
  Synthetic
gcacattacgtccctggaa

SEQ ID NO: 31014 - DNA, 21 bp, Artificial Sequence
  Synthetic
gttgaatgtgaaactgtttgt

SEQ ID NO: 31015 - DNA, 23 bp, Artificial Sequence
  Synthetic
caccttagaaagttctaaccctt

SEQ ID NO: 31016 - DNA, 23 bp, Artificial Sequence
  Synthetic
gatcttttgctaccaaactagat

SEQ ID NO: 31017 - DNA, 19 bp, Artificial Sequence
  Synthetic
ggaccaatgaaagcttgcg

SEQ ID NO: 31018 - DNA, 18 bp, Artificial Sequence
  Synthetic
cttgggcccaacatcctg

SEQ ID NO: 31019 - DNA, 22 bp, Artificial Sequence
  Synthetic
ctttgctcttactcatacatct

SEQ ID NO: 31020 - DNA, 19 bp, Artificial Sequence
  Synthetic
gcaattaagggtgagccaa

SEQ ID NO: 31021 - DNA, 18 bp, Artificial Sequence
  Synthetic
actgtctggggatgacaa

SEQ ID NO: 31022 - DNA, 18 bp, Artificial Sequence
  Synthetic
gcagctgccaagtggtat

SEQ ID NO: 31023 - DNA, 18 bp, Artificial Sequence
  Synthetic
aagtcaacttgcgcgctg

SEQ ID NO: 31024 - DNA, 18 bp, Artificial Sequence
  Synthetic
acttcgggctcaacacct

SEQ ID NO: 31025 - DNA, 20 bp, Artificial Sequence
  Synthetic
ggtagtatacagccgagtct

SEQ ID NO: 31026 - DNA, 18 bp, Artificial Sequence
  Synthetic
tccctacctaacgcccct

SEQ ID NO: 31027 - DNA, 19 bp, Artificial Sequence
  Synthetic
ttggacgatgtcaaagtga

SEQ ID NO: 31028 - DNA, 23 bp, Artificial Sequence
  Synthetic
aatgactatgtttttgactctcg

SEQ ID NO: 31029 - DNA, 18 bp, Artificial Sequence
  Synthetic
attcaagactgcgcacgc

SEQ ID NO: 31030 - DNA, 18 bp, Artificial Sequence
  Synthetic
cgcaggacaggatgcatc

SEQ ID NO: 31031 - DNA, 16 bp, Artificial Sequence
  Synthetic
ctcacgcagcagtcgc

SEQ ID NO: 31032 - DNA, 19 bp, Artificial Sequence
  Synthetic
gcattgcatccctaaaagt

SEQ ID NO: 31033 - DNA, 18 bp, Artificial Sequence
  Synthetic
ccgcgggatccaggttag

SEQ ID NO: 31034 - DNA, 20 bp, Artificial Sequence
  Synthetic
taagttagcctgcacattgg

SEQ ID NO: 31035 - DNA, 18 bp, Artificial Sequence
  Synthetic
aacgatcgcctactggag

SEQ ID NO: 31036 - DNA, 21 bp, Artificial Sequence
  Synthetic
ttcctttttaccatggtgtcc

SEQ ID NO: 31037 - DNA, 19 bp, Artificial Sequence
  Synthetic
accctatgcaaccctgtgg

SEQ ID NO: 31038 - DNA, 20 bp, Artificial Sequence
  Synthetic
acaaattctgcccactcata

SEQ ID NO: 31039 - DNA, 25 bp, Artificial Sequence
  Synthetic
ctttcttatacctagtatgttgctt

SEQ ID NO: 31040 - DNA, 22 bp, Artificial Sequence
  Synthetic
tgttacatctggagttgttagt

SEQ ID NO: 31041 - DNA, 18 bp, Artificial Sequence
  Synthetic
gtacttgcgagcatcggc

SEQ ID NO: 31042 - DNA, 16 bp, Artificial Sequence
  Synthetic
gcgtcccggtcactga

SEQ ID NO: 31043 - DNA, 20 bp, Artificial Sequence
  Synthetic
gacgcataatcgttcgctct

SEQ ID NO: 31044 - DNA, 22 bp, Artificial Sequence
  Synthetic
aatttgaatgtccactgtttga

SEQ ID NO: 31045 - DNA, 16 bp, Artificial Sequence
  Synthetic
ttagtgtgcgccccct

SEQ ID NO: 31046 - DNA, 19 bp, Artificial Sequence
  Synthetic
tgcttcctcataggacggc

SEQ ID NO: 31047 - DNA, 18 bp, Artificial Sequence
  Synthetic
aattgcaccagaccggga

SEQ ID NO: 31048 - DNA, 20 bp, Artificial Sequence
  Synthetic
gcgcctgagcaaaggtatta

SEQ ID NO: 31049 - DNA, 21 bp, Artificial Sequence
  Synthetic
agcaattgttccattggtaac

SEQ ID NO: 31050 - DNA, 19 bp, Artificial Sequence
  Synthetic
ccgttatctggcttaatgc

SEQ ID NO: 31051 - DNA, 24 bp, Artificial Sequence
  Synthetic
aaaagggtttacattatccatcac

SEQ ID NO: 31052 - DNA, 22 bp, Artificial Sequence
  Synthetic
gtcatttcttaacatggcttct

SEQ ID NO: 31053 - DNA, 19 bp, Artificial Sequence
  Synthetic
ccatccacagaacgcttta

SEQ ID NO: 31054 - DNA, 21 bp, Artificial Sequence
  Synthetic
taacacgatcgcatagaaact

SEQ ID NO: 31055 - DNA, 18 bp, Artificial Sequence
  Synthetic
ccatccaaaagccagcca

SEQ ID NO: 31056 - DNA, 23 bp, Artificial Sequence
  Synthetic
atacaattcattctgattgcgtt

SEQ ID NO: 31057 - DNA, 20 bp, Artificial Sequence
  Synthetic
gcgcaaatccagtttatcgc

SEQ ID NO: 31058 - DNA, 18 bp, Artificial Sequence
  Synthetic
ttcatgatgttggctgcg

SEQ ID NO: 31059 - DNA, 18 bp, Artificial Sequence
  Synthetic
gcggtttgcagctgactt

SEQ ID NO: 31060 - DNA, 18 bp, Artificial Sequence
  Synthetic
atcatgcagacggttctc

SEQ ID NO: 31061 - DNA, 19 bp, Artificial Sequence
  Synthetic
cagatatggcgtcgcgaac

SEQ ID NO: 31062 - DNA, 21 bp, Artificial Sequence
  Synthetic
attttctttttgcagggcatt

SEQ ID NO: 31063 - DNA, 20 bp, Artificial Sequence
  Synthetic
ggcggccatcatgagtttac

SEQ ID NO: 31064 - DNA, 19 bp, Artificial Sequence
  Synthetic
tatgtcagctagctctgca

SEQ ID NO: 31065 - DNA, 22 bp, Artificial Sequence
  Synthetic
taaaaattgatactgtgggcgt

SEQ ID NO: 31066 - DNA, 18 bp, Artificial Sequence
  Synthetic
agtcctcgacctcgtcct

SEQ ID NO: 31067 - DNA, 20 bp, Artificial Sequence
  Synthetic
gggctgtagagatgacggta

SEQ ID NO: 31068 - DNA, 24 bp, Artificial Sequence
  Synthetic
ctttttttactctttaagcgagag

SEQ ID NO: 31069 - DNA, 18 bp, Artificial Sequence
  Synthetic
tatggacttcggcctggg

SEQ ID NO: 31070 - DNA, 18 bp, Artificial Sequence
  Synthetic
tgcggatgacagttaggt

SEQ ID NO: 31071 - DNA, 23 bp, Artificial Sequence
  Synthetic
aaagtacacaatttcctctgtac

SEQ ID NO: 31072 - DNA, 18 bp, Artificial Sequence
  Synthetic
tggtgtgaaccagaaagg

SEQ ID NO: 31073 - DNA, 25 bp, Artificial Sequence
  Synthetic
ctcattaaaagggtaagtgtgatta

SEQ ID NO: 31074 - DNA, 18 bp, Artificial Sequence
  Synthetic
aaagggggctaaacactc

SEQ ID NO: 31075 - DNA, 21 bp, Artificial Sequence
  Synthetic
accggtgaacttaaaatagct

SEQ ID NO: 31076 - DNA, 18 bp, Artificial Sequence
  Synthetic
tgcttgttgggacacttt

SEQ ID NO: 31077 - DNA, 24 bp, Artificial Sequence
  Synthetic
catcattttcttctgtttcttcag

SEQ ID NO: 31078 - DNA, 22 bp, Artificial Sequence
  Synthetic
ggttattaaggctaagctttca

SEQ ID NO: 31079 - DNA, 19 bp, Artificial Sequence
  Synthetic
tgttgaggggagcagttgt

SEQ ID NO: 31080 - DNA, 22 bp, Artificial Sequence
  Synthetic
acattaaacctttttcggtact

SEQ ID NO: 31081 - DNA, 21 bp, Artificial Sequence
  Synthetic
gcataaaacctagaccattgg

SEQ ID NO: 31082 - DNA, 18 bp, Artificial Sequence
  Synthetic
agtgcagttgttttcagc

SEQ ID NO: 31083 - DNA, 18 bp, Artificial Sequence
  Synthetic
gttatcgtcagcaactgc

SEQ ID NO: 31084 - DNA, 24 bp, Artificial Sequence
  Synthetic
ccactataaatgttgaagttactc

SEQ ID NO: 31085 - DNA, 18 bp, Artificial Sequence
  Synthetic
gttgtttacgatgcagcg

SEQ ID NO: 31086 - DNA, 21 bp, Artificial Sequence
  Synthetic
ttatcgaaatcagagctgtgg

SEQ ID NO: 31087 - DNA, 21 bp, Artificial Sequence
  Synthetic
cgcttactaatatgggtccat

SEQ ID NO: 31088 - DNA, 23 bp, Artificial Sequence
  Synthetic
gttttgttgtttaatcattccga

SEQ ID NO: 31089 - DNA, 19 bp, Artificial Sequence
  Synthetic
gcctggctttgtactgttt

SEQ ID NO: 31090 - DNA, 19 bp, Artificial Sequence
  Synthetic
ggctagatcaccatcgctg

SEQ ID NO: 31091 - DNA, 20 bp, Artificial Sequence
  Synthetic
gccattctccatatgccaca

SEQ ID NO: 31092 - DNA, 19 bp, Artificial Sequence
  Synthetic
cgtgacctttctcacctgg

SEQ ID NO: 31093 - DNA, 24 bp, Artificial Sequence
  Synthetic
atccataattgtcttgatttcacc

SEQ ID NO: 31094 - DNA, 18 bp, Artificial Sequence
  Synthetic
tgtcagaacatgcagagc

SEQ ID NO: 31095 - DNA, 20 bp, Artificial Sequence
  Synthetic
tcacaatggtaatctcgaga

SEQ ID NO: 31096 - DNA, 23 bp, Artificial Sequence
  Synthetic
caggttctttatgtcattcctag

SEQ ID NO: 31097 - DNA, 18 bp, Artificial Sequence
  Synthetic
gccttgatgctcactgag

SEQ ID NO: 31098 - DNA, 20 bp, Artificial Sequence
  Synthetic
ggaatcttcttgcattcctt

SEQ ID NO: 31099 - DNA, 22 bp, Artificial Sequence
  Synthetic
atgacgtaatcactagtgaatg

SEQ ID NO: 31100 - DNA, 23 bp, Artificial Sequence
  Synthetic
cgttctatttttgaatgtttgga

SEQ ID NO: 31101 - DNA, 18 bp, Artificial Sequence
  Synthetic
tacattggtcacaaggcg

SEQ ID NO: 31102 - DNA, 22 bp, Artificial Sequence
  Synthetic
tctcaatttggacatttccttt

SEQ ID NO: 31103 - DNA, 23 bp, Artificial Sequence
  Synthetic
gtttttccattgaagcataaagc

SEQ ID NO: 31104 - DNA, 19 bp, Artificial Sequence
  Synthetic
ccctctcttcaggaacgta

SEQ ID NO: 31105 - DNA, 22 bp, Artificial Sequence
  Synthetic
gatagaataaagcaagatccgc

SEQ ID NO: 31106 - DNA, 18 bp, Artificial Sequence
  Synthetic
ttccaaggtccgtagtcc

SEQ ID NO: 31107 - DNA, 18 bp, Artificial Sequence
  Synthetic
ccctgatcaacgacatcg

SEQ ID NO: 31108 - DNA, 20 bp, Artificial Sequence
  Synthetic
tctcggattctacctgtgta

SEQ ID NO: 31109 - DNA, 20 bp, Artificial Sequence
  Synthetic
actcaaaagtctctgcagta

SEQ ID NO: 31110 - DNA, 21 bp, Artificial Sequence
  Synthetic
ccttgttttcgagcataatgc

SEQ ID NO: 31111 - DNA, 20 bp, Artificial Sequence
  Synthetic
ggtaactgttgttcctcagt

SEQ ID NO: 31112 - DNA, 19 bp, Artificial Sequence
  Synthetic
ggagatggtgcagatccca

SEQ ID NO: 31113 - DNA, 22 bp, Artificial Sequence
  Synthetic
gttttacaaaagcgtctctttg

SEQ ID NO: 31114 - DNA, 19 bp, Artificial Sequence
  Synthetic
gactctacttggagctcca

SEQ ID NO: 31115 - DNA, 20 bp, Artificial Sequence
  Synthetic
tgaagagtagtctcccctat

SEQ ID NO: 31116 - DNA, 22 bp, Artificial Sequence
  Synthetic
ttctgtataaccaatggaatcg

SEQ ID NO: 31117 - DNA, 21 bp, Artificial Sequence
  Synthetic
tcaaatgtttgagtgatgtca

SEQ ID NO: 31118 - DNA, 21 bp, Artificial Sequence
  Synthetic
ttctcctgaatgttgacctaa

SEQ ID NO: 31119 - DNA, 21 bp, Artificial Sequence
  Synthetic
gattttctgtgtctccaaact

SEQ ID NO: 31120 - DNA, 20 bp, Artificial Sequence
  Synthetic
gaggtagcttcaaaaggttc

SEQ ID NO: 31121 - DNA, 23 bp, Artificial Sequence
  Synthetic
cactggaaaatctttcacttaaa

SEQ ID NO: 31122 - DNA, 22 bp, Artificial Sequence
  Synthetic
tcttttgtagcttacagttgtt

SEQ ID NO: 31123 - DNA, 18 bp, Artificial Sequence
  Synthetic
gcgtttggccacaatcga

SEQ ID NO: 31124 - DNA, 18 bp, Artificial Sequence
  Synthetic
ttccctggaattcgcctt

SEQ ID NO: 31125 - DNA, 21 bp, Artificial Sequence
  Synthetic
acgtatgataacagcactaca

SEQ ID NO: 31126 - DNA, 17 bp, Artificial Sequence
  Synthetic
ggattctcgctgcagcc

SEQ ID NO: 31127 - DNA, 23 bp, Artificial Sequence
  Synthetic
ctttcgatgttttttcaactgat

SEQ ID NO: 31128 - DNA, 23 bp, Artificial Sequence
  Synthetic
ctttcagaagtccaatcatatgt

SEQ ID NO: 31129 - DNA, 21 bp, Artificial Sequence
  Synthetic
atgtaagccaaaagtgctaaa

SEQ ID NO: 31130 - DNA, 20 bp, Artificial Sequence
  Synthetic
cctttcactcttgaatccca

SEQ ID NO: 31131 - DNA, 23 bp, Artificial Sequence
  Synthetic
ctcttttcattttagctctctct

SEQ ID NO: 31132 - DNA, 18 bp, Artificial Sequence
  Synthetic
ctgtggtcagtgcattct

SEQ ID NO: 31133 - DNA, 24 bp, Artificial Sequence
  Synthetic
ccttggttagtatatgttttacct

SEQ ID NO: 31134 - DNA, 18 bp, Artificial Sequence
  Synthetic
gtcacatccacagcaaca

SEQ ID NO: 31135 - DNA, 23 bp, Artificial Sequence
  Synthetic
aattgtgtgtaatattgctgtca

SEQ ID NO: 31136 - DNA, 18 bp, Artificial Sequence
  Synthetic
cactgtccgttagttccc

SEQ ID NO: 31137 - DNA, 24 bp, Artificial Sequence
  Synthetic
aaatctataaaagacagcccaaag

SEQ ID NO: 31138 - DNA, 23 bp, Artificial Sequence
  Synthetic
acaatctttcacatattttgcct

SEQ ID NO: 31139 - DNA, 21 bp, Artificial Sequence
  Synthetic
gcaatacatgtttgtgtaggt

SEQ ID NO: 31140 - DNA, 18 bp, Artificial Sequence
  Synthetic
tgtttgcacagccatcaa

SEQ ID NO: 31141 - DNA, 25 bp, Artificial Sequence
  Synthetic
aatcaaataaatgtctgtgtctgtc

SEQ ID NO: 31142 - DNA, 18 bp, Artificial Sequence
  Synthetic
caggcaccacttccatac

SEQ ID NO: 31143 - DNA, 23 bp, Artificial Sequence
  Synthetic
ctccatcattaaattgacatgtt

SEQ ID NO: 31144 - DNA, 25 bp, Artificial Sequence
  Synthetic
gcattgtgtatagaatcatgactaa

SEQ ID NO: 31145 - DNA, 23 bp, Artificial Sequence
  Synthetic
gcaaataaaatccagaacctgta

SEQ ID NO: 31146 - DNA, 18 bp, Artificial Sequence
  Synthetic
tatcctgacacctttggc

SEQ ID NO: 31147 - DNA, 22 bp, Artificial Sequence
  Synthetic
ctgttaaaaaaatgtctggcaa

SEQ ID NO: 31148 - DNA, 20 bp, Artificial Sequence
  Synthetic
ttacggatgcacataatgtc

SEQ ID NO: 31149 - DNA, 21 bp, Artificial Sequence
  Synthetic
gtgtgaccttaggttactcat

SEQ ID NO: 31150 - DNA, 16 bp, Artificial Sequence
  Synthetic
ggggcactcgcaagca

SEQ ID NO: 31151 - DNA, 16 bp, Artificial Sequence
  Synthetic
acgcgccttggggata

SEQ ID NO: 31152 - DNA, 19 bp, Artificial Sequence
  Synthetic
atagttaacggccgaagcg

SEQ ID NO: 31153 - DNA, 16 bp, Artificial Sequence
  Synthetic
agcagacagtggcggc

SEQ ID NO: 31154 - DNA, 18 bp, Artificial Sequence
  Synthetic
acacgtgagtctcggcat

SEQ ID NO: 31155 - DNA, 18 bp, Artificial Sequence
  Synthetic
gggccacacacactggat

SEQ ID NO: 31156 - DNA, 20 bp, Artificial Sequence
  Synthetic
gtaggtagtctccggatgct

SEQ ID NO: 31157 - DNA, 20 bp, Artificial Sequence
  Synthetic
ggtactggacgtccacgata

SEQ ID NO: 31158 - DNA, 20 bp, Artificial Sequence
  Synthetic
gcggagacagtgtcagaatg

SEQ ID NO: 31159 - DNA, 19 bp, Artificial Sequence
  Synthetic
gcctggagtatgtggaggg

SEQ ID NO: 31160 - DNA, 18 bp, Artificial Sequence
  Synthetic
ctgtgatgggggcaagga

SEQ ID NO: 31161 - DNA, 18 bp, Artificial Sequence
  Synthetic
ccaccccaccaagtcttg

SEQ ID NO: 31162 - DNA, 19 bp, Artificial Sequence
  Synthetic
gctcttgccacttcctgtt

SEQ ID NO: 31163 - DNA, 20 bp, Artificial Sequence
  Synthetic
gtggaatagcactcgtcaca

SEQ ID NO: 31164 - DNA, 19 bp, Artificial Sequence
  Synthetic
gggaatcaccgaaacgtct

SEQ ID NO: 31165 - DNA, 18 bp, Artificial Sequence
  Synthetic
ccggcatcgtagcactcg

SEQ ID NO: 31166 - DNA, 19 bp, Artificial Sequence
  Synthetic
cattctgcacagaccccag

SEQ ID NO: 31167 - DNA, 20 bp, Artificial Sequence
  Synthetic
gcttgccagcgaaatttagg

SEQ ID NO: 31168 - DNA, 19 bp, Artificial Sequence
  Synthetic
gggcagaatgtccaccaaa

SEQ ID NO: 31169 - DNA, 19 bp, Artificial Sequence
  Synthetic
gactcagggacgtaatgcg

SEQ ID NO: 31170 - DNA, 19 bp, Artificial Sequence
  Synthetic
tcgagccgttcttgatgtg

SEQ ID NO: 31171 - DNA, 18 bp, Artificial Sequence
  Synthetic
gttagcactgccacgtcc

SEQ ID NO: 31172 - DNA, 18 bp, Artificial Sequence
  Synthetic
ctcaaccctggtagcggt

SEQ ID NO: 31173 - DNA, 17 bp, Artificial Sequence
  Synthetic
tctttgcggccagctct

SEQ ID NO: 31174 - DNA, 20 bp, Artificial Sequence
  Synthetic
tggtcgtggcatacaccata

SEQ ID NO: 31175 - DNA, 20 bp, Artificial Sequence
  Synthetic
gttcacagcgaagacctcat

SEQ ID NO: 31176 - DNA, 19 bp, Artificial Sequence
  Synthetic
tctatctgtgagggcggtg

SEQ ID NO: 31177 - DNA, 18 bp, Artificial Sequence
  Synthetic
gtcatatgctggctgcgg

SEQ ID NO: 31178 - DNA, 20 bp, Artificial Sequence
  Synthetic
ggcacaggagtaaatagcgg

SEQ ID NO: 31179 - DNA, 21 bp, Artificial Sequence
  Synthetic
tgatccattggtcaaaatgtt

SEQ ID NO: 31180 - DNA, 18 bp, Artificial Sequence
  Synthetic
aggtactctggccattca

SEQ ID NO: 31181 - DNA, 18 bp, Artificial Sequence
  Synthetic
tgtggcattgcactgaac

SEQ ID NO: 31182 - DNA, 21 bp, Artificial Sequence
  Synthetic
accagtatacatcgaagagaa

SEQ ID NO: 31183 - DNA, 18 bp, Artificial Sequence
  Synthetic
ataagtagacctggccgg

SEQ ID NO: 31184 - DNA, 20 bp, Artificial Sequence
  Synthetic
ctgtttcgtttgcagttagt

SEQ ID NO: 31185 - DNA, 24 bp, Artificial Sequence
  Synthetic
aacaattatatgctgatgccaatc

SEQ ID NO: 31186 - DNA, 18 bp, Artificial Sequence
  Synthetic
caccgtacctaggtccta

SEQ ID NO: 31187 - DNA, 19 bp, Artificial Sequence
  Synthetic
ttcatcactcctgcttgaa

SEQ ID NO: 31188 - DNA, 23 bp, Artificial Sequence
  Synthetic
acttcttgtagttctgtgacttt

SEQ ID NO: 31189 - DNA, 19 bp, Artificial Sequence
  Synthetic
caatccctttgcagcatta

SEQ ID NO: 31190 - DNA, 21 bp, Artificial Sequence
  Synthetic
ccataatcacaacttcctgtt

SEQ ID NO: 31191 - DNA, 21 bp, Artificial Sequence
  Synthetic
tccattctttgtgtaggtagt

SEQ ID NO: 31192 - DNA, 19 bp, Artificial Sequence
  Synthetic
ccattaccgccaacatgaa

SEQ ID NO: 31193 - DNA, 21 bp, Artificial Sequence
  Synthetic
gtgggttccgtatttacattc

SEQ ID NO: 31194 - DNA, 19 bp, Artificial Sequence
  Synthetic
caagggatgacagaccaaa

SEQ ID NO: 31195 - DNA, 21 bp, Artificial Sequence
  Synthetic
ctttgtccatctgattgactc

SEQ ID NO: 31196 - DNA, 19 bp, Artificial Sequence
  Synthetic
ggtccctgagattgatgcg

SEQ ID NO: 31197 - DNA, 18 bp, Artificial Sequence
  Synthetic
gcacggagagattggtgg

SEQ ID NO: 31198 - DNA, 20 bp, Artificial Sequence
  Synthetic
tgccggaaaaaactggaagt

SEQ ID NO: 31199 - DNA, 19 bp, Artificial Sequence
  Synthetic
ggtgattggggttccgagt

SEQ ID NO: 31200 - DNA, 20 bp, Artificial Sequence
  Synthetic
cgaccttctctgttgggtac

SEQ ID NO: 31201 - DNA, 21 bp, Artificial Sequence
  Synthetic
gcacactgaaagtacttttcc

SEQ ID NO: 31202 - DNA, 19 bp, Artificial Sequence
  Synthetic
gagggcaaacaatcgatag

SEQ ID NO: 31203 - DNA, 18 bp, Artificial Sequence
  Synthetic
tctcttcacaagcagagc

SEQ ID NO: 31204 - DNA, 22 bp, Artificial Sequence
  Synthetic
acatcttctgtagctaacaaag

SEQ ID NO: 31205 - DNA, 20 bp, Artificial Sequence
  Synthetic
gaatccacagacatagggtt

SEQ ID NO: 31206 - DNA, 18 bp, Artificial Sequence
  Synthetic
atgtcctggtggcagagc

SEQ ID NO: 31207 - DNA, 25 bp, Artificial Sequence
  Synthetic
tattttttgtcacatctatacctcc

SEQ ID NO: 31208 - DNA, 18 bp, Artificial Sequence
  Synthetic
tttcacatcggttggaca

SEQ ID NO: 31209 - DNA, 18 bp, Artificial Sequence
  Synthetic
tattgcaggggcgtctgg

SEQ ID NO: 31210 - DNA, 18 bp, Artificial Sequence
  Synthetic
gctggaacctgttgaaca

SEQ ID NO: 31211 - DNA, 18 bp, Artificial Sequence
  Synthetic
tcattccaggacgtcttc

SEQ ID NO: 31212 - DNA, 18 bp, Artificial Sequence
  Synthetic
acaggaaccttgagctgg

SEQ ID NO: 31213 - DNA, 22 bp, Artificial Sequence
  Synthetic
cctgaggaatactatcaccatt

SEQ ID NO: 31214 - DNA, 19 bp, Artificial Sequence
  Synthetic
tgttgtctgcaatggtaac

SEQ ID NO: 31215 - DNA, 18 bp, Artificial Sequence
  Synthetic
acgtttcctgagcgtaga

SEQ ID NO: 31216 - DNA, 18 bp, Artificial Sequence
  Synthetic
accactcccggtacaaag

SEQ ID NO: 31217 - DNA, 19 bp, Artificial Sequence
  Synthetic
gcgacagtaaagctccagc

SEQ ID NO: 31218 - DNA, 18 bp, Artificial Sequence
  Synthetic
gccagaaaacccgtcgaa

SEQ ID NO: 31219 - DNA, 20 bp, Artificial Sequence
  Synthetic
agcactagtgtcaccctcat

SEQ ID NO: 31220 - DNA, 20 bp, Artificial Sequence
  Synthetic
cgacttagtggagcatgagg

SEQ ID NO: 31221 - DNA, 18 bp, Artificial Sequence
  Synthetic
gccaactgtagaggcgtg

SEQ ID NO: 31222 - DNA, 18 bp, Artificial Sequence
  Synthetic
gttgtcatggccctggtc

SEQ ID NO: 31223 - DNA, 16 bp, Artificial Sequence
  Synthetic
atcgatccgcccgtcg

SEQ ID NO: 31224 - DNA, 16 bp, Artificial Sequence
  Synthetic
gaccggggtgaaacgc

SEQ ID NO: 31225 - DNA, 16 bp, Artificial Sequence
  Synthetic
tgacagagcccaccgc

SEQ ID NO: 31226 - DNA, 19 bp, Artificial Sequence
  Synthetic
tcaaaactgggaccgatcg

SEQ ID NO: 31227 - DNA, 16 bp, Artificial Sequence
  Synthetic
gccggatccaggcaca

SEQ ID NO: 31228 - DNA, 20 bp, Artificial Sequence
  Synthetic
ggatctgattcgggtcacca

SEQ ID NO: 31229 - DNA, 16 bp, Artificial Sequence
  Synthetic
gcgccctgtgcctcat

SEQ ID NO: 31230 - DNA, 18 bp, Artificial Sequence
  Synthetic
ggcagccaaggtgtcaac

SEQ ID NO: 31231 - DNA, 20 bp, Artificial Sequence
  Synthetic
ccactttaccatgggcgatg

SEQ ID NO: 31232 - DNA, 19 bp, Artificial Sequence
  Synthetic
gaacgagtccaggggaaac

SEQ ID NO: 31233 - DNA, 16 bp, Artificial Sequence
  Synthetic
tggcggggtgtcatgg

SEQ ID NO: 31234 - DNA, 20 bp, Artificial Sequence
  Synthetic
ttcatgaagcgggtagcagc

SEQ ID NO: 31235 - DNA, 18 bp, Artificial Sequence
  Synthetic
ctgctgggtggtggaaag

SEQ ID NO: 31236 - DNA, 19 bp, Artificial Sequence
  Synthetic
ggcagggtagtccatggta

SEQ ID NO: 31237 - DNA, 18 bp, Artificial Sequence
  Synthetic
atcacagaggcaacactc

SEQ ID NO: 31238 - DNA, 20 bp, Artificial Sequence
  Synthetic
ccagaaagtttcaggtcatc

SEQ ID NO: 31239 - DNA, 18 bp, Artificial Sequence
  Synthetic
tatacgccccgatcttca

SEQ ID NO: 31240 - DNA, 18 bp, Artificial Sequence
  Synthetic
ctttgttgcctgacacac

SEQ ID NO: 31241 - DNA, 18 bp, Artificial Sequence
  Synthetic
tcatggtcactctccgtt

SEQ ID NO: 31242 - DNA, 19 bp, Artificial Sequence
  Synthetic
gaaagagtcctcatcggag

SEQ ID NO: 31243 - DNA, 20 bp, Artificial Sequence
  Synthetic
tcctcttttaagtgcggaaa

SEQ ID NO: 31244 - DNA, 20 bp, Artificial Sequence
  Synthetic
cgcatatcaatgtcgtttga

SEQ ID NO: 31245 - DNA, 21 bp, Artificial Sequence
  Synthetic
ggctttatgtacgtaccaaac

SEQ ID NO: 31246 - DNA, 20 bp, Artificial Sequence
  Synthetic
atatcgaattgagccgagta

SEQ ID NO: 31247 - DNA, 20 bp, Artificial Sequence
  Synthetic
attcggtaaatgcaaacgta

SEQ ID NO: 31248 - DNA, 19 bp, Artificial Sequence
  Synthetic
ggggggataaaaggcatat

SEQ ID NO: 31249 - DNA, 16 bp, Artificial Sequence
  Synthetic
cgtgcttccacccgtg

SEQ ID NO: 31250 - DNA, 17 bp, Artificial Sequence
  Synthetic
cggtgggaacgtcgcat

SEQ ID NO: 31251 - DNA, 16 bp, Artificial Sequence
  Synthetic
gccgcgatccagaacc

SEQ ID NO: 31252 - DNA, 20 bp, Artificial Sequence
  Synthetic
gagcaattgtaccacgtcct

SEQ ID NO: 31253 - DNA, 18 bp, Artificial Sequence
  Synthetic
ggatggttgtagctgtcc

SEQ ID NO: 31254 - DNA, 22 bp, Artificial Sequence
  Synthetic
tgcatttaaagttctaggtgat

SEQ ID NO: 31255 - DNA, 25 bp, Artificial Sequence
  Synthetic
cttttataaatttctcctactggga

SEQ ID NO: 31256 - DNA, 20 bp, Artificial Sequence
  Synthetic
gttacttggctcattgcttc

SEQ ID NO: 31257 - DNA, 23 bp, Artificial Sequence
  Synthetic
agatcctacatacaaatcatcca

SEQ ID NO: 31258 - DNA, 20 bp, Artificial Sequence
  Synthetic
ttagtgctttggttcctcta

SEQ ID NO: 31259 - DNA, 20 bp, Artificial Sequence
  Synthetic
aggggtattaacaaactccc

SEQ ID NO: 31260 - DNA, 19 bp, Artificial Sequence
  Synthetic
tgcatggcttctcctttta

SEQ ID NO: 31261 - DNA, 20 bp, Artificial Sequence
  Synthetic
gggattgtagggaattccaa

SEQ ID NO: 31262 - DNA, 18 bp, Artificial Sequence
  Synthetic
tatggagactccctgacc

SEQ ID NO: 31263 - DNA, 18 bp, Artificial Sequence
  Synthetic
ttcattgtgtggctccct

SEQ ID NO: 31264 - DNA, 18 bp, Artificial Sequence
  Synthetic
ggctccatttcttgctct

SEQ ID NO: 31265 - DNA, 24 bp, Artificial Sequence
  Synthetic
ccacatgttaaaattttctgtcac

SEQ ID NO: 31266 - DNA, 24 bp, Artificial Sequence
  Synthetic
gctgtactattatggttttagcat

SEQ ID NO: 31267 - DNA, 25 bp, Artificial Sequence
  Synthetic
ctactcctaatggttcaatttttac

SEQ ID NO: 31268 - DNA, 19 bp, Artificial Sequence
  Synthetic
atccccaggagctgttgat

SEQ ID NO: 31269 - DNA, 20 bp, Artificial Sequence
  Synthetic
aaggtacctgaggtgtgact

SEQ ID NO: 31270 - DNA, 18 bp, Artificial Sequence
  Synthetic
caggcaaaaagcagctgc

SEQ ID NO: 31271 - DNA, 16 bp, Artificial Sequence
  Synthetic
tggccgcgtccatcag

SEQ ID NO: 31272 - DNA, 17 bp, Artificial Sequence
  Synthetic
tcgactccacggagctg

SEQ ID NO: 31273 - DNA, 19 bp, Artificial Sequence
  Synthetic
ccagtttgggctcctgaag

SEQ ID NO: 31274 - DNA, 17 bp, Artificial Sequence
  Synthetic
gggagcgtgcgttcaat

SEQ ID NO: 31275 - DNA, 19 bp, Artificial Sequence
  Synthetic
cgacatcacgtacgtcctc

SEQ ID NO: 31276 - DNA, 17 bp, Artificial Sequence
  Synthetic
cgctttgtcgtcccgga

SEQ ID NO: 31277 - DNA, 17 bp, Artificial Sequence
  Synthetic
ccgggagtttccgttcg

SEQ ID NO: 31278 - DNA, 17 bp, Artificial Sequence
  Synthetic
acgaaggaggcgatcgc

SEQ ID NO: 31279 - DNA, 16 bp, Artificial Sequence
  Synthetic
agaaggcagcggacgc

SEQ ID NO: 31280 - DNA, 16 bp, Artificial Sequence
  Synthetic
agagctctgcggggtg

SEQ ID NO: 31281 - DNA, 18 bp, Artificial Sequence
  Synthetic
tcggagcttcccaccgag

SEQ ID NO: 31282 - DNA, 16 bp, Artificial Sequence
  Synthetic
tgggactcgatggccg

SEQ ID NO: 31283 - DNA, 19 bp, Artificial Sequence
  Synthetic
catagcagcgccatcttcc

SEQ ID NO: 31284 - DNA, 19 bp, Artificial Sequence
  Synthetic
tgttcgcctacgtgaaacc

SEQ ID NO: 31285 - DNA, 16 bp, Artificial Sequence
  Synthetic
cggtctccttcgcgga

SEQ ID NO: 31286 - DNA, 19 bp, Artificial Sequence
  Synthetic
gggatctaccgggacatcc

SEQ ID NO: 31287 - DNA, 17 bp, Artificial Sequence
  Synthetic
gcacgggtacaaccagc

SEQ ID NO: 31288 - DNA, 18 bp, Artificial Sequence
  Synthetic
cgtgaagaccatccggga

SEQ ID NO: 31289 - DNA, 17 bp, Artificial Sequence
  Synthetic
gccgaggtgtacaggga

SEQ ID NO: 31290 - DNA, 18 bp, Artificial Sequence
  Synthetic
cttggcccgtttcttcgg

SEQ ID NO: 31291 - DNA, 17 bp, Artificial Sequence
  Synthetic
tcggtcgatctcgggga

SEQ ID NO: 31292 - DNA, 16 bp, Artificial Sequence
  Synthetic
aacaccgcggcgtacc

SEQ ID NO: 31293 - DNA, 20 bp, Artificial Sequence
  Synthetic
acgcgagcagagtaaatgtc

SEQ ID NO: 31294 - DNA, 15 bp, Artificial Sequence
  Synthetic
agacaacgcgcgtgc

SEQ ID NO: 31295 - DNA, 16 bp, Artificial Sequence
  Synthetic
cctcccctcgcctgtt

SEQ ID NO: 31296 - DNA, 16 bp, Artificial Sequence
  Synthetic
agtgtagcggcccgtc

SEQ ID NO: 31297 - DNA, 16 bp, Artificial Sequence
  Synthetic
gcgcttcgatctcgcc

SEQ ID NO: 31298 - DNA, 18 bp, Artificial Sequence
  Synthetic
actcgggggtgatgaagc

SEQ ID NO: 31299 - DNA, 16 bp, Artificial Sequence
  Synthetic
cgaacgcaacgggagc

SEQ ID NO: 31300 - DNA, 19 bp, Artificial Sequence
  Synthetic
gctttttatggcgcccgag

SEQ ID NO: 31301 - DNA, 19 bp, Artificial Sequence
  Synthetic
gcgctacttcatcttcggc

SEQ ID NO: 31302 - DNA, 18 bp, Artificial Sequence
  Synthetic
tgttcgaccactccaccc

SEQ ID NO: 31303 - DNA, 16 bp, Artificial Sequence
  Synthetic
gcagttccacgcggtc

SEQ ID NO: 31304 - DNA, 17 bp, Artificial Sequence
  Synthetic
tcgtcgcactcgctgta

SEQ ID NO: 31305 - DNA, 19 bp, Artificial Sequence
  Synthetic
gcacatgagcttgtaggcc

SEQ ID NO: 31306 - DNA, 16 bp, Artificial Sequence
  Synthetic
cgcccctgtctggtct

SEQ ID NO: 31307 - DNA, 20 bp, Artificial Sequence
  Synthetic
agtgcagaatcacgttggtc

SEQ ID NO: 31308 - DNA, 16 bp, Artificial Sequence
  Synthetic
acacaggatccgccgc

SEQ ID NO: 31309 - DNA, 16 bp, Artificial Sequence
  Synthetic
atcacccgggcagtcg

SEQ ID NO: 31310 - DNA, 17 bp, Artificial Sequence
  Synthetic
agaacccccaggatgcg

SEQ ID NO: 31311 - DNA, 16 bp, Artificial Sequence
  Synthetic
acgtcgctgtgccagg

SEQ ID NO: 31312 - DNA, 17 bp, Artificial Sequence
  Synthetic
acctcggcgatgtgtgt

SEQ ID NO: 31313 - DNA, 19 bp, Artificial Sequence
  Synthetic
tgtagaagtaccgctcggg

SEQ ID NO: 31314 - DNA, 16 bp, Artificial Sequence
  Synthetic
tcaccaggtcgtccgc

SEQ ID NO: 31315 - DNA, 16 bp, Artificial Sequence
  Synthetic
tactcaccccgcccga

SEQ ID NO: 31316 - DNA, 16 bp, Artificial Sequence
  Synthetic
tggtgggtacggggga

SEQ ID NO: 31317 - DNA, 19 bp, Artificial Sequence
  Synthetic
ccaaaggtgtttttccgcc

SEQ ID NO: 31318 - DNA, 17 bp, Artificial Sequence
  Synthetic
acggcccattcggagtc

SEQ ID NO: 31319 - DNA, 19 bp, Artificial Sequence
  Synthetic
gtacgcgtcgtagctgaat

SEQ ID NO: 31320 - DNA, 17 bp, Artificial Sequence
  Synthetic
acggcctccacgaagtc

SEQ ID NO: 31321 - DNA, 17 bp, Artificial Sequence
  Synthetic
tcgtagcggcccagaac

SEQ ID NO: 31322 - DNA, 18 bp, Artificial Sequence
  Synthetic
cgacggtaaacagcgtgt

SEQ ID NO: 31323 - DNA, 16 bp, Artificial Sequence
  Synthetic
tatgcggccggcgtag

SEQ ID NO: 31324 - DNA, 16 bp, Artificial Sequence
  Synthetic
agggccacgaagcgga

SEQ ID NO: 31325 - DNA, 17 bp, Artificial Sequence
  Synthetic
caggaggcgcggactaa

SEQ ID NO: 31326 - DNA, 16 bp, Artificial Sequence
  Synthetic
ttgggcgacgtctgcg

SEQ ID NO: 31327 - DNA, 17 bp, Artificial Sequence
  Synthetic
cacaccacaccacacgg

SEQ ID NO: 31328 - DNA, 15 bp, Artificial Sequence
  Synthetic
acgtgtgcgccgtgt

SEQ ID NO: 31329 - DNA, 16 bp, Artificial Sequence
  Synthetic
tacggcgtggtggtgc

SEQ ID NO: 31330 - DNA, 16 bp, Artificial Sequence
  Synthetic
accccgacgtcttccg

SEQ ID NO: 31331 - DNA, 19 bp, Artificial Sequence
  Synthetic
ggctcggctgaatgtggta

SEQ ID NO: 31332 - DNA, 17 bp, Artificial Sequence
  Synthetic
ccaggcgatggtcaggt

SEQ ID NO: 31333 - DNA, 16 bp, Artificial Sequence
  Synthetic
aagggaagctgcgccg

SEQ ID NO: 31334 - DNA, 17 bp, Artificial Sequence
  Synthetic
acgtgcgatcggatccc

SEQ ID NO: 31335 - DNA, 19 bp, Artificial Sequence
  Synthetic
acctcacacacctcacctc

SEQ ID NO: 31336 - DNA, 18 bp, Artificial Sequence
  Synthetic
gcattctcaggtacctcc

SEQ ID NO: 31337 - DNA, 19 bp, Artificial Sequence
  Synthetic
ggtgtctgagaccctggac

SEQ ID NO: 31338 - DNA, 19 bp, Artificial Sequence
  Synthetic
gcacgttgtattccaggaa

SEQ ID NO: 31339 - DNA, 25 bp, Artificial Sequence
  Synthetic
ctaaagctaacatatgttcatcttg

SEQ ID NO: 31340 - DNA, 18 bp, Artificial Sequence
  Synthetic
tacacatgaagggcagga

SEQ ID NO: 31341 - DNA, 24 bp, Artificial Sequence
  Synthetic
tcaatggaaatctcatatccatct

SEQ ID NO: 31342 - DNA, 23 bp, Artificial Sequence
  Synthetic
catgtcaaatctcacatagtaca

SEQ ID NO: 31343 - DNA, 19 bp, Artificial Sequence
  Synthetic
gtaagctcctcgtcttcgc

SEQ ID NO: 31344 - DNA, 20 bp, Artificial Sequence
  Synthetic
aggtgtagtttgctcatagc

SEQ ID NO: 31345 - DNA, 17 bp, Artificial Sequence
  Synthetic
gcactgacggccgaaag

SEQ ID NO: 31346 - DNA, 20 bp, Artificial Sequence
  Synthetic
cttgctgatactgtctgcca

SEQ ID NO: 31347 - DNA, 20 bp, Artificial Sequence
  Synthetic
ctggaaaaaatgagcagcgg

SEQ ID NO: 31348 - DNA, 19 bp, Artificial Sequence
  Synthetic
ctggtcttcttcaccatcc

SEQ ID NO: 31349 - DNA, 24 bp, Artificial Sequence
  Synthetic
gaactgattagaggaaactttagg

SEQ ID NO: 31350 - DNA, 18 bp, Artificial Sequence
  Synthetic
cctttgcaggtttagcac

SEQ ID NO: 31351 - DNA, 22 bp, Artificial Sequence
  Synthetic
ggtagtcaggatatttgcagat

SEQ ID NO: 31352 - DNA, 20 bp, Artificial Sequence
  Synthetic
ccattgtgtgtatgtaagcc

SEQ ID NO: 31353 - DNA, 20 bp, Artificial Sequence
  Synthetic
tgactgagtgataccagttt

SEQ ID NO: 31354 - DNA, 20 bp, Artificial Sequence
  Synthetic
tggcagcaaccaaaaggttt

SEQ ID NO: 31355 - DNA, 23 bp, Artificial Sequence
  Synthetic
atttcttcagttaaaagttgctc

SEQ ID NO: 31356 - DNA, 18 bp, Artificial Sequence
  Synthetic
gcgctacctgttcagaaa

SEQ ID NO: 31357 - DNA, 21 bp, Artificial Sequence
  Synthetic
aacctaatctttgcaaacctt

SEQ ID NO: 31358 - DNA, 22 bp, Artificial Sequence
  Synthetic
agctgtaggaatagattttggt

SEQ ID NO: 31359 - DNA, 18 bp, Artificial Sequence
  Synthetic
taaggccctgacatttgc

SEQ ID NO: 31360 - DNA, 25 bp, Artificial Sequence
  Synthetic
ctgtgtattgaatatctgaatccaa

SEQ ID NO: 31361 - DNA, 22 bp, Artificial Sequence
  Synthetic
caatactctataagcgtttcca

SEQ ID NO: 31362 - DNA, 18 bp, Artificial Sequence
  Synthetic
catttgggattgcttggg

SEQ ID NO: 31363 - DNA, 21 bp, Artificial Sequence
  Synthetic
ttacagatgaaacagagcatc

SEQ ID NO: 31364 - DNA, 18 bp, Artificial Sequence
  Synthetic
gcagcactaactcctgta

SEQ ID NO: 31365 - DNA, 25 bp, Artificial Sequence
  Synthetic
ctcagcactagaatttatagagttt

SEQ ID NO: 31366 - DNA, 18 bp, Artificial Sequence
  Synthetic
ttagagactgcagcgttg

SEQ ID NO: 31367 - DNA, 22 bp, Artificial Sequence
  Synthetic
ttaaattttgcaagtgctgttg

SEQ ID NO: 31368 - DNA, 18 bp, Artificial Sequence
  Synthetic
gcagcagcattagcatct

SEQ ID NO: 31369 - DNA, 21 bp, Artificial Sequence
  Synthetic
aatattgcatcttgtagtgca

SEQ ID NO: 31370 - DNA, 18 bp, Artificial Sequence
  Synthetic
tcctccagatcgaaggcg

SEQ ID NO: 31371 - DNA, 18 bp, Artificial Sequence
  Synthetic
gaagcctattgcgccagc

SEQ ID NO: 31372 - DNA, 20 bp, Artificial Sequence
  Synthetic
gacggtctgcaagagtatta

SEQ ID NO: 31373 - DNA, 22 bp, Artificial Sequence
  Synthetic
ggaatattggaagcagaactga

SEQ ID NO: 31374 - DNA, 22 bp, Artificial Sequence
  Synthetic
ttggtagtttcaatgatcactc

SEQ ID NO: 31375 - DNA, 20 bp, Artificial Sequence
  Synthetic
ttccgtgtagatacctgatc

SEQ ID NO: 31376 - DNA, 23 bp, Artificial Sequence
  Synthetic
taatttttcctctgaggcctaat

SEQ ID NO: 31377 - DNA, 19 bp, Artificial Sequence
  Synthetic
ttgaacacctccagatgtc

SEQ ID NO: 31378 - DNA, 20 bp, Artificial Sequence
  Synthetic
gaacctgttttggatcaaca

SEQ ID NO: 31379 - DNA, 22 bp, Artificial Sequence
  Synthetic
ccatagatatcctgctccattt

SEQ ID NO: 31380 - DNA, 21 bp, Artificial Sequence
  Synthetic
gcttgcaatgtttagtactgt

SEQ ID NO: 31381 - DNA, 25 bp, Artificial Sequence
  Synthetic
cagctattactattggaaagtgttt

SEQ ID NO: 31382 - DNA, 23 bp, Artificial Sequence
  Synthetic
ttctcttgttagctattattggg

SEQ ID NO: 31383 - DNA, 25 bp, Artificial Sequence
  Synthetic
ctattgtaatccattctagtgatct

SEQ ID NO: 31384 - DNA, 19 bp, Artificial Sequence
  Synthetic
attagcgcttcataccctt

SEQ ID NO: 31385 - DNA, 21 bp, Artificial Sequence
  Synthetic
agtctaactttttgcccaaat

SEQ ID NO: 31386 - DNA, 22 bp, Artificial Sequence
  Synthetic
actcacccctaaagatacaatc

SEQ ID NO: 31387 - DNA, 18 bp, Artificial Sequence
  Synthetic
ccttacacctgcttcaca

SEQ ID NO: 31388 - DNA, 20 bp, Artificial Sequence
  Synthetic
cttcatcttctcctatgcca

SEQ ID NO: 31389 - DNA, 20 bp, Artificial Sequence
  Synthetic
gcatcatctaggaagcctaa

SEQ ID NO: 31390 - DNA, 18 bp, Artificial Sequence
  Synthetic
attctgaaaccgctggtg

SEQ ID NO: 31391 - DNA, 19 bp, Artificial Sequence
  Synthetic
tcgcgagagaccagatctt

SEQ ID NO: 31392 - DNA, 20 bp, Artificial Sequence
  Synthetic
tcaacaggagcttctatagg

SEQ ID NO: 31393 - DNA, 21 bp, Artificial Sequence
  Synthetic
ctaatgggatttcttcaccaa

SEQ ID NO: 31394 - DNA, 22 bp, Artificial Sequence
  Synthetic
cccaacctaattatatctgcaa

SEQ ID NO: 31395 - DNA, 21 bp, Artificial Sequence
  Synthetic
tgactcaaaaggtgctatagg

SEQ ID NO: 31396 - DNA, 19 bp, Artificial Sequence
  Synthetic
tgggatctccatcattcct

SEQ ID NO: 31397 - DNA, 23 bp, Artificial Sequence
  Synthetic
cattaggattttcagtatctgga

SEQ ID NO: 31398 - DNA, 18 bp, Artificial Sequence
  Synthetic
cctgctttgtcttgcaaa

SEQ ID NO: 31399 - DNA, 25 bp, Artificial Sequence
  Synthetic
catgagatcccattttaaaattcac

SEQ ID NO: 31400 - DNA, 19 bp, Artificial Sequence
  Synthetic
ggtcaagttcactggagaa

SEQ ID NO: 31401 - DNA, 22 bp, Artificial Sequence
  Synthetic
aatacatgagtgtctgaacttg

SEQ ID NO: 31402 - DNA, 18 bp, Artificial Sequence
  Synthetic
atgactcttcagcagcca

SEQ ID NO: 31403 - DNA, 19 bp, Artificial Sequence
  Synthetic
aatttctctggagcaagct

SEQ ID NO: 31404 - DNA, 22 bp, Artificial Sequence
  Synthetic
gactcccaatatactttcgttt

SEQ ID NO: 31405 - DNA, 21 bp, Artificial Sequence
  Synthetic
aaattgccttgtaagatcagt

SEQ ID NO: 31406 - DNA, 23 bp, Artificial Sequence
  Synthetic
ggctttaaaaaacaaagatgcaa

SEQ ID NO: 31407 - DNA, 23 bp, Artificial Sequence
  Synthetic
gagcttctggatttataatgtct

SEQ ID NO: 31408 - DNA, 19 bp, Artificial Sequence
  Synthetic
gggaaggcttagtaacgaa

SEQ ID NO: 31409 - DNA, 20 bp, Artificial Sequence
  Synthetic
tccaaactaagcgttcttca

SEQ ID NO: 31410 - DNA, 23 bp, Artificial Sequence
  Synthetic
ggtaaatcattacaaggtttagc

SEQ ID NO: 31411 - DNA, 19 bp, Artificial Sequence
  Synthetic
gctttagttttgcgccttt

SEQ ID NO: 31412 - DNA, 20 bp, Artificial Sequence
  Synthetic
cgccttttttgtaccagagt

SEQ ID NO: 31413 - DNA, 20 bp, Artificial Sequence
  Synthetic
agctcaccatcttttattgc

SEQ ID NO: 31414 - DNA, 21 bp, Artificial Sequence
  Synthetic
acagttgcaattcattgtctt

SEQ ID NO: 31415 - DNA, 23 bp, Artificial Sequence
  Synthetic
tcaatatctggtgtttcatttcc

SEQ ID NO: 31416 - DNA, 20 bp, Artificial Sequence
  Synthetic
ggaggaatcacaaccaagca

SEQ ID NO: 31417 - DNA, 18 bp, Artificial Sequence
  Synthetic
gttagctgcttcctgagt

SEQ ID NO: 31418 - DNA, 18 bp, Artificial Sequence
  Synthetic
acaaccaataggcagcca

SEQ ID NO: 31419 - DNA, 22 bp, Artificial Sequence
  Synthetic
caactattgtagcagtgttgtt

SEQ ID NO: 31420 - DNA, 21 bp, Artificial Sequence
  Synthetic
gttcataactaggtaaggcac

SEQ ID NO: 31421 - DNA, 19 bp, Artificial Sequence
  Synthetic
atctttgcactggataggg

SEQ ID NO: 31422 - DNA, 20 bp, Artificial Sequence
  Synthetic
gatgtctgataccagcatga

SEQ ID NO: 31423 - DNA, 21 bp, Artificial Sequence
  Synthetic
acttctttctaagctggacaa

SEQ ID NO: 31424 - DNA, 23 bp, Artificial Sequence
  Synthetic
attatatgctgatgctatgccta

SEQ ID NO: 31425 - DNA, 23 bp, Artificial Sequence
  Synthetic
tgtttttatgtttgtcctcttct

SEQ ID NO: 31426 - DNA, 22 bp, Artificial Sequence
  Synthetic
ttcattactccagcttggtatc

SEQ ID NO: 31427 - DNA, 20 bp, Artificial Sequence
  Synthetic
ttgatcagtaaaaccagtgc

SEQ ID NO: 31428 - DNA, 20 bp, Artificial Sequence
  Synthetic
gaggcatataagggtgagaa

SEQ ID NO: 31429 - DNA, 19 bp, Artificial Sequence
  Synthetic
tgttgctggtaaccatcaa

SEQ ID NO: 31430 - DNA, 23 bp, Artificial Sequence
  Synthetic
ttcaacttaccattctttgtgta

SEQ ID NO: 31431 - DNA, 24 bp, Artificial Sequence
  Synthetic
tctaactctattatggtgagttct

SEQ ID NO: 31432 - DNA, 21 bp, Artificial Sequence
  Synthetic
ccaccaacatgtattccaaat

SEQ ID NO: 31433 - DNA, 23 bp, Artificial Sequence
  Synthetic
agattcagctaatttcacttcaa

SEQ ID NO: 31434 - DNA, 20 bp, Artificial Sequence
  Synthetic
ccttgctcattgatgaagtg

SEQ ID NO: 31435 - DNA, 18 bp, Artificial Sequence
  Synthetic
tccctctccttcatgact

SEQ ID NO: 31436 - DNA, 21 bp, Artificial Sequence
  Synthetic
acaagatgcattaagtaaggc

SEQ ID NO: 31437 - DNA, 18 bp, Artificial Sequence
  Synthetic
ttgaaacctggcctatgg

SEQ ID NO: 31438 - DNA, 20 bp, Artificial Sequence
  Synthetic
tgctaataaagtcctgcaga

SEQ ID NO: 31439 - DNA, 20 bp, Artificial Sequence
  Synthetic
atttctttccgggatcatct

SEQ ID NO: 31440 - DNA, 20 bp, Artificial Sequence
  Synthetic
atgatgacatcctgtgcttc

SEQ ID NO: 31441 - DNA, 18 bp, Artificial Sequence
  Synthetic
ttgggtcaaatgcaacac

SEQ ID NO: 31442 - DNA, 21 bp, Artificial Sequence
  Synthetic
ccttacatatatccacagcct

SEQ ID NO: 31443 - DNA, 19 bp, Artificial Sequence
  Synthetic
cgattgattgctcgtcttt

SEQ ID NO: 31444 - DNA, 19 bp, Artificial Sequence
  Synthetic
aatgacatctctgtgctgg

SEQ ID NO: 31445 - DNA, 24 bp, Artificial Sequence
  Synthetic
cattttcccaatttctaatgatcc

SEQ ID NO: 31446 - DNA, 20 bp, Artificial Sequence
  Synthetic
ttgccttgttgtagttgaac

SEQ ID NO: 31447 - DNA, 20 bp, Artificial Sequence
  Synthetic
aaatgcaactcaacatcctt

SEQ ID NO: 31448 - DNA, 23 bp, Artificial Sequence
  Synthetic
tcgttttagtagtgaaacagttt

SEQ ID NO: 31449 - DNA, 19 bp, Artificial Sequence
  Synthetic
ccgcttacatttgctgttt

SEQ ID NO: 31450 - DNA, 17 bp, Artificial Sequence
  Synthetic
cgtcgtccgaccgaaga

SEQ ID NO: 31451 - DNA, 21 bp, Artificial Sequence
  Synthetic
aattggcttttgtttggattc

SEQ ID NO: 31452 - DNA, 20 bp, Artificial Sequence
  Synthetic
cttcacctggaactactgta

SEQ ID NO: 31453 - DNA, 19 bp, Artificial Sequence
  Synthetic
ctaaaagaatccgcttggg

SEQ ID NO: 31454 - DNA, 18 bp, Artificial Sequence
  Synthetic
ccacaggtttagcaggag

SEQ ID NO: 31455 - DNA, 25 bp, Artificial Sequence
  Synthetic
ccttttctggattataaacagactt

SEQ ID NO: 31456 - DNA, 19 bp, Artificial Sequence
  Synthetic
cctgttgctggtaaacaac

SEQ ID NO: 31457 - DNA, 20 bp, Artificial Sequence
  Synthetic
gatccaatggaaaggacccg

SEQ ID NO: 31458 - DNA, 18 bp, Artificial Sequence
  Synthetic
aggggtagccaggctgac

SEQ ID NO: 31459 - DNA, 16 bp, Artificial Sequence
  Synthetic
gcgcctgcgaggagat

SEQ ID NO: 31460 - DNA, 19 bp, Artificial Sequence
  Synthetic
cctctacccctgcaaacag

SEQ ID NO: 31461 - DNA, 20 bp, Artificial Sequence
  Synthetic
ggcactacactacactccct

SEQ ID NO: 31462 - DNA, 19 bp, Artificial Sequence
  Synthetic
gtttccggaagcagtcagt

SEQ ID NO: 31463 - DNA, 19 bp, Artificial Sequence
  Synthetic
gcatattcgagcatccgcc

SEQ ID NO: 31464 - DNA, 20 bp, Artificial Sequence
  Synthetic
ccacatgcctagagctgtgt

SEQ ID NO: 31465 - DNA, 17 bp, Artificial Sequence
  Synthetic
cctccgtgacgcatgtc

SEQ ID NO: 31466 - DNA, 20 bp, Artificial Sequence
  Synthetic
accaggtagaggtcgctaga

SEQ ID NO: 31467 - DNA, 16 bp, Artificial Sequence
  Synthetic
ggtctgaggcaccgca

SEQ ID NO: 31468 - DNA, 18 bp, Artificial Sequence
  Synthetic
gggggacagtgacagagc

SEQ ID NO: 31469 - DNA, 20 bp, Artificial Sequence
  Synthetic
aagttgggtccaagctgaag

SEQ ID NO: 31470 - DNA, 18 bp, Artificial Sequence
  Synthetic
caggtggtcttggcagac

SEQ ID NO: 31471 - DNA, 20 bp, Artificial Sequence
  Synthetic
ccacctacgattacccacgt

SEQ ID NO: 31472 - DNA, 18 bp, Artificial Sequence
  Synthetic
ataagcccgccaggtact

SEQ ID NO: 31473 - DNA, 15 bp, Artificial Sequence
  Synthetic
agtgcacccgccaca

SEQ ID NO: 31474 - DNA, 18 bp, Artificial Sequence
  Synthetic
acacacccagtcccacac

SEQ ID NO: 31475 - DNA, 18 bp, Artificial Sequence
  Synthetic
gtttgtagttgggggccg

SEQ ID NO: 31476 - DNA, 18 bp, Artificial Sequence
  Synthetic
cggtgatgtgtgaggggt

SEQ ID NO: 31477 - DNA, 18 bp, Artificial Sequence
  Synthetic
acatccagacacgacggg

SEQ ID NO: 31478 - DNA, 19 bp, Artificial Sequence
  Synthetic
gctcaagtctgggtctcca

SEQ ID NO: 31479 - DNA, 20 bp, Artificial Sequence
  Synthetic
ggggagtactggaaaccgta

SEQ ID NO: 31480 - DNA, 20 bp, Artificial Sequence
  Synthetic
ccgcataccagcatgtcaaa

SEQ ID NO: 31481 - DNA, 19 bp, Artificial Sequence
  Synthetic
ccatattgtgggggcgtac

SEQ ID NO: 31482 - DNA, 19 bp, Artificial Sequence
  Synthetic
cgcatatcgctgctttccc

SEQ ID NO: 31483 - DNA, 22 bp, Artificial Sequence
  Synthetic
ctgatactttccatcacaacat

SEQ ID NO: 31484 - DNA, 20 bp, Artificial Sequence
  Synthetic
cgagtctttttcctgcaatt

SEQ ID NO: 31485 - DNA, 22 bp, Artificial Sequence
  Synthetic
ctcaattttacattggcatcaa

SEQ ID NO: 31486 - DNA, 21 bp, Artificial Sequence
  Synthetic
cagaaattggcaaactcatct

SEQ ID NO: 31487 - DNA, 20 bp, Artificial Sequence
  Synthetic
gcccatcttgtgaatctcaa

SEQ ID NO: 31488 - DNA, 20 bp, Artificial Sequence
  Synthetic
ggtcaattgatccaaaggtt

SEQ ID NO: 31489 - DNA, 20 bp, Artificial Sequence
  Synthetic
tggaacacaacattgacaat

SEQ ID NO: 31490 - DNA, 18 bp, Artificial Sequence
  Synthetic
ttggagtctcccatggtg

SEQ ID NO: 31491 - DNA, 20 bp, Artificial Sequence
  Synthetic
gaaaactgacaccaaagagg

SEQ ID NO: 31492 - DNA, 19 bp, Artificial Sequence
  Synthetic
cactgcgtcatttttgaga

SEQ ID NO: 31493 - DNA, 22 bp, Artificial Sequence
  Synthetic
acatttccacattttgtcatca

SEQ ID NO: 31494 - DNA, 18 bp, Artificial Sequence
  Synthetic
agttctgcactggtctca

SEQ ID NO: 31495 - DNA, 19 bp, Artificial Sequence
  Synthetic
cgctgatgtggatatctcg

SEQ ID NO: 31496 - DNA, 19 bp, Artificial Sequence
  Synthetic
accactagttgcagtacaa

SEQ ID NO: 31497 - DNA, 25 bp, Artificial Sequence
  Synthetic
tggtatattagataaggtaccttct

SEQ ID NO: 31498 - DNA, 18 bp, Artificial Sequence
  Synthetic
atttcagggtcaaaggcg

SEQ ID NO: 31499 - DNA, 24 bp, Artificial Sequence
  Synthetic
ccaacatcatctacaaatatacgt

SEQ ID NO: 31500 - DNA, 23 bp, Artificial Sequence
  Synthetic
ctaatctttctgtttctgggtta

SEQ ID NO: 31501 - DNA, 22 bp, Artificial Sequence
  Synthetic
tgtggtgttaaaaagaactctg

SEQ ID NO: 31502 - DNA, 23 bp, Artificial Sequence
  Synthetic
gccaaactgttaatatacctgta

SEQ ID NO: 31503 - DNA, 21 bp, Artificial Sequence
  Synthetic
cagatgttatcgagatgttgt

SEQ ID NO: 31504 - DNA, 18 bp, Artificial Sequence
  Synthetic
acttcagtggttacagcc

SEQ ID NO: 31505 - DNA, 21 bp, Artificial Sequence
  Synthetic
tcctttcgatattcttccctc

SEQ ID NO: 31506 - DNA, 18 bp, Artificial Sequence
  Synthetic
aaacaacgcatgtgctgt

SEQ ID NO: 31507 - DNA, 19 bp, Artificial Sequence
  Synthetic
tactgtactgactgcaacc

SEQ ID NO: 31508 - DNA, 18 bp, Artificial Sequence
  Synthetic
aatcccatttctctggcc

SEQ ID NO: 31509 - DNA, 18 bp, Artificial Sequence
  Synthetic
acttgaccctctaccaca

SEQ ID NO: 31510 - DNA, 25 bp, Artificial Sequence
  Synthetic
actaatagtggatgatgaaagtgta

SEQ ID NO: 31511 - DNA, 21 bp, Artificial Sequence
  Synthetic
ggaaaatagggatgtccaact

SEQ ID NO: 31512 - DNA, 21 bp, Artificial Sequence
  Synthetic
cactagcattttctgtgtcat

SEQ ID NO: 31513 - DNA, 24 bp, Artificial Sequence
  Synthetic
gcaaatagatgtacaaatatccag

SEQ ID NO: 31514 - DNA, 21 bp, Artificial Sequence
  Synthetic
caacaaatgccattattgtgg

SEQ ID NO: 31515 - DNA, 18 bp, Artificial Sequence
  Synthetic
aggtagatgaggtggtgg

SEQ ID NO: 31516 - DNA, 20 bp, Artificial Sequence
  Synthetic
gtgattcagtagttgcacat

SEQ ID NO: 31517 - DNA, 25 bp, Artificial Sequence
  Synthetic
tcccatctctatatactatgcataa

SEQ ID NO: 31518 - DNA, 20 bp, Artificial Sequence
  Synthetic
gattacagctgggtttctct

SEQ ID NO: 31519 - DNA, 18 bp, Artificial Sequence
  Synthetic
aatgtctacgtgtgtgct

SEQ ID NO: 31520 - DNA, 18 bp, Artificial Sequence
  Synthetic
tgtttcagcagcgcattt

SEQ ID NO: 31521 - DNA, 19 bp, Artificial Sequence
  Synthetic
tgtgtgtcttctcggattt

SEQ ID NO: 31522 - DNA, 19 bp, Artificial Sequence
  Synthetic
agtcgttgacatctttgca

SEQ ID NO: 31523 - DNA, 18 bp, Artificial Sequence
  Synthetic
aaagtcatccatggctgc

SEQ ID NO: 31524 - DNA, 19 bp, Artificial Sequence
  Synthetic
agaaacatgggtcttgaca

SEQ ID NO: 31525 - DNA, 23 bp, Artificial Sequence
  Synthetic
tgttgaatacagattttgctagt

SEQ ID NO: 31526 - DNA, 18 bp, Artificial Sequence
  Synthetic
ttcagcttgcctctttca

SEQ ID NO: 31527 - DNA, 18 bp, Artificial Sequence
  Synthetic
tttggtgttgtccccagt

SEQ ID NO: 31528 - DNA, 24 bp, Artificial Sequence
  Synthetic
gtagaggtcttattttctcgattt

SEQ ID NO: 31529 - DNA, 20 bp, Artificial Sequence
  Synthetic
atcccaactaatttgcaggt

SEQ ID NO: 31530 - DNA, 21 bp, Artificial Sequence
  Synthetic
cctcgtttgaatttgcgtatc

SEQ ID NO: 31531 - DNA, 19 bp, Artificial Sequence
  Synthetic
atcaccacagcattgttga

SEQ ID NO: 31532 - DNA, 19 bp, Artificial Sequence
  Synthetic
attgcaaggaacaaccaaa

SEQ ID NO: 31533 - DNA, 22 bp, Artificial Sequence
  Synthetic
actttatgaactctttctccag

SEQ ID NO: 31534 - DNA, 18 bp, Artificial Sequence
  Synthetic
gacaggtcagaaacgcag

SEQ ID NO: 31535 - DNA, 20 bp, Artificial Sequence
  Synthetic
tgctgcgtatcgtctaatag

SEQ ID NO: 31536 - DNA, 23 bp, Artificial Sequence
  Synthetic
gtcattttgtgtaaatagttgct

SEQ ID NO: 31537 - DNA, 18 bp, Artificial Sequence
  Synthetic
acactgctatgacccagt

SEQ ID NO: 31538 - DNA, 22 bp, Artificial Sequence
  Synthetic
tcatatagagttagaagctgct

SEQ ID NO: 31539 - DNA, 23 bp, Artificial Sequence
  Synthetic
ccctttttgaatgtatgatctgg

SEQ ID NO: 31540 - DNA, 16 bp, Artificial Sequence
  Synthetic
accggcagaggctctg

SEQ ID NO: 31541 - DNA, 20 bp, Artificial Sequence
  Synthetic
gcaactgttgtttgttcaat

SEQ ID NO: 31542 - DNA, 18 bp, Artificial Sequence
  Synthetic
cccggcgtatctacatct

SEQ ID NO: 31543 - DNA, 21 bp, Artificial Sequence
  Synthetic
ttcaaatgcaggattctcaaa

SEQ ID NO: 31544 - DNA, 22 bp, Artificial Sequence
  Synthetic
aatgttctgcttcaataggatc

SEQ ID NO: 31545 - DNA, 21 bp, Artificial Sequence
  Synthetic
cacataatcatcgctgcttag

SEQ ID NO: 31546 - DNA, 21 bp, Artificial Sequence
  Synthetic
ctaccgatttctatgcctcta

SEQ ID NO: 31547 - DNA, 22 bp, Artificial Sequence
  Synthetic
cctatgtcaaacatatcaccat

SEQ ID NO: 31548 - DNA, 21 bp, Artificial Sequence
  Synthetic
gccaaagtcaagaattcacaa

SEQ ID NO: 31549 - DNA, 18 bp, Artificial Sequence
  Synthetic
acaagttggaacagtggt

SEQ ID NO: 31550 - DNA, 25 bp, Artificial Sequence
  Synthetic
tctctattgttatgctattctggat

SEQ ID NO: 31551 - DNA, 18 bp, Artificial Sequence
  Synthetic
atccatcattgccctctg

SEQ ID NO: 31552 - DNA, 20 bp, Artificial Sequence
  Synthetic
gactcttgtgagctgggttt

SEQ ID NO: 31553 - DNA, 18 bp, Artificial Sequence
  Synthetic
tttcctccactcctggtc

SEQ ID NO: 31554 - DNA, 19 bp, Artificial Sequence
  Synthetic
cctataagggcttctgtcc

SEQ ID NO: 31555 - DNA, 18 bp, Artificial Sequence
  Synthetic
attttgtacgaggccagc

SEQ ID NO: 31556 - DNA, 18 bp, Artificial Sequence
  Synthetic
gaaaaccccactgcagat

SEQ ID NO: 31557 - DNA, 18 bp, Artificial Sequence
  Synthetic
ctcccgctataccctgac

SEQ ID NO: 31558 - DNA, 21 bp, Artificial Sequence
  Synthetic
ctggtttcttttcaatgtcca

SEQ ID NO: 31559 - DNA, 19 bp, Artificial Sequence
  Synthetic
tccatttggtgttgtctcc

SEQ ID NO: 31560 - DNA, 20 bp, Artificial Sequence
  Synthetic
tctcgttgattcgttgaagt

SEQ ID NO: 31561 - DNA, 22 bp, Artificial Sequence
  Synthetic
aagtcctatagaacctatccac

SEQ ID NO: 31562 - DNA, 20 bp, Artificial Sequence
  Synthetic
tggatttgtgtatcccccct

SEQ ID NO: 31563 - DNA, 22 bp, Artificial Sequence
  Synthetic
gtcttgcaatatacacaggtta

SEQ ID NO: 31564 - DNA, 21 bp, Artificial Sequence
  Synthetic
tgtctaagtttttctgctgga

SEQ ID NO: 31565 - DNA, 22 bp, Artificial Sequence
  Synthetic
ggctggtaaatgttgatgatta

SEQ ID NO: 31566 - DNA, 23 bp, Artificial Sequence
  Synthetic
aaagatatttcttgtaaccgtgg

SEQ ID NO: 31567 - DNA, 23 bp, Artificial Sequence
  Synthetic
gtcttttaattgtgctatggtac

SEQ ID NO: 31568 - DNA, 23 bp, Artificial Sequence
  Synthetic
gggggttccttttaaaaatgatt

SEQ ID NO: 31569 - DNA, 18 bp, Artificial Sequence
  Synthetic
cttgtagggccatttgca

SEQ ID NO: 31570 - DNA, 23 bp, Artificial Sequence
  Synthetic
cccatatttttcacattcacttt

SEQ ID NO: 31571 - DNA, 18 bp, Artificial Sequence
  Synthetic
acaatgctgcttctccgc

SEQ ID NO: 31572 - DNA, 22 bp, Artificial Sequence
  Synthetic
actatctggaattgcaacagta

SEQ ID NO: 31573 - DNA, 23 bp, Artificial Sequence
  Synthetic
actgtaaagacaatatagcatgt

SEQ ID NO: 31574 - DNA, 18 bp, Artificial Sequence
  Synthetic
acatagttgcccgttgac

SEQ ID NO: 31575 - DNA, 23 bp, Artificial Sequence
  Synthetic
cgttacattactataggaagagg

SEQ ID NO: 31576 - DNA, 24 bp, Artificial Sequence
  Synthetic
atatccagtatctaccatatcacc

SEQ ID NO: 31577 - DNA, 19 bp, Artificial Sequence
  Synthetic
ggagaatacacacagctgc

SEQ ID NO: 31578 - DNA, 23 bp, Artificial Sequence
  Synthetic
cacaactgaaaaataaactgcaa

SEQ ID NO: 31579 - DNA, 19 bp, Artificial Sequence
  Synthetic
gcgtactgtattgtgcaga

SEQ ID NO: 31580 - DNA, 20 bp, Artificial Sequence
  Synthetic
ccatcttgccttttctgagt

SEQ ID NO: 31581 - DNA, 22 bp, Artificial Sequence
  Synthetic
ggctggtttctatttaaagtcc

SEQ ID NO: 31582 - DNA, 20 bp, Artificial Sequence
  Synthetic
gttatctccagtgatggtca

SEQ ID NO: 31583 - DNA, 20 bp, Artificial Sequence
  Synthetic
tcgataaaacctgtcgactc

SEQ ID NO: 31584 - DNA, 18 bp, Artificial Sequence
  Synthetic
gaagggccatttgagctg

SEQ ID NO: 31585 - DNA, 20 bp, Artificial Sequence
  Synthetic
cagattcgaaatcaatccgt

SEQ ID NO: 31586 - DNA, 16 bp, Artificial Sequence
  Synthetic
acgacccgctccagga

SEQ ID NO: 31587 - DNA, 16 bp, Artificial Sequence
  Synthetic
aatgccacccggggtc

SEQ ID NO: 31588 - DNA, 18 bp, Artificial Sequence
  Synthetic
aggagtcccgcacagaaa

SEQ ID NO: 31589 - DNA, 20 bp, Artificial Sequence
  Synthetic
cgtcccattaccacggtagt

SEQ ID NO: 31590 - DNA, 20 bp, Artificial Sequence
  Synthetic
ccgcatagaaggtgcaaaga

SEQ ID NO: 31591 - DNA, 19 bp, Artificial Sequence
  Synthetic
ttccggtgatgcaagcatt

SEQ ID NO: 31592 - DNA, 19 bp, Artificial Sequence
  Synthetic
gcctcagccaacttcatca

SEQ ID NO: 31593 - DNA, 17 bp, Artificial Sequence
  Synthetic
cgacccaactggcgaca

SEQ ID NO: 31594 - DNA, 16 bp, Artificial Sequence
  Synthetic
ggaatgccgctctcgc

SEQ ID NO: 31595 - DNA, 20 bp, Artificial Sequence
  Synthetic
ccacaacatccagaaagcca

SEQ ID NO: 31596 - DNA, 18 bp, Artificial Sequence
  Synthetic
acttcgtctcccctacgg

SEQ ID NO: 31597 - DNA, 18 bp, Artificial Sequence
  Synthetic
ttcccgagagtgccatgg

SEQ ID NO: 31598 - DNA, 20 bp, Artificial Sequence
  Synthetic
gggagatacagaggagcctc

SEQ ID NO: 31599 - DNA, 17 bp, Artificial Sequence
  Synthetic
catgtgcggccattggg

SEQ ID NO: 31600 - DNA, 18 bp, Artificial Sequence
  Synthetic
gtctgtggcacaaacgca

SEQ ID NO: 31601 - DNA, 20 bp, Artificial Sequence
  Synthetic
cggtcaagtcaggttcaagg

SEQ ID NO: 31602 - DNA, 17 bp, Artificial Sequence
  Synthetic
atagcgaggcccaccaa

SEQ ID NO: 31603 - DNA, 18 bp, Artificial Sequence
  Synthetic
gcccacctcacaggcttt

SEQ ID NO: 31604 - DNA, 18 bp, Artificial Sequence
  Synthetic
gcatggtgcctcccacac

SEQ ID NO: 31605 - DNA, 18 bp, Artificial Sequence
  Synthetic
gcatcaccgaacttcgcg

SEQ ID NO: 31606 - DNA, 20 bp, Artificial Sequence
  Synthetic
cgtgcagctcaccatcatag

SEQ ID NO: 31607 - DNA, 17 bp, Artificial Sequence
  Synthetic
gggcctcccaagagaca

SEQ ID NO: 31608 - DNA, 19 bp, Artificial Sequence
  Synthetic
gccttgaaacgcctcttca

SEQ ID NO: 31609 - DNA, 20 bp, Artificial Sequence
  Synthetic
ggtgattgggggaggtatga

SEQ ID NO: 31610 - DNA, 20 bp, Artificial Sequence
  Synthetic
ccctcgacatagtacctgca

SEQ ID NO: 31611 - DNA, 20 bp, Artificial Sequence
  Synthetic
caattgggtccgtgtactcg

SEQ ID NO: 31612 - DNA, 20 bp, Artificial Sequence
  Synthetic
ggcccatgtaatgagaccaa

SEQ ID NO: 31613 - DNA, 18 bp, Artificial Sequence
  Synthetic
tcataagttgcagtggcg

SEQ ID NO: 31614 - DNA, 18 bp, Artificial Sequence
  Synthetic
caactggtagcacttcgg

SEQ ID NO: 31615 - DNA, 23 bp, Artificial Sequence
  Synthetic
tttggactaagatactttcgttt

SEQ ID NO: 31616 - DNA, 19 bp, Artificial Sequence
  Synthetic
aattgccgtgtcaattcat

SEQ ID NO: 31617 - DNA, 22 bp, Artificial Sequence
  Synthetic
tgcacatttaacattgaggtaa

SEQ ID NO: 31618 - DNA, 22 bp, Artificial Sequence
  Synthetic
accatatatgcacattctctca

SEQ ID NO: 31619 - DNA, 21 bp, Artificial Sequence
  Synthetic
catgtatatccaacaagggtc

SEQ ID NO: 31620 - DNA, 18 bp, Artificial Sequence
  Synthetic
tagctgatcttgcagagc

SEQ ID NO: 31621 - DNA, 18 bp, Artificial Sequence
  Synthetic
ggcctccgtccgtacctt

SEQ ID NO: 31622 - DNA, 16 bp, Artificial Sequence
  Synthetic
gcccgctgtgaccgtt

SEQ ID NO: 31623 - DNA, 24 bp, Artificial Sequence
  Synthetic
tagtactaaatgacctaaacagtc

SEQ ID NO: 31624 - DNA, 18 bp, Artificial Sequence
  Synthetic
cttgaccgtttttgcacg

SEQ ID NO: 31625 - DNA, 18 bp, Artificial Sequence
  Synthetic
actgtgtgcgtgaaaccc

SEQ ID NO: 31626 - DNA, 18 bp, Artificial Sequence
  Synthetic
aatagtggctcgagtccc

SEQ ID NO: 31627 - DNA, 20 bp, Artificial Sequence
  Synthetic
tctcgaatgcaaatcacaaa

SEQ ID NO: 31628 - DNA, 18 bp, Artificial Sequence
  Synthetic
aggacaaaggccagtttg

SEQ ID NO: 31629 - DNA, 18 bp, Artificial Sequence
  Synthetic
tgattagcccacaggatg

SEQ ID NO: 31630 - DNA, 24 bp, Artificial Sequence
  Synthetic
ggaagacttatacttagtcagagt

SEQ ID NO: 31631 - DNA, 25 bp, Artificial Sequence
  Synthetic
ctctatggtagtattattcaaatgc

SEQ ID NO: 31632 - DNA, 22 bp, Artificial Sequence
  Synthetic
atcatgtattgtgccatttgag

SEQ ID NO: 31633 - DNA, 25 bp, Artificial Sequence
  Synthetic
attactactgtacaagttccattga

SEQ ID NO: 31634 - DNA, 22 bp, Artificial Sequence
  Synthetic
agaatcaacactataatctgcc

SEQ ID NO: 31635 - DNA, 24 bp, Artificial Sequence
  Synthetic
agagaatataccagaatacccaga

SEQ ID NO: 31636 - DNA, 20 bp, Artificial Sequence
  Synthetic
tttctggagatggatttcgg

SEQ ID NO: 31637 - DNA, 21 bp, Artificial Sequence
  Synthetic
ggcattccttttcttttggta

SEQ ID NO: 31638 - DNA, 22 bp, Artificial Sequence
  Synthetic
attgctttaataatcgaggtca

SEQ ID NO: 31639 - DNA, 20 bp, Artificial Sequence
  Synthetic
gctttgcagaacatgtcttt

SEQ ID NO: 31640 - DNA, 19 bp, Artificial Sequence
  Synthetic
ggactcgttgcttaagaga

SEQ ID NO: 31641 - DNA, 25 bp, Artificial Sequence
  Synthetic
cagttataaaccattcattaccaga

SEQ ID NO: 31642 - DNA, 18 bp, Artificial Sequence
  Synthetic
acttaaatctgcgtccgg

SEQ ID NO: 31643 - DNA, 20 bp, Artificial Sequence
  Synthetic
acaaattttgcctgactgtt

SEQ ID NO: 31644 - DNA, 21 bp, Artificial Sequence
  Synthetic
gtgattaacattggtggcaat

SEQ ID NO: 31645 - DNA, 23 bp, Artificial Sequence
  Synthetic
gcatctattgttttaggatcaga

SEQ ID NO: 31646 - DNA, 20 bp, Artificial Sequence
  Synthetic
gttctccttgttgtgctcgt

SEQ ID NO: 31647 - DNA, 25 bp, Artificial Sequence
  Synthetic
ccagttatactttcaaatagaggat

SEQ ID NO: 31648 - DNA, 18 bp, Artificial Sequence
  Synthetic
cgggaaacatcacctagt

SEQ ID NO: 31649 - DNA, 19 bp, Artificial Sequence
  Synthetic
acatattcgtccgtgttgt

SEQ ID NO: 31650 - DNA, 20 bp, Artificial Sequence
  Synthetic
cctcgatccatttgaaatcc

SEQ ID NO: 31651 - DNA, 18 bp, Artificial Sequence
  Synthetic
aattcagcggtatcccag

SEQ ID NO: 31652 - DNA, 19 bp, Artificial Sequence
  Synthetic
acacctgctctggttaaat

SEQ ID NO: 31653 - DNA, 20 bp, Artificial Sequence
  Synthetic
ctggtaacgtatcaccttct

SEQ ID NO: 31654 - DNA, 22 bp, Artificial Sequence
  Synthetic
atgttacatttttctccttcgt

SEQ ID NO: 31655 - DNA, 21 bp, Artificial Sequence
  Synthetic
tttctgtatttgtcgtccact

SEQ ID NO: 31656 - DNA, 25 bp, Artificial Sequence
  Synthetic
gttgatttctgtttaatgtccaatc

SEQ ID NO: 31657 - DNA, 20 bp, Artificial Sequence
  Synthetic
tcatcgtgttcaatgtcaaa

SEQ ID NO: 31658 - DNA, 18 bp, Artificial Sequence
  Synthetic
tgttgtccccagtgattg

SEQ ID NO: 31659 - DNA, 23 bp, Artificial Sequence
  Synthetic
tctcaattttcttccttgttgat

SEQ ID NO: 31660 - DNA, 20 bp, Artificial Sequence
  Synthetic
tttgctcatgttgattccca

SEQ ID NO: 31661 - DNA, 20 bp, Artificial Sequence
  Synthetic
ctcgtctgaatttgtgtgtc

SEQ ID NO: 31662 - DNA, 21 bp, Artificial Sequence
  Synthetic
ttctttatggctgacaaaggg

SEQ ID NO: 31663 - DNA, 20 bp, Artificial Sequence
  Synthetic
ttaatccgtccagactcgaa

SEQ ID NO: 31664 - DNA, 20 bp, Artificial Sequence
  Synthetic
ctagctaagtcaggcaaagt

SEQ ID NO: 31665 - DNA, 18 bp, Artificial Sequence
  Synthetic
aaacacacggatagctgc

SEQ ID NO: 31666 - DNA, 20 bp, Artificial Sequence
  Synthetic
atcatcctgtacctgaacaa

SEQ ID NO: 31667 - DNA, 19 bp, Artificial Sequence
  Synthetic
gatctttcctgttggctct

SEQ ID NO: 31668 - DNA, 21 bp, Artificial Sequence
  Synthetic
cgaagcattatagagagtcca

SEQ ID NO: 31669 - DNA, 19 bp, Artificial Sequence
  Synthetic
tcttgcgataggtagttcc

SEQ ID NO: 31670 - DNA, 18 bp, Artificial Sequence
  Synthetic
gcaattggttgtgcatct

SEQ ID NO: 31671 - DNA, 19 bp, Artificial Sequence
  Synthetic
acagatctcttgccctaga

SEQ ID NO: 31672 - DNA, 20 bp, Artificial Sequence
  Synthetic
tgttaaagctgctctggtac

SEQ ID NO: 31673 - DNA, 24 bp, Artificial Sequence
  Synthetic
gtattgatttgctgatactttagg

SEQ ID NO: 31674 - DNA, 21 bp, Artificial Sequence
  Synthetic
cagcctacaatcaataactgt

SEQ ID NO: 31675 - DNA, 23 bp, Artificial Sequence
  Synthetic
ccccatagacatctttagtcatt

SEQ ID NO: 31676 - DNA, 22 bp, Artificial Sequence
  Synthetic
gtaaaactttaacttcacccca

SEQ ID NO: 31677 - DNA, 19 bp, Artificial Sequence
  Synthetic
gtactttgggactgctcag

SEQ ID NO: 31678 - DNA, 20 bp, Artificial Sequence
  Synthetic
cgggtaagatgatctggtgg

SEQ ID NO: 31679 - DNA, 19 bp, Artificial Sequence
  Synthetic
attctctgatcgcctaagc

SEQ ID NO: 31680 - DNA, 25 bp, Artificial Sequence
  Synthetic
taataatatctagctctcctgtgtt

SEQ ID NO: 31681 - DNA, 22 bp, Artificial Sequence
  Synthetic
agtggtttctggtaatacagta

SEQ ID NO: 31682 - DNA, 18 bp, Artificial Sequence
  Synthetic
ttgtcaaaggcgggattt

SEQ ID NO: 31683 - DNA, 21 bp, Artificial Sequence
  Synthetic
accatcacctacatcatcaat

SEQ ID NO: 31684 - DNA, 25 bp, Artificial Sequence
  Synthetic
gaaagaataatgatgtttcttggac

SEQ ID NO: 31685 - DNA, 20 bp, Artificial Sequence
  Synthetic
agttgcaaagattcacagtg

SEQ ID NO: 31686 - DNA, 18 bp, Artificial Sequence
  Synthetic
caaatccaaccgctatcg

SEQ ID NO: 31687 - DNA, 21 bp, Artificial Sequence
  Synthetic
tcatacaacttctacaacacg

SEQ ID NO: 31688 - DNA, 22 bp, Artificial Sequence
  Synthetic
accttgtacaaataaaggacag

SEQ ID NO: 31689 - DNA, 18 bp, Artificial Sequence
  Synthetic
aagctgcacaatagcgtc

SEQ ID NO: 31690 - DNA, 21 bp, Artificial Sequence
  Synthetic
cccattgaaccatttctgaaa

SEQ ID NO: 31691 - DNA, 25 bp, Artificial Sequence
  Synthetic
ggtgctttatgttttgaatctatag

SEQ ID NO: 31692 - DNA, 25 bp, Artificial Sequence
  Synthetic
gatgaaagcctattcttttaattcc

SEQ ID NO: 31693 - DNA, 18 bp, Artificial Sequence
  Synthetic
ctttcgtcgtacctcctc

SEQ ID NO: 31694 - DNA, 23 bp, Artificial Sequence
  Synthetic
acaaatgttttacagaatccctt

SEQ ID NO: 31695 - DNA, 24 bp, Artificial Sequence
  Synthetic
tttctgttataatggctatttccc

SEQ ID NO: 31696 - DNA, 19 bp, Artificial Sequence
  Synthetic
cacgtcctgttgaaattgt

SEQ ID NO: 31697 - DNA, 22 bp, Artificial Sequence
  Synthetic
atcactagcagattctaagtct

SEQ ID NO: 31698 - DNA, 21 bp, Artificial Sequence
  Synthetic
ggttttcagtgtcccctaatt

SEQ ID NO: 31699 - DNA, 18 bp, Artificial Sequence
  Synthetic
aaaaggtcctggaatggc

SEQ ID NO: 31700 - DNA, 21 bp, Artificial Sequence
  Synthetic
aggatcgactttttctgaagt

SEQ ID NO: 31701 - DNA, 20 bp, Artificial Sequence
  Synthetic
tgtgtatgtccgatcctttc

SEQ ID NO: 31702 - DNA, 18 bp, Artificial Sequence
  Synthetic
tttgctgctgattctgca

SEQ ID NO: 31703 - DNA, 16 bp, Artificial Sequence
  Synthetic
gccgggtcgccatgtt

SEQ ID NO: 31704 - DNA, 18 bp, Artificial Sequence
  Synthetic
gaggtatcggttcgccac

SEQ ID NO: 31705 - DNA, 17 bp, Artificial Sequence
  Synthetic
tggggagaaagacggcg

SEQ ID NO: 31706 - DNA, 18 bp, Artificial Sequence
  Synthetic
tctacggagctggccatg

SEQ ID NO: 31707 - DNA, 16 bp, Artificial Sequence
  Synthetic
acgcacgggtgtttgc

SEQ ID NO: 31708 - DNA, 17 bp, Artificial Sequence
  Synthetic
cgacggctgacacacca

SEQ ID NO: 31709 - DNA, 17 bp, Artificial Sequence
  Synthetic
acatcaccaaccccgcc

SEQ ID NO: 31710 - DNA, 20 bp, Artificial Sequence
  Synthetic
gtggatgattaacgccctgt

SEQ ID NO: 31711 - DNA, 16 bp, Artificial Sequence
  Synthetic
aatggggacgtgcggc

SEQ ID NO: 31712 - DNA, 16 bp, Artificial Sequence
  Synthetic
gtcggggtggcacaga

SEQ ID NO: 31713 - DNA, 19 bp, Artificial Sequence
  Synthetic
gacttctgctctcggagga

SEQ ID NO: 31714 - DNA, 17 bp, Artificial Sequence
  Synthetic
gggagctgttgtgcctg

SEQ ID NO: 31715 - DNA, 16 bp, Artificial Sequence
  Synthetic
tggaagcgcgccttgg

SEQ ID NO: 31716 - DNA, 16 bp, Artificial Sequence
  Synthetic
atcgagcggcagcagc

SEQ ID NO: 31717 - DNA, 16 bp, Artificial Sequence
  Synthetic
ccgtgcacctgacgca

SEQ ID NO: 31718 - DNA, 20 bp, Artificial Sequence
  Synthetic
ccctgatcattacccccgtc

SEQ ID NO: 31719 - DNA, 18 bp, Artificial Sequence
  Synthetic
cagggctacgtgctcgac

SEQ ID NO: 31720 - DNA, 19 bp, Artificial Sequence
  Synthetic
cagtcttccgctgacaacc

SEQ ID NO: 31721 - DNA, 16 bp, Artificial Sequence
  Synthetic
gcgccacctccgcaat

SEQ ID NO: 31722 - DNA, 16 bp, Artificial Sequence
  Synthetic
taaccgcacccccctc

SEQ ID NO: 31723 - DNA, 20 bp, Artificial Sequence
  Synthetic
gcgcgacctgtgttaaaatt

SEQ ID NO: 31724 - DNA, 16 bp, Artificial Sequence
  Synthetic
cgagacgcacctccga

SEQ ID NO: 31725 - DNA, 20 bp, Artificial Sequence
  Synthetic
gaacaccttctttgccctct

SEQ ID NO: 31726 - DNA, 16 bp, Artificial Sequence
  Synthetic
gtgtggcgcgtcgttc

SEQ ID NO: 31727 - DNA, 18 bp, Artificial Sequence
  Synthetic
cctccgttggcgaatacg

SEQ ID NO: 31728 - DNA, 19 bp, Artificial Sequence
  Synthetic
cgtacaaatcgggggccat

SEQ ID NO: 31729 - DNA, 16 bp, Artificial Sequence
  Synthetic
tgggcgctcacgagac

SEQ ID NO: 31730 - DNA, 19 bp, Artificial Sequence
  Synthetic
aacgctctactgcagatgc

SEQ ID NO: 31731 - DNA, 16 bp, Artificial Sequence
  Synthetic
agggccaagcgacgga

SEQ ID NO: 31732 - DNA, 16 bp, Artificial Sequence
  Synthetic
acctcaacggggcctc

SEQ ID NO: 31733 - DNA, 17 bp, Artificial Sequence
  Synthetic
tcagtcccgtggccttg

SEQ ID NO: 31734 - DNA, 17 bp, Artificial Sequence
  Synthetic
acgaccgcaactacccg

SEQ ID NO: 31735 - DNA, 16 bp, Artificial Sequence
  Synthetic
gtatcggcgcgcatcg

SEQ ID NO: 31736 - DNA, 15 bp, Artificial Sequence
  Synthetic
tttcccgcgtgcgct

SEQ ID NO: 31737 - DNA, 18 bp, Artificial Sequence
  Synthetic
gatcgtctgccgttgtcg

SEQ ID NO: 31738 - DNA, 18 bp, Artificial Sequence
  Synthetic
cgcacacaaagtaggccc

SEQ ID NO: 31739 - DNA, 19 bp, Artificial Sequence
  Synthetic
cctccctgcgctttgatct

SEQ ID NO: 31740 - DNA, 16 bp, Artificial Sequence
  Synthetic
ctgtcgcgggcatacg

SEQ ID NO: 31741 - DNA, 16 bp, Artificial Sequence
  Synthetic
tgctggcgttcgtggc

SEQ ID NO: 31742 - DNA, 20 bp, Artificial Sequence
  Synthetic
tcgcatattaaggtgacgcg

SEQ ID NO: 31743 - DNA, 16 bp, Artificial Sequence
  Synthetic
tcccgccggatccaaa

SEQ ID NO: 31744 - DNA, 16 bp, Artificial Sequence
  Synthetic
tgcgctgggcctgtag

SEQ ID NO: 31745 - DNA, 16 bp, Artificial Sequence
  Synthetic
acggcgcactcgaagg

SEQ ID NO: 31746 - DNA, 19 bp, Artificial Sequence
  Synthetic
cccgctaaccaccaaggag

SEQ ID NO: 31747 - DNA, 16 bp, Artificial Sequence
  Synthetic
ggacaccggcgctact

SEQ ID NO: 31748 - DNA, 18 bp, Artificial Sequence
  Synthetic
cgatatgttgggccgcgt

SEQ ID NO: 31749 - DNA, 17 bp, Artificial Sequence
  Synthetic
accgagtacccgctctc

SEQ ID NO: 31750 - DNA, 18 bp, Artificial Sequence
  Synthetic
acgacccccaagttcacc

SEQ ID NO: 31751 - DNA, 18 bp, Artificial Sequence
  Synthetic
gcctaccagaagcccgac

SEQ ID NO: 31752 - DNA, 18 bp, Artificial Sequence
  Synthetic
gccgtgtaccaggacctg

SEQ ID NO: 31753 - DNA, 16 bp, Artificial Sequence
  Synthetic
acggatccgagaccgc

SEQ ID NO: 31754 - DNA, 16 bp, Artificial Sequence
  Synthetic
accgcgccctcctgta

SEQ ID NO: 31755 - DNA, 16 bp, Artificial Sequence
  Synthetic
accttgtcgggcgtcc

SEQ ID NO: 31756 - DNA, 18 bp, Artificial Sequence
  Synthetic
ccccaccctcgtacttct

SEQ ID NO: 31757 - DNA, 20 bp, Artificial Sequence
  Synthetic
cgtacaccgagttacacacg

SEQ ID NO: 31758 - DNA, 17 bp, Artificial Sequence
  Synthetic
tggcgatcagcagcagc

SEQ ID NO: 31759 - DNA, 18 bp, Artificial Sequence
  Synthetic
ggattcttggccaacccg

SEQ ID NO: 31760 - DNA, 16 bp, Artificial Sequence
  Synthetic
tgcgaagagtcccccg

SEQ ID NO: 31761 - DNA, 16 bp, Artificial Sequence
  Synthetic
cgtccgtccggcatct

SEQ ID NO: 31762 - DNA, 19 bp, Artificial Sequence
  Synthetic
catcctgttgcgggatctg

SEQ ID NO: 31763 - DNA, 18 bp, Artificial Sequence
  Synthetic
gtgtcttctcgcgcgtat

SEQ ID NO: 31764 - DNA, 18 bp, Artificial Sequence
  Synthetic
aacaggccgggtctctgg

SEQ ID NO: 31765 - DNA, 16 bp, Artificial Sequence
  Synthetic
aacgtcctcgccgacc

SEQ ID NO: 31766 - DNA, 16 bp, Artificial Sequence
  Synthetic
aagatggcgccggtcc

SEQ ID NO: 31767 - DNA, 16 bp, Artificial Sequence
  Synthetic
ccccagatcgcgacct

SEQ ID NO: 31768 - DNA, 18 bp, Artificial Sequence
  Synthetic
gacgcaagctcacaggag

SEQ ID NO: 31769 - DNA, 18 bp, Artificial Sequence
  Synthetic
ccaccagcgagtcaagga

SEQ ID NO: 31770 - DNA, 16 bp, Artificial Sequence
  Synthetic
acgcatcgggccagat

SEQ ID NO: 31771 - DNA, 20 bp, Artificial Sequence
  Synthetic
gaaacgcctgcctatctacc

SEQ ID NO: 31772 - DNA, 20 bp, Artificial Sequence
  Synthetic
ggtcaattgtatggagccgg

SEQ ID NO: 31773 - DNA, 17 bp, Artificial Sequence
  Synthetic
acacgctcaggagggag

SEQ ID NO: 31774 - DNA, 16 bp, Artificial Sequence
  Synthetic
cctcgcgggcagcaaa

SEQ ID NO: 31775 - DNA, 17 bp, Artificial Sequence
  Synthetic
acctccacacggaccac

SEQ ID NO: 31776 - DNA, 17 bp, Artificial Sequence
  Synthetic
tgtggtgaacccgtcgg

SEQ ID NO: 31777 - DNA, 16 bp, Artificial Sequence
  Synthetic
tcgtcctgcagcggct

SEQ ID NO: 31778 - DNA, 18 bp, Artificial Sequence
  Synthetic
tgctcgatctcccggacg

SEQ ID NO: 31779 - DNA, 18 bp, Artificial Sequence
  Synthetic
gacaggagccaatgtggg

SEQ ID NO: 31780 - DNA, 19 bp, Artificial Sequence
  Synthetic
cctcaacgaactccttggc

SEQ ID NO: 31781 - DNA, 18 bp, Artificial Sequence
  Synthetic
aagactctcccccaccgc

SEQ ID NO: 31782 - DNA, 16 bp, Artificial Sequence
  Synthetic
tggggtccctggacga

SEQ ID NO: 31783 - DNA, 17 bp, Artificial Sequence
  Synthetic
acgtagctcccgatggc

SEQ ID NO: 31784 - DNA, 20 bp, Artificial Sequence
  Synthetic
cgtcaatggtaaacagcgtg

SEQ ID NO: 31785 - DNA, 16 bp, Artificial Sequence
  Synthetic
acacgagggcggtgtc

SEQ ID NO: 31786 - DNA, 18 bp, Artificial Sequence
  Synthetic
cacgctcgatacgatgcg

SEQ ID NO: 31787 - DNA, 16 bp, Artificial Sequence
  Synthetic
tatcggctccggtccg

SEQ ID NO: 31788 - DNA, 17 bp, Artificial Sequence
  Synthetic
ccgctggtctcacagga

SEQ ID NO: 31789 - DNA, 16 bp, Artificial Sequence
  Synthetic
tcttgtcgggcctccc

SEQ ID NO: 31790 - DNA, 16 bp, Artificial Sequence
  Synthetic
atggagcgcggggaac

SEQ ID NO: 31791 - DNA, 16 bp, Artificial Sequence
  Synthetic
acgcatgccagcccaa

SEQ ID NO: 31792 - DNA, 18 bp, Artificial Sequence
  Synthetic
ccctgtcgtttgggtccc

SEQ ID NO: 31793 - DNA, 20 bp, Artificial Sequence
  Synthetic
gtcataagaccagtcggacg

SEQ ID NO: 31794 - DNA, 16 bp, Artificial Sequence
  Synthetic
gcggcgtccgtgttgt

SEQ ID NO: 31795 - DNA, 16 bp, Artificial Sequence
  Synthetic
acccaaacccacccgc

SEQ ID NO: 31796 - DNA, 20 bp, Artificial Sequence
  Synthetic
cgtaatgaccctccttgacc

SEQ ID NO: 31797 - DNA, 17 bp, Artificial Sequence
  Synthetic
tgtcccccgtaaacgcg

SEQ ID NO: 31798 - DNA, 19 bp, Artificial Sequence
  Synthetic
ggcaaggatctcctgcaga

SEQ ID NO: 31799 - DNA, 17 bp, Artificial Sequence
  Synthetic
cagtcaccagcttggcc

SEQ ID NO: 31800 - DNA, 17 bp, Artificial Sequence
  Synthetic
atgcaggtccaggaggg

SEQ ID NO: 31801 - DNA, 18 bp, Artificial Sequence
  Synthetic
tgtcgcggtggataatgc

SEQ ID NO: 31802 - DNA, 16 bp, Artificial Sequence
  Synthetic
cgaggtgaggcgcgat

SEQ ID NO: 31803 - DNA, 16 bp, Artificial Sequence
  Synthetic
atgttcgccgtccccg

SEQ ID NO: 31804 - DNA, 20 bp, Artificial Sequence
  Synthetic
gccaagtcgtgtgctgtttc

SEQ ID NO: 31805 - DNA, 16 bp, Artificial Sequence
  Synthetic
acggcaaagcccccca

SEQ ID NO: 31806 - DNA, 20 bp, Artificial Sequence
  Synthetic
tgtggtcggtatggacgata

SEQ ID NO: 31807 - DNA, 18 bp, Artificial Sequence
  Synthetic
gtaggtggtgtgggggac

SEQ ID NO: 31808 - DNA, 18 bp, Artificial Sequence
  Synthetic
ggtcgcaggagccatagg

SEQ ID NO: 31809 - DNA, 16 bp, Artificial Sequence
  Synthetic
aactggggccggttgc

SEQ ID NO: 31810 - DNA, 16 bp, Artificial Sequence
  Synthetic
tgcgtctgcgtcgacg

SEQ ID NO: 31811 - DNA, 17 bp, Artificial Sequence
  Synthetic
tgggtgcaaattgcggg

SEQ ID NO: 31812 - DNA, 21 bp, Artificial Sequence
  Synthetic
attgctgatgttgacatatgt

SEQ ID NO: 31813 - DNA, 22 bp, Artificial Sequence
  Synthetic
tacagtaaagcaagagccattt

SEQ ID NO: 31814 - DNA, 20 bp, Artificial Sequence
  Synthetic
ccgaaaactccactgcatat

SEQ ID NO: 31815 - DNA, 23 bp, Artificial Sequence
  Synthetic
agttattgctacgatatcttgtt

SEQ ID NO: 31816 - DNA, 19 bp, Artificial Sequence
  Synthetic
caaacagtgggggaaagcc

SEQ ID NO: 31817 - DNA, 23 bp, Artificial Sequence
  Synthetic
cgttgacatactttccaatcaat

SEQ ID NO: 31818 - DNA, 20 bp, Artificial Sequence
  Synthetic
cccaactcctcccagtcttt

SEQ ID NO: 31819 - DNA, 24 bp, Artificial Sequence
  Synthetic
ataactgtttctcttccaaaagtg

SEQ ID NO: 31820 - DNA, 19 bp, Artificial Sequence
  Synthetic
ctaccttgttggcgtctgg

SEQ ID NO: 31821 - DNA, 20 bp, Artificial Sequence
  Synthetic
ttcattgccatcatccattt

SEQ ID NO: 31822 - DNA, 18 bp, Artificial Sequence
  Synthetic
gaacagggccaaaggttc

SEQ ID NO: 31823 - DNA, 23 bp, Artificial Sequence
  Synthetic
atatatccacagcttgttcttca

SEQ ID NO: 31824 - DNA, 19 bp, Artificial Sequence
  Synthetic
ctcactatgagctgaacca

SEQ ID NO: 31825 - DNA, 21 bp, Artificial Sequence
  Synthetic
ctggtaatactccaaccattc

SEQ ID NO: 31826 - DNA, 19 bp, Artificial Sequence
  Synthetic
gacagcttcccaatttctg

SEQ ID NO: 31827 - DNA, 20 bp, Artificial Sequence
  Synthetic
cagtgaagagaactgcattc

SEQ ID NO: 31828 - DNA, 18 bp, Artificial Sequence
  Synthetic
gcacattagccttttccc

SEQ ID NO: 31829 - DNA, 18 bp, Artificial Sequence
  Synthetic
ctttcatacgcagctgtg

SEQ ID NO: 31830 - DNA, 21 bp, Artificial Sequence
  Synthetic
tgattgttgcttgtttacctt

SEQ ID NO: 31831 - DNA, 19 bp, Artificial Sequence
  Synthetic
gcaaatgactcctggaaca

SEQ ID NO: 31832 - DNA, 19 bp, Artificial Sequence
  Synthetic
cgctttaggaactggattg

SEQ ID NO: 31833 - DNA, 21 bp, Artificial Sequence
  Synthetic
aatgatacaccaaacgtttct

SEQ ID NO: 31834 - DNA, 21 bp, Artificial Sequence
  Synthetic
tacttcattagcataggcaga

SEQ ID NO: 31835 - DNA, 20 bp, Artificial Sequence
  Synthetic
gtagatgttttcgccctggg

SEQ ID NO: 31836 - DNA, 18 bp, Artificial Sequence
  Synthetic
gccgtacaggaattgcat

SEQ ID NO: 31837 - DNA, 18 bp, Artificial Sequence
  Synthetic
ttaggagcttggggtgtc

SEQ ID NO: 31838 - DNA, 19 bp, Artificial Sequence
  Synthetic
aatgattgttccccgtctg

SEQ ID NO: 31839 - DNA, 24 bp, Artificial Sequence
  Synthetic
cccttcaaaattttctacttgagt

SEQ ID NO: 31840 - DNA, 20 bp, Artificial Sequence
  Synthetic
gattaccagatacctttggc

SEQ ID NO: 31841 - DNA, 19 bp, Artificial Sequence
  Synthetic
caatgagcccctattggag

SEQ ID NO: 31842 - DNA, 25 bp, Artificial Sequence
  Synthetic
cgtaaaagaaaagttcatcaccata

SEQ ID NO: 31843 - DNA, 18 bp, Artificial Sequence
  Synthetic
gttttacgcgtcgtgttg

SEQ ID NO: 31844 - DNA, 19 bp, Artificial Sequence
  Synthetic
aaataattgttgggtgcgg

SEQ ID NO: 31845 - DNA, 19 bp, Artificial Sequence
  Synthetic
atgaaacgtttacggtcgt

SEQ ID NO: 31846 - DNA, 18 bp, Artificial Sequence
  Synthetic
tgtcacccttatgcgaca

SEQ ID NO: 31847 - DNA, 18 bp, Artificial Sequence
  Synthetic
gccattttgatttcccgc

SEQ ID NO: 31848 - DNA, 20 bp, Artificial Sequence
  Synthetic
atcccgagcttcttcctgta

SEQ ID NO: 31849 - DNA, 25 bp, Artificial Sequence
  Synthetic
gtactatactttgaggacctatagg

SEQ ID NO: 31850 - DNA, 19 bp, Artificial Sequence
  Synthetic
ggcacttggtaaagcatct

SEQ ID NO: 31851 - DNA, 24 bp, Artificial Sequence
  Synthetic
gtactgttccataaatctactgta

SEQ ID NO: 31852 - DNA, 20 bp, Artificial Sequence
  Synthetic
attctgctgactctgactaa

SEQ ID NO: 31853 - DNA, 20 bp, Artificial Sequence
  Synthetic
gcagctgtatagtctgttct

SEQ ID NO: 31854 - DNA, 21 bp, Artificial Sequence
  Synthetic
atgaaacttaccgaaaacggt

SEQ ID NO: 31855 - DNA, 18 bp, Artificial Sequence
  Synthetic
cctctgcctcttgtgaga

SEQ ID NO: 31856 - DNA, 19 bp, Artificial Sequence
  Synthetic
ggaacacccaggctctacc

SEQ ID NO: 31857 - DNA, 19 bp, Artificial Sequence
  Synthetic
cgcctttctaggagcactc

SEQ ID NO: 31858 - DNA, 20 bp, Artificial Sequence
  Synthetic
gaatcttttggcaaccttct

SEQ ID NO: 31859 - DNA, 20 bp, Artificial Sequence
  Synthetic
aatcctggcactacttctgc

SEQ ID NO: 31860 - DNA, 20 bp, Artificial Sequence
  Synthetic
agcttttgtagaacctgtct

SEQ ID NO: 31861 - DNA, 18 bp, Artificial Sequence
  Synthetic
acctgcctgtctttccgg

SEQ ID NO: 31862 - DNA, 18 bp, Artificial Sequence
  Synthetic
ttaggggccattgtttca

SEQ ID NO: 31863 - DNA, 22 bp, Artificial Sequence
  Synthetic
ttcctggttccatattgtttac

SEQ ID NO: 31864 - DNA, 19 bp, Artificial Sequence
  Synthetic
gtttctgcagcttccattt

SEQ ID NO: 31865 - DNA, 24 bp, Artificial Sequence
  Synthetic
ggtatgggtattttttatctttgc

SEQ ID NO: 31866 - DNA, 23 bp, Artificial Sequence
  Synthetic
ctttgtcttttcctctatctgtt

SEQ ID NO: 31867 - DNA, 21 bp, Artificial Sequence
  Synthetic
actagaaggggtattccaaat

SEQ ID NO: 31868 - DNA, 20 bp, Artificial Sequence
  Synthetic
ggctttgtgggttgtaaggt

SEQ ID NO: 31869 - DNA, 18 bp, Artificial Sequence
  Synthetic
atgactgctccttctccc

SEQ ID NO: 31870 - DNA, 18 bp, Artificial Sequence
  Synthetic
ccctctgatggctcttct

SEQ ID NO: 31871 - DNA, 20 bp, Artificial Sequence
  Synthetic
accctctcttgaaatgtgta

SEQ ID NO: 31872 - DNA, 21 bp, Artificial Sequence
  Synthetic
ttgtttagccaattcttgagc

SEQ ID NO: 31873 - DNA, 20 bp, Artificial Sequence
  Synthetic
gccatagaaaacagtcacat

SEQ ID NO: 31874 - DNA, 25 bp, Artificial Sequence
  Synthetic
tagaagtttcatttattatggaggc

SEQ ID NO: 31875 - DNA, 22 bp, Artificial Sequence
  Synthetic
caaagcctgaatagttggtatc

SEQ ID NO: 31876 - DNA, 22 bp, Artificial Sequence
  Synthetic
ttgtatctgggatgttgtacaa

SEQ ID NO: 31877 - DNA, 23 bp, Artificial Sequence
  Synthetic
cactaaaggtaatgttggtatga

SEQ ID NO: 31878 - DNA, 23 bp, Artificial Sequence
  Synthetic
attcttttcttgttgaatttggg

SEQ ID NO: 31879 - DNA, 20 bp, Artificial Sequence
  Synthetic
ccgcaagagtctctctcgta

SEQ ID NO: 31880 - DNA, 25 bp, Artificial Sequence
  Synthetic
ccccctttttcttttataaaatgtg

SEQ ID NO: 31881 - DNA, 22 bp, Artificial Sequence
  Synthetic
tttcttagtagctacttcctgc

SEQ ID NO: 31882 - DNA, 20 bp, Artificial Sequence
  Synthetic
ggagagatgggaacacacac

SEQ ID NO: 31883 - DNA, 19 bp, Artificial Sequence
  Synthetic
aggtgttgttgttagtggt

SEQ ID NO: 31884 - DNA, 25 bp, Artificial Sequence
  Synthetic
ctgtattgataacattactggttga

SEQ ID NO: 31885 - DNA, 21 bp, Artificial Sequence
  Synthetic
catagagtctttccatttggg

SEQ ID NO: 31886 - DNA, 19 bp, Artificial Sequence
  Synthetic
ccaattaaaggcaaggacc

SEQ ID NO: 31887 - DNA, 19 bp, Artificial Sequence
  Synthetic
atgagatgtgtatccgtgc

SEQ ID NO: 31888 - DNA, 20 bp, Artificial Sequence
  Synthetic
ctttcaagtgccaagagatg

SEQ ID NO: 31889 - DNA, 24 bp, Artificial Sequence
  Synthetic
gctatcattaatgttacagccaag

SEQ ID NO: 31890 - DNA, 18 bp, Artificial Sequence
  Synthetic
acttctgtggtcaccgtt

SEQ ID NO: 31891 - DNA, 20 bp, Artificial Sequence
  Synthetic
gcactggagctaggatgagt

SEQ ID NO: 31892 - DNA, 18 bp, Artificial Sequence
  Synthetic
gactcaggtaccccttcc

SEQ ID NO: 31893 - DNA, 18 bp, Artificial Sequence
  Synthetic
ccatccacacattctgct

SEQ ID NO: 31894 - DNA, 19 bp, Artificial Sequence
  Synthetic
gtttagggctcaaatcagc

SEQ ID NO: 31895 - DNA, 21 bp, Artificial Sequence
  Synthetic
tcgctttcatacagagtcatt

SEQ ID NO: 31896 - DNA, 19 bp, Artificial Sequence
  Synthetic
agtccattgtccagattgt

SEQ ID NO: 31897 - DNA, 20 bp, Artificial Sequence
  Synthetic
cctgtaccaatacccaaacc

SEQ ID NO: 31898 - DNA, 22 bp, Artificial Sequence
  Synthetic
acctaaagctgtagtaggattt

SEQ ID NO: 31899 - DNA, 20 bp, Artificial Sequence
  Synthetic
tttcctcaacatctccaact

SEQ ID NO: 31900 - DNA, 20 bp, Artificial Sequence
  Synthetic
tgcatcaaatacaggattgg

SEQ ID NO: 31901 - DNA, 19 bp, Artificial Sequence
  Synthetic
gcatttcaaagctctctgc

SEQ ID NO: 31902 - DNA, 25 bp, Artificial Sequence
  Synthetic
gtttctgtaacatattcatctgttg

SEQ ID NO: 31903 - DNA, 20 bp, Artificial Sequence
  Synthetic
aatagggatgtccagaacaa

SEQ ID NO: 31904 - DNA, 21 bp, Artificial Sequence
  Synthetic
ctttctataggaggacagtca

SEQ ID NO: 31905 - DNA, 20 bp, Artificial Sequence
  Synthetic
gtactctccattggtattgc

SEQ ID NO: 31906 - DNA, 20 bp, Artificial Sequence
  Synthetic
cagttggacatttagtagcc

SEQ ID NO: 31907 - DNA, 21 bp, Artificial Sequence
  Synthetic
ttcaagtttattcaggttgca

SEQ ID NO: 31908 - DNA, 23 bp, Artificial Sequence
  Synthetic
acagtaaaaacatcgaatggtaa

SEQ ID NO: 31909 - DNA, 21 bp, Artificial Sequence
  Synthetic
ccaataagtgaattgctccag

SEQ ID NO: 31910 - DNA, 20 bp, Artificial Sequence
  Synthetic
gctttctgattgctacttga

SEQ ID NO: 31911 - DNA, 23 bp, Artificial Sequence
  Synthetic
ttcttctgctaataaggcataat

SEQ ID NO: 31912 - DNA, 22 bp, Artificial Sequence
  Synthetic
acctaacacttcatatccttct

SEQ ID NO: 31913 - DNA, 20 bp, Artificial Sequence
  Synthetic
ctttcagctcgtcttcgtct

SEQ ID NO: 31914 - DNA, 21 bp, Artificial Sequence
  Synthetic
cctaccagtaccaatccctaa

SEQ ID NO: 31915 - DNA, 20 bp, Artificial Sequence
  Synthetic
acaatggatccacagaagtg

SEQ ID NO: 31916 - DNA, 19 bp, Artificial Sequence
  Synthetic
gttaccacgtcatcaaagg

SEQ ID NO: 31917 - DNA, 23 bp, Artificial Sequence
  Synthetic
attaatatcaaaacctgggacaa

SEQ ID NO: 31918 - DNA, 24 bp, Artificial Sequence
  Synthetic
aaatctatcaaaaagaggatgacc

SEQ ID NO: 31919 - DNA, 20 bp, Artificial Sequence
  Synthetic
tggataaaaaaaacgtccgt

SEQ ID NO: 31920 - DNA, 18 bp, Artificial Sequence
  Synthetic
gctgcttacgaggaacat

SEQ ID NO: 31921 - DNA, 18 bp, Artificial Sequence
  Synthetic
cgaaaatcagcgaccgaa

SEQ ID NO: 31922 - DNA, 19 bp, Artificial Sequence
  Synthetic
cctttcagggatcatctcc

SEQ ID NO: 31923 - DNA, 18 bp, Artificial Sequence
  Synthetic
aatgaacagggccaaagg

SEQ ID NO: 31924 - DNA, 20 bp, Artificial Sequence
  Synthetic
atatatacgctgcttgtccc

SEQ ID NO: 31925 - DNA, 21 bp, Artificial Sequence
  Synthetic
atgtctaccattcttactccg

SEQ ID NO: 31926 - DNA, 19 bp, Artificial Sequence
  Synthetic
ccacaataattgcctcagc

SEQ ID NO: 31927 - DNA, 23 bp, Artificial Sequence
  Synthetic
gcaatattccaatcatacccatg

SEQ ID NO: 31928 - DNA, 23 bp, Artificial Sequence
  Synthetic
gatatgtgttaactagcactgat

SEQ ID NO: 31929 - DNA, 21 bp, Artificial Sequence
  Synthetic
agtcagagaagaaaattgcat

SEQ ID NO: 31930 - DNA, 22 bp, Artificial Sequence
  Synthetic
gtaagattgctcagttcattga

SEQ ID NO: 31931 - DNA, 18 bp, Artificial Sequence
  Synthetic
ttttgagcagatcctggg

SEQ ID NO: 31932 - DNA, 18 bp, Artificial Sequence
  Synthetic
tcctacatgcactggttg

SEQ ID NO: 31933 - DNA, 22 bp, Artificial Sequence
  Synthetic
tttagcattagccaatgaaagt

SEQ ID NO: 31934 - DNA, 18 bp, Artificial Sequence
  Synthetic
catccctgttgctagcag

SEQ ID NO: 31935 - DNA, 22 bp, Artificial Sequence
  Synthetic
ggttttttctataagccggttt

SEQ ID NO: 31936 - DNA, 22 bp, Artificial Sequence
  Synthetic
catacagtcatcatcacacttg

SEQ ID NO: 31937 - DNA, 22 bp, Artificial Sequence
  Synthetic
tggttaagtggtttttacacca

SEQ ID NO: 31938 - DNA, 18 bp, Artificial Sequence
  Synthetic
ttctctgcactgggtaca

SEQ ID NO: 31939 - DNA, 18 bp, Artificial Sequence
  Synthetic
gtgtgtccagaagcatct

SEQ ID NO: 31940 - DNA, 23 bp, Artificial Sequence
  Synthetic
tgtacaactacttttgtcacttt

SEQ ID NO: 31941 - DNA, 18 bp, Artificial Sequence
  Synthetic
cactttgtaatcgtggcg

SEQ ID NO: 31942 - DNA, 21 bp, Artificial Sequence
  Synthetic
catacgtttcatttgtgcttt

SEQ ID NO: 31943 - DNA, 19 bp, Artificial Sequence
  Synthetic
tgtcctacttgtgcatagc

SEQ ID NO: 31944 - DNA, 18 bp, Artificial Sequence
  Synthetic
tgccatctagtgtttgca

SEQ ID NO: 31945 - DNA, 18 bp, Artificial Sequence
  Synthetic
gtgaccctttgcgatccg

SEQ ID NO: 31946 - DNA, 18 bp, Artificial Sequence
  Synthetic
tagtagctgcaaccagga

SEQ ID NO: 31947 - DNA, 22 bp, Artificial Sequence
  Synthetic
tggcattgataatacactttgg

SEQ ID NO: 31948 - DNA, 23 bp, Artificial Sequence
  Synthetic
atgttaagagtctaccattaccc

SEQ ID NO: 31949 - DNA, 21 bp, Artificial Sequence
  Synthetic
acataaacatcaaacaggcca

SEQ ID NO: 31950 - DNA, 25 bp, Artificial Sequence
  Synthetic
tcttaatagtataatatggatgccc

SEQ ID NO: 31951 - DNA, 25 bp, Artificial Sequence
  Synthetic
caggatatttactaatggagttcat

SEQ ID NO: 31952 - DNA, 20 bp, Artificial Sequence
  Synthetic
gttaccttagcttgacatcg

SEQ ID NO: 31953 - DNA, 20 bp, Artificial Sequence
  Synthetic
aaatgcaaagctatgccaac

SEQ ID NO: 31954 - DNA, 23 bp, Artificial Sequence
  Synthetic
gcattagaatcttcatctgctaa

SEQ ID NO: 31955 - DNA, 21 bp, Artificial Sequence
  Synthetic
tcttaaggcagtaaggaactc

SEQ ID NO: 31956 - DNA, 20 bp, Artificial Sequence
  Synthetic
tgttctccttctcctcctcg

SEQ ID NO: 31957 - DNA, 22 bp, Artificial Sequence
  Synthetic
taactgtaaggcttaggacatt

SEQ ID NO: 31958 - DNA, 24 bp, Artificial Sequence
  Synthetic
taaaactaggatctaaagcaatgc

SEQ ID NO: 31959 - DNA, 18 bp, Artificial Sequence
  Synthetic
tacgccatctggaatgct

SEQ ID NO: 31960 - DNA, 21 bp, Artificial Sequence
  Synthetic
cccaaaggatagcattattgc

SEQ ID NO: 31961 - DNA, 25 bp, Artificial Sequence
  Synthetic
aataaatctatacgaatcctccaag

SEQ ID NO: 31962 - DNA, 19 bp, Artificial Sequence
  Synthetic
atgagactgctctggtaac

SEQ ID NO: 31963 - DNA, 20 bp, Artificial Sequence
  Synthetic
gtggtaaggataaaggcaac

SEQ ID NO: 31964 - DNA, 18 bp, Artificial Sequence
  Synthetic
ggtacaaaggctgacagc

SEQ ID NO: 31965 - DNA, 20 bp, Artificial Sequence
  Synthetic
ggtgagtcccaattgtcctc

SEQ ID NO: 31966 - DNA, 19 bp, Artificial Sequence
  Synthetic
gccgatactcttccctcat

SEQ ID NO: 31967 - DNA, 20 bp, Artificial Sequence
  Synthetic
aaatcctccatacttttgcc

SEQ ID NO: 31968 - DNA, 18 bp, Artificial Sequence
  Synthetic
gtcaccgctcaataccag

SEQ ID NO: 31969 - DNA, 24 bp, Artificial Sequence
  Synthetic
tccttatatgtctcttcaagcttt

SEQ ID NO: 31970 - DNA, 19 bp, Artificial Sequence
  Synthetic
tgattgtgtcgttttccga

SEQ ID NO: 31971 - DNA, 24 bp, Artificial Sequence
  Synthetic
gagtccttatccatctttctaatt

SEQ ID NO: 31972 - DNA, 22 bp, Artificial Sequence
  Synthetic
ttttgtataagttgatccggag

SEQ ID NO: 31973 - DNA, 23 bp, Artificial Sequence
  Synthetic
tcacttttttgggtattagtctt

SEQ ID NO: 31974 - DNA, 20 bp, Artificial Sequence
  Synthetic
agaagcctagtaggaagaca

SEQ ID NO: 31975 - DNA, 21 bp, Artificial Sequence
  Synthetic
caaggttattgatccaattgc

SEQ ID NO: 31976 - DNA, 19 bp, Artificial Sequence
  Synthetic
ttgttggtgttgacctctt

SEQ ID NO: 31977 - DNA, 19 bp, Artificial Sequence
  Synthetic
cagagcaatggttccaatt

SEQ ID NO: 31978 - DNA, 24 bp, Artificial Sequence
  Synthetic
ctgaatgcttctatacattctttg

SEQ ID NO: 31979 - DNA, 20 bp, Artificial Sequence
  Synthetic
atcaagtgcaacagaattgt

SEQ ID NO: 31980 - DNA, 22 bp, Artificial Sequence
  Synthetic
caccaggattattgtccataat

SEQ ID NO: 31981 - DNA, 25 bp, Artificial Sequence
  Synthetic
agatcatttataattaaggacggag

SEQ ID NO: 31982 - DNA, 21 bp, Artificial Sequence
  Synthetic
tcctcctatctgaaaaccatg

SEQ ID NO: 31983 - DNA, 20 bp, Artificial Sequence
  Synthetic
gtaatgcagcttgttgttgt

SEQ ID NO: 31984 - DNA, 23 bp, Artificial Sequence
  Synthetic
cccaatttgatttttttggagat

SEQ ID NO: 31985 - DNA, 20 bp, Artificial Sequence
  Synthetic
gcatgcatatcctagaacag

SEQ ID NO: 31986 - DNA, 22 bp, Artificial Sequence
  Synthetic
ggtctaatagattcgccttgat

SEQ ID NO: 31987 - DNA, 20 bp, Artificial Sequence
  Synthetic
gtttgtgccatctgaagaat

SEQ ID NO: 31988 - DNA, 22 bp, Artificial Sequence
  Synthetic
gtactggagaatttcatctgag

SEQ ID NO: 31989 - DNA, 20 bp, Artificial Sequence
  Synthetic
gtaaggcgtttgtagaatgg

SEQ ID NO: 31990 - DNA, 24 bp, Artificial Sequence
  Synthetic
ggtcagaaaatttcattatgttgc

SEQ ID NO: 31991 - DNA, 19 bp, Artificial Sequence
  Synthetic
gcgtagtgtatgcaaagca

SEQ ID NO: 31992 - DNA, 18 bp, Artificial Sequence
  Synthetic
cgggaacaacacacagtt

SEQ ID NO: 31993 - DNA, 20 bp, Artificial Sequence
  Synthetic
gaagcaacttgtcttctgac

SEQ ID NO: 31994 - DNA, 19 bp, Artificial Sequence
  Synthetic
ccttaagctttgtggtgac

SEQ ID NO: 31995 - DNA, 19 bp, Artificial Sequence
  Synthetic
gtcactaacaaagtacgcc

SEQ ID NO: 31996 - DNA, 22 bp, Artificial Sequence
  Synthetic
aacaatagtatcaacgaaagct

SEQ ID NO: 31997 - DNA, 22 bp, Artificial Sequence
  Synthetic
ccttacacacgatatcacgtat

SEQ ID NO: 31998 - DNA, 22 bp, Artificial Sequence
  Synthetic
tgatggataataaacaccatcc

SEQ ID NO: 31999 - DNA, 18 bp, Artificial Sequence
  Synthetic
cgggcaaactcaagtcat

SEQ ID NO: 32000 - DNA, 18 bp, Artificial Sequence
  Synthetic
acatcacccatagcacca

SEQ ID NO: 32001 - DNA, 23 bp, Artificial Sequence
  Synthetic
gcacaaatattatggtaccttgt

SEQ ID NO: 32002 - DNA, 23 bp, Artificial Sequence
  Synthetic
gcagcatttacaataaagtcaaa

SEQ ID NO: 32003 - DNA, 18 bp, Artificial Sequence
  Synthetic
atgggtttgtcatcagcg

SEQ ID NO: 32004 - DNA, 20 bp, Artificial Sequence
  Synthetic
cttcagcagctttaagttca

SEQ ID NO: 32005 - DNA, 24 bp, Artificial Sequence
  Synthetic
tcacccaacaattattatcactag

SEQ ID NO: 32006 - DNA, 19 bp, Artificial Sequence
  Synthetic
aggtccagaaaaagcagta

SEQ ID NO: 32007 - DNA, 19 bp, Artificial Sequence
  Synthetic
ggtccaaaacgtacacaaa

SEQ ID NO: 32008 - DNA, 22 bp, Artificial Sequence
  Synthetic
ccaaatataagcagcaaaacca

SEQ ID NO: 32009 - DNA, 21 bp, Artificial Sequence
  Synthetic
gagtcacaatcaacacagaaa

SEQ ID NO: 32010 - DNA, 18 bp, Artificial Sequence
  Synthetic
caaccttagcacctgcac

SEQ ID NO: 32011 - DNA, 20 bp, Artificial Sequence
  Synthetic
ggcatgaaaaagcacaagta

SEQ ID NO: 32012 - DNA, 21 bp, Artificial Sequence
  Synthetic
gcagaagtaaaaatgcacttt

SEQ ID NO: 32013 - DNA, 18 bp, Artificial Sequence
  Synthetic
ccacaaaccagtaccaca

SEQ ID NO: 32014 - DNA, 22 bp, Artificial Sequence
  Synthetic
agatttgtcgaaactttaagct

SEQ ID NO: 32015 - DNA, 20 bp, Artificial Sequence
  Synthetic
ccattcaacacagtgtttcc

SEQ ID NO: 32016 - DNA, 22 bp, Artificial Sequence
  Synthetic
cggatagtccaattagttctca

SEQ ID NO: 32017 - DNA, 18 bp, Artificial Sequence
  Synthetic
aaaccattagcctgtgcc

SEQ ID NO: 32018 - DNA, 22 bp, Artificial Sequence
  Synthetic
cacttgcaaaaacaaaacctta

SEQ ID NO: 32019 - DNA, 22 bp, Artificial Sequence
  Synthetic
agaaattgcacaaagtagcata

SEQ ID NO: 32020 - DNA, 18 bp, Artificial Sequence
  Synthetic
ggttctaggaccgccaat

SEQ ID NO: 32021 - DNA, 22 bp, Artificial Sequence
  Synthetic
agaccaaaatcactatgcttag

SEQ ID NO: 32022 - DNA, 18 bp, Artificial Sequence
  Synthetic
catgtccaaacgtcggag

SEQ ID NO: 32023 - DNA, 22 bp, Artificial Sequence
  Synthetic
gcattatttcattgttctgcaa

SEQ ID NO: 32024 - DNA, 20 bp, Artificial Sequence
  Synthetic
agcacctctccttaaattgt

SEQ ID NO: 32025 - DNA, 18 bp, Artificial Sequence
  Synthetic
aatacaaacagacgcgcc

SEQ ID NO: 32026 - DNA, 22 bp, Artificial Sequence
  Synthetic
cgcatctttattgtaaacgtca

SEQ ID NO: 32027 - DNA, 18 bp, Artificial Sequence
  Synthetic
cacggtgtatgtcctcat

SEQ ID NO: 32028 - DNA, 21 bp, Artificial Sequence
  Synthetic
aaagttttgaagtcttgacca

SEQ ID NO: 32029 - DNA, 25 bp, Artificial Sequence
  Synthetic
cagtaatagtaagtctggtagaatg

SEQ ID NO: 32030 - DNA, 22 bp, Artificial Sequence
  Synthetic
gtaggtctgttgtaacgataat

SEQ ID NO: 32031 - DNA, 23 bp, Artificial Sequence
  Synthetic
ttctttaacatattatcccaccc

SEQ ID NO: 32032 - DNA, 23 bp, Artificial Sequence
  Synthetic
gcaaaattcatgaggtcctatag

SEQ ID NO: 32033 - DNA, 21 bp, Artificial Sequence
  Synthetic
ccttcgttaagagtcttgttg

SEQ ID NO: 32034 - DNA, 21 bp, Artificial Sequence
  Synthetic
atcattagcaagcttgtagtc

SEQ ID NO: 32035 - DNA, 18 bp, Artificial Sequence
  Synthetic
ctcctggtttgccattgt

SEQ ID NO: 32036 - DNA, 23 bp, Artificial Sequence
  Synthetic
tgtgcactattattgttaggttt

SEQ ID NO: 32037 - DNA, 20 bp, Artificial Sequence
  Synthetic
cctatagcacacatacgttg

SEQ ID NO: 32038 - DNA, 20 bp, Artificial Sequence
  Synthetic
gagcagtatctgatgtctgt

SEQ ID NO: 32039 - DNA, 21 bp, Artificial Sequence
  Synthetic
acatcaaacctgaaacccata

SEQ ID NO: 32040 - DNA, 19 bp, Artificial Sequence
  Synthetic
gttttacaacactgccagt

SEQ ID NO: 32041 - DNA, 23 bp, Artificial Sequence
  Synthetic
ggattataaacatagtcacagcc

SEQ ID NO: 32042 - DNA, 22 bp, Artificial Sequence
  Synthetic
ccttaggattaccaatgtcatg

SEQ ID NO: 32043 - DNA, 19 bp, Artificial Sequence
  Synthetic
acatgaaccgtcgtcatag

SEQ ID NO: 32044 - DNA, 20 bp, Artificial Sequence
  Synthetic
cgtacgaacactttatcacc

SEQ ID NO: 32045 - DNA, 23 bp, Artificial Sequence
  Synthetic
gagaataacacagcattagttga

SEQ ID NO: 32046 - DNA, 22 bp, Artificial Sequence
  Synthetic
gttgaaatcctctagaccatac

SEQ ID NO: 32047 - DNA, 21 bp, Artificial Sequence
  Synthetic
tgaggatagaatgtagcaacg

SEQ ID NO: 32048 - DNA, 21 bp, Artificial Sequence
  Synthetic
cacatagtcaacaacatcgtt

SEQ ID NO: 32049 - DNA, 18 bp, Artificial Sequence
  Synthetic
cacaacaacagtcgcttt

SEQ ID NO: 32050 - DNA, 20 bp, Artificial Sequence
  Synthetic
acaacaccatctacaacaga

SEQ ID NO: 32051 - DNA, 22 bp, Artificial Sequence
  Synthetic
acctaaagtgaaatagcgatag

SEQ ID NO: 32052 - DNA, 22 bp, Artificial Sequence
  Synthetic
tgtaatattaacaccagcagga

SEQ ID NO: 32053 - DNA, 19 bp, Artificial Sequence
  Synthetic
gacaacatagcaccaacaa

SEQ ID NO: 32054 - DNA, 23 bp, Artificial Sequence
  Synthetic
acgataggtgtacttgtaatttg

SEQ ID NO: 32055 - DNA, 23 bp, Artificial Sequence
  Synthetic
ccagaagtaacaagtttgctaaa

SEQ ID NO: 32056 - DNA, 21 bp, Artificial Sequence
  Synthetic
ctactatgttggtcattgctt

SEQ ID NO: 32057 - DNA, 21 bp, Artificial Sequence
  Synthetic
tttgacacactcattcacttt

SEQ ID NO: 32058 - DNA, 20 bp, Artificial Sequence
  Synthetic
caactcagagcgagaaatgt

SEQ ID NO: 32059 - DNA, 18 bp, Artificial Sequence
  Synthetic
taagtctcaacccggttg

SEQ ID NO: 32060 - DNA, 22 bp, Artificial Sequence
  Synthetic
tgaaacttcagcactaactttc

SEQ ID NO: 32061 - DNA, 19 bp, Artificial Sequence
  Synthetic
acacttaccttgcatagca

SEQ ID NO: 32062 - DNA, 19 bp, Artificial Sequence
  Synthetic
ggaaagggtctatgtgcat

SEQ ID NO: 32063 - DNA, 18 bp, Artificial Sequence
  Synthetic
cgaagtacatcacccaca

SEQ ID NO: 32064 - DNA, 20 bp, Artificial Sequence
  Synthetic
gccatcttttcgttcagttt

SEQ ID NO: 32065 - DNA, 21 bp, Artificial Sequence
  Synthetic
cgctctctaaattttgcatct

SEQ ID NO: 32066 - DNA, 19 bp, Artificial Sequence
  Synthetic
gaagaagcaggactctgat

SEQ ID NO: 32067 - DNA, 19 bp, Artificial Sequence
  Synthetic
cagcaaattgtggatagcc

SEQ ID NO: 32068 - DNA, 21 bp, Artificial Sequence
  Synthetic
tgaatttcaaacaacacagtg

SEQ ID NO: 32069 - DNA, 18 bp, Artificial Sequence
  Synthetic
ccattgttggctcgtcaa

SEQ ID NO: 32070 - DNA, 21 bp, Artificial Sequence
  Synthetic
agaacccacaaaaatgcataa

SEQ ID NO: 32071 - DNA, 23 bp, Artificial Sequence
  Synthetic
gctaggactagtatactttcgtt

SEQ ID NO: 32072 - DNA, 18 bp, Artificial Sequence
  Synthetic
gctgttgcaagcctgttg

SEQ ID NO: 32073 - DNA, 25 bp, Artificial Sequence
  Synthetic
tcccatatattattatcatatgccc

SEQ ID NO: 32074 - DNA, 23 bp, Artificial Sequence
  Synthetic
tggaataatagacacatcctgat

SEQ ID NO: 32075 - DNA, 19 bp, Artificial Sequence
  Synthetic
tctacctgtgcatgtgttt

SEQ ID NO: 32076 - DNA, 25 bp, Artificial Sequence
  Synthetic
ctatattttgttttacacctgtacc

SEQ ID NO: 32077 - DNA, 20 bp, Artificial Sequence
  Synthetic
cctcctcctgttcctatagg

SEQ ID NO: 32078 - DNA, 20 bp, Artificial Sequence
  Synthetic
agggacaacaatatcgggct

SEQ ID NO: 32079 - DNA, 24 bp, Artificial Sequence
  Synthetic
aggttcaatatcaaaggtagaaga

SEQ ID NO: 32080 - DNA, 19 bp, Artificial Sequence
  Synthetic
tgcaaaatccgggtcagga

SEQ ID NO: 32081 - DNA, 22 bp, Artificial Sequence
  Synthetic
ggtataggaaaagtggtaggac

SEQ ID NO: 32082 - DNA, 22 bp, Artificial Sequence
  Synthetic
ggaagaatactgaagtttccac

SEQ ID NO: 32083 - DNA, 21 bp, Artificial Sequence
  Synthetic
tttcagtgtcctttagcttgt

SEQ ID NO: 32084 - DNA, 19 bp, Artificial Sequence
  Synthetic
gaggctgtattctgctctt

SEQ ID NO: 32085 - DNA, 21 bp, Artificial Sequence
  Synthetic
acttttcatatggatctgcct

SEQ ID NO: 32086 - DNA, 19 bp, Artificial Sequence
  Synthetic
gggcgttgtcaaacaggac

SEQ ID NO: 32087 - DNA, 16 bp, Artificial Sequence
  Synthetic
ctgtgccacgcgtcct

SEQ ID NO: 32088 - DNA, 16 bp, Artificial Sequence
  Synthetic
cggccgagttgtctgc

SEQ ID NO: 32089 - DNA, 16 bp, Artificial Sequence
  Synthetic
gcacctcacccacgct

SEQ ID NO: 32090 - DNA, 18 bp, Artificial Sequence
  Synthetic
gcactcgtactgctcgct

SEQ ID NO: 32091 - DNA, 19 bp, Artificial Sequence
  Synthetic
gcgatctggtgggcattct

SEQ ID NO: 32092 - DNA, 18 bp, Artificial Sequence
  Synthetic
tttcctgcatgccgttta

SEQ ID NO: 32093 - DNA, 18 bp, Artificial Sequence
  Synthetic
cccctggacatctggaca

SEQ ID NO: 32094 - DNA, 17 bp, Artificial Sequence
  Synthetic
agtgtgtgcctgggtgt

SEQ ID NO: 32095 - DNA, 20 bp, Artificial Sequence
  Synthetic
ccctggagaggtcaggttac

SEQ ID NO: 32096 - DNA, 18 bp, Artificial Sequence
  Synthetic
agaggagcagggggacag

SEQ ID NO: 32097 - DNA, 18 bp, Artificial Sequence
  Synthetic
ccctgaaggtgaaccgct

SEQ ID NO: 32098 - DNA, 20 bp, Artificial Sequence
  Synthetic
cgaccagaaatagctgcagg

SEQ ID NO: 32099 - DNA, 19 bp, Artificial Sequence
  Synthetic
tcctcttcttgctggacga

SEQ ID NO: 32100 - DNA, 19 bp, Artificial Sequence
  Synthetic
gggtaaaagtgggagggca

SEQ ID NO: 32101 - DNA, 17 bp, Artificial Sequence
  Synthetic
ggggtgcctcacgagtt

SEQ ID NO: 32102 - DNA, 16 bp, Artificial Sequence
  Synthetic
tgcaaaaggccacggc

SEQ ID NO: 32103 - DNA, 16 bp, Artificial Sequence
  Synthetic
tcgcgaatctcccggg

SEQ ID NO: 32104 - DNA, 16 bp, Artificial Sequence
  Synthetic
taccccgggattggcc

SEQ ID NO: 32105 - DNA, 19 bp, Artificial Sequence
  Synthetic
cgaccgatgtactcaaccc

SEQ ID NO: 32106 - DNA, 16 bp, Artificial Sequence
  Synthetic
agtcccagctgcaggg

SEQ ID NO: 32107 - DNA, 18 bp, Artificial Sequence
  Synthetic
agctaacacggctcctgg

SEQ ID NO: 32108 - DNA, 20 bp, Artificial Sequence
  Synthetic
actccctcacacagatcctt

SEQ ID NO: 32109 - DNA, 20 bp, Artificial Sequence
  Synthetic
ctttttggcgctgttgacag

SEQ ID NO: 32110 - DNA, 16 bp, Artificial Sequence
  Synthetic
tcaggaggcgggggaa

SEQ ID NO: 32111 - DNA, 18 bp, Artificial Sequence
  Synthetic
gccacgacactcgaacca

SEQ ID NO: 32112 - DNA, 16 bp, Artificial Sequence
  Synthetic
agcccctcggttctcg

SEQ ID NO: 32113 - DNA, 16 bp, Artificial Sequence
  Synthetic
acgcagagaccgggag

SEQ ID NO: 32114 - DNA, 16 bp, Artificial Sequence
  Synthetic
accaccgcttgcctgg

SEQ ID NO: 32115 - DNA, 17 bp, Artificial Sequence
  Synthetic
ggacagacgtcgaggca

SEQ ID NO: 32116 - DNA, 18 bp, Artificial Sequence
  Synthetic
gctcaaactcctccccgt

SEQ ID NO: 32117 - DNA, 16 bp, Artificial Sequence
  Synthetic
gcgttcatggcctcgc

SEQ ID NO: 32118 - DNA, 16 bp, Artificial Sequence
  Synthetic
gagggccagcaggagt

SEQ ID NO: 32119 - DNA, 20 bp, Artificial Sequence
  Synthetic
gccagacctgtaaaacctca

SEQ ID NO: 32120 - DNA, 19 bp, Artificial Sequence
  Synthetic
gcctccgacgatgtccttt

SEQ ID NO: 32121 - DNA, 18 bp, Artificial Sequence
  Synthetic
tggagaatgtctgcgcca

SEQ ID NO: 32122 - DNA, 16 bp, Artificial Sequence
  Synthetic
acaggggctttgcgga

SEQ ID NO: 32123 - DNA, 16 bp, Artificial Sequence
  Synthetic
ttgcggaggccatcct

SEQ ID NO: 32124 - DNA, 17 bp, Artificial Sequence
  Synthetic
gggggaactccggctaa

SEQ ID NO: 32125 - DNA, 16 bp, Artificial Sequence
  Synthetic
ggcggctcaccttggt

SEQ ID NO: 32126 - DNA, 18 bp, Artificial Sequence
  Synthetic
gcccagatggaggcaaag

SEQ ID NO: 32127 - DNA, 19 bp, Artificial Sequence
  Synthetic
gtggagctgacatgctatt

SEQ ID NO: 32128 - DNA, 16 bp, Artificial Sequence
  Synthetic
ggtgcacacgccactc

SEQ ID NO: 32129 - DNA, 19 bp, Artificial Sequence
  Synthetic
gcacctcaacactagcctg

SEQ ID NO: 32130 - DNA, 17 bp, Artificial Sequence
  Synthetic
tttggccaccttcccct

SEQ ID NO: 32131 - DNA, 20 bp, Artificial Sequence
  Synthetic
tctgtacaatgccagcactg

SEQ ID NO: 32132 - DNA, 19 bp, Artificial Sequence
  Synthetic
caaggggcgcatagggata

SEQ ID NO: 32133 - DNA, 16 bp, Artificial Sequence
  Synthetic
accgaggcccgctact

SEQ ID NO: 32134 - DNA, 19 bp, Artificial Sequence
  Synthetic
tcgcgaattttgactgcaa

SEQ ID NO: 32135 - DNA, 20 bp, Artificial Sequence
  Synthetic
tttcctcaggcttggctaag

SEQ ID NO: 32136 - DNA, 20 bp, Artificial Sequence
  Synthetic
ggtgtcagacctgaagactg

SEQ ID NO: 32137 - DNA, 19 bp, Artificial Sequence
  Synthetic
ccgactcatctacggaggc

SEQ ID NO: 32138 - DNA, 17 bp, Artificial Sequence
  Synthetic
attgccgccgagttcag

SEQ ID NO: 32139 - DNA, 18 bp, Artificial Sequence
  Synthetic
ccgcacagaacctctccc

SEQ ID NO: 32140 - DNA, 16 bp, Artificial Sequence
  Synthetic
tccagcgtgcggtagc

SEQ ID NO: 32141 - DNA, 18 bp, Artificial Sequence
  Synthetic
gatggcgttatggcggtt

SEQ ID NO: 32142 - DNA, 20 bp, Artificial Sequence
  Synthetic
gggggaatatgttgaggtgg

SEQ ID NO: 32143 - DNA, 18 bp, Artificial Sequence
  Synthetic
caccgcgtcagcctgaaa

SEQ ID NO: 32144 - DNA, 17 bp, Artificial Sequence
  Synthetic
ggatgagcagggcctca

SEQ ID NO: 32145 - DNA, 21 bp, Artificial Sequence
  Synthetic
acaaacatcacaaagtacaca

SEQ ID NO: 32146 - DNA, 15 bp, Artificial Sequence
  Synthetic
tgcacgctcggctca

SEQ ID NO: 32147 - DNA, 18 bp, Artificial Sequence
  Synthetic
cggctactcgctgctcta

SEQ ID NO: 32148 - DNA, 19 bp, Artificial Sequence
  Synthetic
ccactcccttggatgtggg

SEQ ID NO: 32149 - DNA, 18 bp, Artificial Sequence
  Synthetic
agagggaggaggctaggc

SEQ ID NO: 32150 - DNA, 16 bp, Artificial Sequence
  Synthetic
tgtccggggagagcgt

SEQ ID NO: 32151 - DNA, 18 bp, Artificial Sequence
  Synthetic
acgctcagactcctcgtc

SEQ ID NO: 32152 - DNA, 16 bp, Artificial Sequence
  Synthetic
aagagggccgggatgg

SEQ ID NO: 32153 - DNA, 17 bp, Artificial Sequence
  Synthetic
ggcattgcccagcttgg

SEQ ID NO: 32154 - DNA, 19 bp, Artificial Sequence
  Synthetic
gattttgacaacctccacg

SEQ ID NO: 32155 - DNA, 20 bp, Artificial Sequence
  Synthetic
caccgtgctacctcagccta

SEQ ID NO: 32156 - DNA, 19 bp, Artificial Sequence
  Synthetic
cctgtttatcggcagccac

SEQ ID NO: 32157 - DNA, 19 bp, Artificial Sequence
  Synthetic
cggtcaagatggaggagct

SEQ ID NO: 32158 - DNA, 19 bp, Artificial Sequence
  Synthetic
gcaagggtaagccttctgg

SEQ ID NO: 32159 - DNA, 16 bp, Artificial Sequence
  Synthetic
tccagctccacgcgga

SEQ ID NO: 32160 - DNA, 16 bp, Artificial Sequence
  Synthetic
acaggggccgtctgtg

SEQ ID NO: 32161 - DNA, 17 bp, Artificial Sequence
  Synthetic
tccggcaggtgttccac

SEQ ID NO: 32162 - DNA, 18 bp, Artificial Sequence
  Synthetic
ccagtcacaggccccata

SEQ ID NO: 32163 - DNA, 19 bp, Artificial Sequence
  Synthetic
gcggggacaagctaaacac

SEQ ID NO: 32164 - DNA, 16 bp, Artificial Sequence
  Synthetic
tagcatgggaggcgcg

SEQ ID NO: 32165 - DNA, 18 bp, Artificial Sequence
  Synthetic
accaggcctacacagacc

SEQ ID NO: 32166 - DNA, 16 bp, Artificial Sequence
  Synthetic
agcgagaccctgcgct

SEQ ID NO: 32167 - DNA, 17 bp, Artificial Sequence
  Synthetic
ccaagcgcaaggccatc

SEQ ID NO: 32168 - DNA, 15 bp, Artificial Sequence
  Synthetic
atgcgggcaagggct

SEQ ID NO: 32169 - DNA, 16 bp, Artificial Sequence
  Synthetic
tgggggaggagggctt

SEQ ID NO: 32170 - DNA, 16 bp, Artificial Sequence
  Synthetic
tggccaccgagggtct

SEQ ID NO: 32171 - DNA, 16 bp, Artificial Sequence
  Synthetic
gggccctggatctgct

SEQ ID NO: 32172 - DNA, 16 bp, Artificial Sequence
  Synthetic
gagccccgctacacct

SEQ ID NO: 32173 - DNA, 16 bp, Artificial Sequence
  Synthetic
aggcctcgcacgagac

SEQ ID NO: 32174 - DNA, 18 bp, Artificial Sequence
  Synthetic
cttgggcatcatgcaggg

SEQ ID NO: 32175 - DNA, 19 bp, Artificial Sequence
  Synthetic
atgttcagggccatgtacg

SEQ ID NO: 32176 - DNA, 19 bp, Artificial Sequence
  Synthetic
ccgccacctcattctgaaa

SEQ ID NO: 32177 - DNA, 23 bp, Artificial Sequence
  Synthetic
accctgtccaaattaaacttaaa

SEQ ID NO: 32178 - DNA, 18 bp, Artificial Sequence
  Synthetic
gacttgcaacaggtgtct

SEQ ID NO: 32179 - DNA, 18 bp, Artificial Sequence
  Synthetic
ctactatgccactgtccc

SEQ ID NO: 32180 - DNA, 18 bp, Artificial Sequence
  Synthetic
aaagtttctgcagctgct

SEQ ID NO: 32181 - DNA, 20 bp, Artificial Sequence
  Synthetic
gagtcattaacctttcctgc

SEQ ID NO: 32182 - DNA, 18 bp, Artificial Sequence
  Synthetic
cttggcaggaatggagtc

SEQ ID NO: 32183 - DNA, 23 bp, Artificial Sequence
  Synthetic
acagtaatttctggttgatcaat

SEQ ID NO: 32184 - DNA, 23 bp, Artificial Sequence
  Synthetic
agtctggatttcttgttgaaact

SEQ ID NO: 32185 - DNA, 18 bp, Artificial Sequence
  Synthetic
ccttaggaactgcaacct

SEQ ID NO: 32186 - DNA, 25 bp, Artificial Sequence
  Synthetic
gatctccataaatatctttggtcat

SEQ ID NO: 32187 - DNA, 19 bp, Artificial Sequence
  Synthetic
ttcagcagacagtttctct

SEQ ID NO: 32188 - DNA, 18 bp, Artificial Sequence
  Synthetic
tttggcgcctttaggaac

SEQ ID NO: 32189 - DNA, 19 bp, Artificial Sequence
  Synthetic
tagttttccgttgtggctg

SEQ ID NO: 32190 - DNA, 19 bp, Artificial Sequence
  Synthetic
tttggttgtgttgtggttg

SEQ ID NO: 32191 - DNA, 22 bp, Artificial Sequence
  Synthetic
cactacagagacataagcattt

SEQ ID NO: 32192 - DNA, 19 bp, Artificial Sequence
  Synthetic
ctgtttatagctcccaggg

SEQ ID NO: 32193 - DNA, 21 bp, Artificial Sequence
  Synthetic
tttgtgtgcttttttgatccg

SEQ ID NO: 32194 - DNA, 21 bp, Artificial Sequence
  Synthetic
agatccattagaacacatcca

SEQ ID NO: 32195 - DNA, 25 bp, Artificial Sequence
  Synthetic
catggcaccttatatatttatgtct

SEQ ID NO: 32196 - DNA, 21 bp, Artificial Sequence
  Synthetic
gctgttccttctacagtttct

SEQ ID NO: 32197 - DNA, 18 bp, Artificial Sequence
  Synthetic
acaagctcttgcagttct

SEQ ID NO: 32198 - DNA, 21 bp, Artificial Sequence
  Synthetic
gcttctaacgataaccaagca

SEQ ID NO: 32199 - DNA, 22 bp, Artificial Sequence
  Synthetic
ggggactgatatactttcgttt

SEQ ID NO: 32200 - DNA, 21 bp, Artificial Sequence
  Synthetic
gcctctttaaacttagccatt

SEQ ID NO: 32201 - DNA, 21 bp, Artificial Sequence
  Synthetic
ggaggctcacttaataattgc

SEQ ID NO: 32202 - DNA, 22 bp, Artificial Sequence
  Synthetic
ttttactagtctggcttgactg

SEQ ID NO: 32203 - DNA, 18 bp, Artificial Sequence
  Synthetic
cagtgcattgaaacgtgc

SEQ ID NO: 32204 - DNA, 19 bp, Artificial Sequence
  Synthetic
gctgatctttgaaggcttt

SEQ ID NO: 32205 - DNA, 20 bp, Artificial Sequence
  Synthetic
aggcttttcgttggtatcgt

SEQ ID NO: 32206 - DNA, 17 bp, Artificial Sequence
  Synthetic
aagcagtccctcctcgg

SEQ ID NO: 32207 - DNA, 20 bp, Artificial Sequence
  Synthetic
atgaattgttgtctgtgctc

SEQ ID NO: 32208 - DNA, 24 bp, Artificial Sequence
  Synthetic
gctccactttattaattacatctg

SEQ ID NO: 32209 - DNA, 20 bp, Artificial Sequence
  Synthetic
tgacaatactgggtgctgtg

SEQ ID NO: 32210 - DNA, 23 bp, Artificial Sequence
  Synthetic
cagaaataatttgaaaagctgga

SEQ ID NO: 32211 - DNA, 18 bp, Artificial Sequence
  Synthetic
agaaatgaacctgtgcgc

SEQ ID NO: 32212 - DNA, 23 bp, Artificial Sequence
  Synthetic
cctcatctaacagtaagtcttca

SEQ ID NO: 32213 - DNA, 18 bp, Artificial Sequence
  Synthetic
ggcccgatactgattacc

SEQ ID NO: 32214 - DNA, 19 bp, Artificial Sequence
  Synthetic
gtacctgtttggggtcaaa

SEQ ID NO: 32215 - DNA, 24 bp, Artificial Sequence
  Synthetic
cctattaaacaattgagcatctga

SEQ ID NO: 32216 - DNA, 20 bp, Artificial Sequence
  Synthetic
gtttttgcctagtggggaat

SEQ ID NO: 32217 - DNA, 18 bp, Artificial Sequence
  Synthetic
aacgaggcaaactttcct

SEQ ID NO: 32218 - DNA, 19 bp, Artificial Sequence
  Synthetic
cgtgcttgtcttaggagat

SEQ ID NO: 32219 - DNA, 25 bp, Artificial Sequence
  Synthetic
caaactattttttcttcttagcagg

SEQ ID NO: 32220 - DNA, 19 bp, Artificial Sequence
  Synthetic
ccggaatcatagcttacct

SEQ ID NO: 32221 - DNA, 18 bp, Artificial Sequence
  Synthetic
caataccaacacccccac

SEQ ID NO: 32222 - DNA, 18 bp, Artificial Sequence
  Synthetic
tcttaatgcactgcgtgt

SEQ ID NO: 32223 - DNA, 22 bp, Artificial Sequence
  Synthetic
cggctacttagaaaatcatcga

SEQ ID NO: 32224 - DNA, 20 bp, Artificial Sequence
  Synthetic
tttctgcttgttgtgcataa

SEQ ID NO: 32225 - DNA, 18 bp, Artificial Sequence
  Synthetic
tagctctcgaatcgcttg

SEQ ID NO: 32226 - DNA, 18 bp, Artificial Sequence
  Synthetic
aaatccttgcagagctcc

SEQ ID NO: 32227 - DNA, 18 bp, Artificial Sequence
  Synthetic
tcatagctgcagccaatt

SEQ ID NO: 32228 - DNA, 22 bp, Artificial Sequence
  Synthetic
ccacaataaaggatctagctct

SEQ ID NO: 32229 - DNA, 21 bp, Artificial Sequence
  Synthetic
agggactttagatccttttgc

SEQ ID NO: 32230 - DNA, 20 bp, Artificial Sequence
  Synthetic
gtcatcaagacctgatcctt

SEQ ID NO: 32231 - DNA, 21 bp, Artificial Sequence
  Synthetic
gtcaaattgcattacaacgaa

SEQ ID NO: 32232 - DNA, 21 bp, Artificial Sequence
  Synthetic
aatgcgactaattttcacagc

SEQ ID NO: 32233 - DNA, 22 bp, Artificial Sequence
  Synthetic
gctaaacagtaatctcctccat

SEQ ID NO: 32234 - DNA, 18 bp, Artificial Sequence
  Synthetic
tcaaaaggaagcattcgc

SEQ ID NO: 32235 - DNA, 20 bp, Artificial Sequence
  Synthetic
ttactcgtttagcctcttca

SEQ ID NO: 32236 - DNA, 18 bp, Artificial Sequence
  Synthetic
atccggttttgcaaatgg

SEQ ID NO: 32237 - DNA, 20 bp, Artificial Sequence
  Synthetic
accacagaggaatctcaaac

SEQ ID NO: 32238 - DNA, 18 bp, Artificial Sequence
  Synthetic
aatgggacgagctgctag

SEQ ID NO: 32239 - DNA, 19 bp, Artificial Sequence
  Synthetic
gttaccggattgcatcact

SEQ ID NO: 32240 - DNA, 18 bp, Artificial Sequence
  Synthetic
agctaaagtgatggcctc

SEQ ID NO: 32241 - DNA, 21 bp, Artificial Sequence
  Synthetic
gctctactaatgagaaagcca

SEQ ID NO: 32242 - DNA, 18 bp, Artificial Sequence
  Synthetic
atacttgcggtctggcta

SEQ ID NO: 32243 - DNA, 19 bp, Artificial Sequence
  Synthetic
gagttgaactgaggcaaga

SEQ ID NO: 32244 - DNA, 18 bp, Artificial Sequence
  Synthetic
gtagggaagacaagcctc

SEQ ID NO: 32245 - DNA, 23 bp, Artificial Sequence
  Synthetic
gggaactttatgaatcaggaaat

SEQ ID NO: 32246 - DNA, 23 bp, Artificial Sequence
  Synthetic
ggtttcctgtagaaaattttccg

SEQ ID NO: 32247 - DNA, 21 bp, Artificial Sequence
  Synthetic
aaggaatccatagataggtcc

SEQ ID NO: 32248 - DNA, 18 bp, Artificial Sequence
  Synthetic
gaacagccagtgacaaag

SEQ ID NO: 32249 - DNA, 18 bp, Artificial Sequence
  Synthetic
accgccatttatgaagcc

SEQ ID NO: 32250 - DNA, 18 bp, Artificial Sequence
  Synthetic
cctaacgtgacagagtcg

SEQ ID NO: 32251 - DNA, 18 bp, Artificial Sequence
  Synthetic
tggccctttgtaatgtgc

SEQ ID NO: 32252 - DNA, 19 bp, Artificial Sequence
  Synthetic
tcgaggagatgtacttgga

SEQ ID NO: 32253 - DNA, 18 bp, Artificial Sequence
  Synthetic
gtcgctcaggatgtcatt

SEQ ID NO: 32254 - DNA, 19 bp, Artificial Sequence
  Synthetic
gccctatggtagtagatgc

SEQ ID NO: 32255 - DNA, 20 bp, Artificial Sequence
  Synthetic
aagagtgatcagcaaattcg

SEQ ID NO: 32256 - DNA, 20 bp, Artificial Sequence
  Synthetic
tgctgtttacgttttgcaaa

SEQ ID NO: 32257 - DNA, 25 bp, Artificial Sequence
  Synthetic
gtcttagagatactaaagaaacgat

SEQ ID NO: 32258 - DNA, 20 bp, Artificial Sequence
  Synthetic
ttcaataactcgtgttggac

SEQ ID NO: 32259 - DNA, 22 bp, Artificial Sequence
  Synthetic
aattctctgaagataaagaggc

SEQ ID NO: 32260 - DNA, 20 bp, Artificial Sequence
  Synthetic
atttcaagaatgtcggcaat

SEQ ID NO: 32261 - DNA, 20 bp, Artificial Sequence
  Synthetic
tatcaccagaaatcggagaa

SEQ ID NO: 32262 - DNA, 19 bp, Artificial Sequence
  Synthetic
aaggttgttttgccagatc

SEQ ID NO: 32263 - DNA, 21 bp, Artificial Sequence
  Synthetic
tttctttgaagggctttttgg

SEQ ID NO: 32264 - DNA, 18 bp, Artificial Sequence
  Synthetic
ggctgttgtccatatgcg

SEQ ID NO: 32265 - DNA, 22 bp, Artificial Sequence
  Synthetic
attttcttttgtacctgcagta

SEQ ID NO: 32266 - DNA, 21 bp, Artificial Sequence
  Synthetic
cctcagactataacaaaggct

SEQ ID NO: 32267 - DNA, 20 bp, Artificial Sequence
  Synthetic
tgaaaaaaagcataggcctt

SEQ ID NO: 32268 - DNA, 20 bp, Artificial Sequence
  Synthetic
gttgtattaggggttgcatt

SEQ ID NO: 32269 - DNA, 20 bp, Artificial Sequence
  Synthetic
aaacgatctgaaagaaggtg

SEQ ID NO: 32270 - DNA, 19 bp, Artificial Sequence
  Synthetic
ggtttgggagagatgagat

SEQ ID NO: 32271 - DNA, 19 bp, Artificial Sequence
  Synthetic
cctttattacagcgtgtgc

SEQ ID NO: 32272 - DNA, 21 bp, Artificial Sequence
  Synthetic
tctgcaggtagaaatcatgaa

SEQ ID NO: 32273 - DNA, 19 bp, Artificial Sequence
  Synthetic
ttgcgagagaagttctgtt

SEQ ID NO: 32274 - DNA, 22 bp, Artificial Sequence
  Synthetic
gggaactacaaaaaagatagcc

SEQ ID NO: 32275 - DNA, 20 bp, Artificial Sequence
  Synthetic
ggtagtcagaaaggaatccc

SEQ ID NO: 32276 - DNA, 21 bp, Artificial Sequence
  Synthetic
ttagaggtacgctttgcttta

SEQ ID NO: 32277 - DNA, 18 bp, Artificial Sequence
  Synthetic
atatcgttgttggcggga

SEQ ID NO: 32278 - DNA, 21 bp, Artificial Sequence
  Synthetic
tatcccatttcccataggtgt

SEQ ID NO: 32279 - DNA, 19 bp, Artificial Sequence
  Synthetic
cttggccagagaagttctc

SEQ ID NO: 32280 - DNA, 19 bp, Artificial Sequence
  Synthetic
tgtgggccttaaaagcaat

SEQ ID NO: 32281 - DNA, 20 bp, Artificial Sequence
  Synthetic
cggataaggcaatgaaacga

SEQ ID NO: 32282 - DNA, 19 bp, Artificial Sequence
  Synthetic
atacgttaagcagtctggt

SEQ ID NO: 32283 - DNA, 21 bp, Artificial Sequence
  Synthetic
aaaagcaagaaaaaaccacag

SEQ ID NO: 32284 - DNA, 22 bp, Artificial Sequence
  Synthetic
aacaaaacgtctaagtcaagaa

SEQ ID NO: 32285 - DNA, 18 bp, Artificial Sequence
  Synthetic
ttcggtgatccatgagac

SEQ ID NO: 32286 - DNA, 19 bp, Artificial Sequence
  Synthetic
ttcagctccaaatggtctt

SEQ ID NO: 32287 - DNA, 18 bp, Artificial Sequence
  Synthetic
cggatcagcgaacgattt

SEQ ID NO: 32288 - DNA, 19 bp, Artificial Sequence
  Synthetic
atacgctggtgaaagatgt

SEQ ID NO: 32289 - DNA, 22 bp, Artificial Sequence
  Synthetic
cggaatttctgtgatttcatct

SEQ ID NO: 32290 - DNA, 20 bp, Artificial Sequence
  Synthetic
tcaaaagtcctgaacgtact

SEQ ID NO: 32291 - DNA, 19 bp, Artificial Sequence
  Synthetic
gtttcttgcccaccttagt

SEQ ID NO: 32292 - DNA, 21 bp, Artificial Sequence
  Synthetic
gttcatgacaggatttcttca

SEQ ID NO: 32293 - DNA, 18 bp, Artificial Sequence
  Synthetic
aagggagatgtaggtcgg

SEQ ID NO: 32294 - DNA, 18 bp, Artificial Sequence
  Synthetic
taagggagcaacgtttgt

SEQ ID NO: 32295 - DNA, 18 bp, Artificial Sequence
  Synthetic
tgtaatggatgcaggtgc

SEQ ID NO: 32296 - DNA, 19 bp, Artificial Sequence
  Synthetic
gcaggattgatgagaaacc

SEQ ID NO: 32297 - DNA, 20 bp, Artificial Sequence
  Synthetic
agggattatgagtagatcgc

SEQ ID NO: 32298 - DNA, 18 bp, Artificial Sequence
  Synthetic
agaggacgatcggaagtt

SEQ ID NO: 32299 - DNA, 18 bp, Artificial Sequence
  Synthetic
actttcgttgcggtagac

SEQ ID NO: 32300 - DNA, 19 bp, Artificial Sequence
  Synthetic
gagcaagtaatcgcacatc

SEQ ID NO: 32301 - DNA, 19 bp, Artificial Sequence
  Synthetic
aagagggagagagatggat

SEQ ID NO: 32302 - DNA, 18 bp, Artificial Sequence
  Synthetic
aacagaaagccgatgagt

SEQ ID NO: 32303 - DNA, 19 bp, Artificial Sequence
  Synthetic
gtcggagggttatttgttg

SEQ ID NO: 32304 - DNA, 24 bp, Artificial Sequence
  Synthetic
tctttaagaactttatattccggc

SEQ ID NO: 32305 - DNA, 19 bp, Artificial Sequence
  Synthetic
ccaagaattctccttgcgt

SEQ ID NO: 32306 - DNA, 18 bp, Artificial Sequence
  Synthetic
tttagctgggcgaatctc

SEQ ID NO: 32307 - DNA, 19 bp, Artificial Sequence
  Synthetic
agcttctgcagtttctgta

SEQ ID NO: 32308 - DNA, 23 bp, Artificial Sequence
  Synthetic
tcagaaaataaagaacgatggtt

SEQ ID NO: 32309 - DNA, 21 bp, Artificial Sequence
  Synthetic
ttctaaagagatagaaacgcg

SEQ ID NO: 32310 - DNA, 18 bp, Artificial Sequence
  Synthetic
cggcttcttcgatagtcg

SEQ ID NO: 32311 - DNA, 21 bp, Artificial Sequence
  Synthetic
cgatgtttttgtgtacgatgt

SEQ ID NO: 32312 - DNA, 20 bp, Artificial Sequence
  Synthetic
caagacctaccagaaagact

SEQ ID NO: 32313 - DNA, 22 bp, Artificial Sequence
  Synthetic
atacgagagactattgaaaagc

SEQ ID NO: 32314 - DNA, 19 bp, Artificial Sequence
  Synthetic
cccaaagcagataggaagc

SEQ ID NO: 32315 - DNA, 21 bp, Artificial Sequence
  Synthetic
atttgcatttccagttggtag

SEQ ID NO: 32316 - DNA, 18 bp, Artificial Sequence
  Synthetic
tactgaaccctgccatga

SEQ ID NO: 32317 - DNA, 18 bp, Artificial Sequence
  Synthetic
tctcttgcggttttcgtt

SEQ ID NO: 32318 - DNA, 18 bp, Artificial Sequence
  Synthetic
atgtgatatgtggctcgc

SEQ ID NO: 32319 - DNA, 20 bp, Artificial Sequence
  Synthetic
gttacagtctgtgtttgcac

SEQ ID NO: 32320 - DNA, 18 bp, Artificial Sequence
  Synthetic
gacttcgaaccctccttt

SEQ ID NO: 32321 - DNA, 18 bp, Artificial Sequence
  Synthetic
tctttcgccgtaagaacc

SEQ ID NO: 32322 - DNA, 21 bp, Artificial Sequence
  Synthetic
gatgaagagctttctttctcg

SEQ ID NO: 32323 - DNA, 19 bp, Artificial Sequence
  Synthetic
accgcttcttatcttcgat

SEQ ID NO: 32324 - DNA, 18 bp, Artificial Sequence
  Synthetic
aatcaccatggctccttc

SEQ ID NO: 32325 - DNA, 18 bp, Artificial Sequence
  Synthetic
ggaaagcacttcgttagc

SEQ ID NO: 32326 - DNA, 20 bp, Artificial Sequence
  Synthetic
ttcctttctccttgggaaat

SEQ ID NO: 32327 - DNA, 20 bp, Artificial Sequence
  Synthetic
atacactaccaggtcctagt

SEQ ID NO: 32328 - DNA, 19 bp, Artificial Sequence
  Synthetic
caaaaaagagcaccgagaa

SEQ ID NO: 32329 - DNA, 20 bp, Artificial Sequence
  Synthetic
gtctgattgtcaatgtgctt

SEQ ID NO: 32330 - DNA, 21 bp, Artificial Sequence
  Synthetic
ccttagggatatacacgaacg

SEQ ID NO: 32331 - DNA, 21 bp, Artificial Sequence
  Synthetic
tctagctcttccataagatgc

SEQ ID NO: 32332 - DNA, 21 bp, Artificial Sequence
  Synthetic
ttttgccgtatagaacaccaa

SEQ ID NO: 32333 - DNA, 21 bp, Artificial Sequence
  Synthetic
cgagagaaacagttacggaat

SEQ ID NO: 32334 - DNA, 18 bp, Artificial Sequence
  Synthetic
gacatgttgaggccagtt

SEQ ID NO: 32335 - DNA, 18 bp, Artificial Sequence
  Synthetic
aattgcatgacccagtcc

SEQ ID NO: 32336 - DNA, 20 bp, Artificial Sequence
  Synthetic
agttctccatccaaatagct

SEQ ID NO: 32337 - DNA, 19 bp, Artificial Sequence
  Synthetic
cacagcaataatggtctgc

SEQ ID NO: 32338 - DNA, 20 bp, Artificial Sequence
  Synthetic
ttgaacgacgtgtaatcttg

SEQ ID NO: 32339 - DNA, 20 bp, Artificial Sequence
  Synthetic
ggactgaaacaatactaccg

SEQ ID NO: 32340 - DNA, 19 bp, Artificial Sequence
  Synthetic
ccggcaaaaatgatctcat

SEQ ID NO: 32341 - DNA, 22 bp, Artificial Sequence
  Synthetic
tctgtagttatggataagacgg

SEQ ID NO: 32342 - DNA, 20 bp, Artificial Sequence
  Synthetic
acctatcacacaaccattct

SEQ ID NO: 32343 - DNA, 22 bp, Artificial Sequence
  Synthetic
gattaggatttgatggctcttc

SEQ ID NO: 32344 - DNA, 19 bp, Artificial Sequence
  Synthetic
tcgaatgtaatacggcaga

SEQ ID NO: 32345 - DNA, 18 bp, Artificial Sequence
  Synthetic
ccttctcttgttcccacc

SEQ ID NO: 32346 - DNA, 18 bp, Artificial Sequence
  Synthetic
acgccagatcagcttaaa

SEQ ID NO: 32347 - DNA, 20 bp, Artificial Sequence
  Synthetic
atcctacaactctctcctcc

SEQ ID NO: 32348 - DNA, 18 bp, Artificial Sequence
  Synthetic
gtcttatcgacacacccg

SEQ ID NO: 32349 - DNA, 22 bp, Artificial Sequence
  Synthetic
aaagagcatatactaacaggcg

SEQ ID NO: 32350 - DNA, 19 bp, Artificial Sequence
  Synthetic
ggaacagcatctaaagcag

SEQ ID NO: 32351 - DNA, 19 bp, Artificial Sequence
  Synthetic
tcataaacagcactgccaa

SEQ ID NO: 32352 - DNA, 20 bp, Artificial Sequence
  Synthetic
actctacaatagctctgctc

SEQ ID NO: 32353 - DNA, 22 bp, Artificial Sequence
  Synthetic
cccaatagctaaggtaacaatc

SEQ ID NO: 32354 - DNA, 23 bp, Artificial Sequence
  Synthetic
gatcgttttgtagaggaaactac

SEQ ID NO: 32355 - DNA, 20 bp, Artificial Sequence
  Synthetic
ggcacatacgaagaaatcct

SEQ ID NO: 32356 - DNA, 19 bp, Artificial Sequence
  Synthetic
ctatccgcaactcatggaa

SEQ ID NO: 32357 - DNA, 21 bp, Artificial Sequence
  Synthetic
gcgaagagaaagtatcgtaga

SEQ ID NO: 32358 - DNA, 19 bp, Artificial Sequence
  Synthetic
gagatgtccaagaagcact

SEQ ID NO: 32359 - DNA, 22 bp, Artificial Sequence
  Synthetic
ccaagtagtgatacaaagaggg

SEQ ID NO: 32360 - DNA, 20 bp, Artificial Sequence
  Synthetic
aataggaagagacaaccctg

SEQ ID NO: 32361 - DNA, 18 bp, Artificial Sequence
  Synthetic
atcgctaatcctgcacca

SEQ ID NO: 32362 - DNA, 22 bp, Artificial Sequence
  Synthetic
gggtaagtctaaaaattggctc

SEQ ID NO: 32363 - DNA, 23 bp, Artificial Sequence
  Synthetic
tctacttcttttccattgtaagc

SEQ ID NO: 32364 - DNA, 18 bp, Artificial Sequence
  Synthetic
gatccacgacttcctgga

SEQ ID NO: 32365 - DNA, 22 bp, Artificial Sequence
  Synthetic
cacaacttctttaactacctga

SEQ ID NO: 32366 - DNA, 20 bp, Artificial Sequence
  Synthetic
gttcagcattcagacgatag

SEQ ID NO: 32367 - DNA, 18 bp, Artificial Sequence
  Synthetic
agaatgctgcttatgcct

SEQ ID NO: 32368 - DNA, 18 bp, Artificial Sequence
  Synthetic
tacgcccccctaaactag

SEQ ID NO: 32369 - DNA, 18 bp, Artificial Sequence
  Synthetic
ctcccaggaaaagaaggg

SEQ ID NO: 32370 - DNA, 18 bp, Artificial Sequence
  Synthetic
agctaaacaagggcgtag

SEQ ID NO: 32371 - DNA, 21 bp, Artificial Sequence
  Synthetic
aaaacatttaaccaactccct

SEQ ID NO: 32372 - DNA, 19 bp, Artificial Sequence
  Synthetic
actcactacccaagtcagt

SEQ ID NO: 32373 - DNA, 18 bp, Artificial Sequence
  Synthetic
ttggcaatggctcaccta

SEQ ID NO: 32374 - DNA, 19 bp, Artificial Sequence
  Synthetic
ccatctgtaaagcttcgct

SEQ ID NO: 32375 - DNA, 21 bp, Artificial Sequence
  Synthetic
accagttcctttatctccatc

SEQ ID NO: 32376 - DNA, 18 bp, Artificial Sequence
  Synthetic
caagagactcggggagtg

SEQ ID NO: 32377 - DNA, 18 bp, Artificial Sequence
  Synthetic
ggttagcgcattaacagc

SEQ ID NO: 32378 - DNA, 20 bp, Artificial Sequence
  Synthetic
tggagagtagaatagcgaac

SEQ ID NO: 32379 - DNA, 20 bp, Artificial Sequence
  Synthetic
gattttgggattctctagcg

SEQ ID NO: 32380 - DNA, 22 bp, Artificial Sequence
  Synthetic
tcttggtgttattttacccatt

SEQ ID NO: 32381 - DNA, 21 bp, Artificial Sequence
  Synthetic
ccatcattagcgatattccct

SEQ ID NO: 32382 - DNA, 18 bp, Artificial Sequence
  Synthetic
cgcggtcatgatagaaga

SEQ ID NO: 32383 - DNA, 19 bp, Artificial Sequence
  Synthetic
cacaatcggtaatcccact

SEQ ID NO: 32384 - DNA, 22 bp, Artificial Sequence
  Synthetic
cggtaaaaatcacagatccatt

SEQ ID NO: 32385 - DNA, 18 bp, Artificial Sequence
  Synthetic
gcctgtgatatcgcttct

SEQ ID NO: 32386 - DNA, 21 bp, Artificial Sequence
  Synthetic
tagggatctctctctaagact

SEQ ID NO: 32387 - DNA, 24 bp, Artificial Sequence
  Synthetic
attctctctattgttaagctgttc

SEQ ID NO: 32388 - DNA, 18 bp, Artificial Sequence
  Synthetic
gtgcgaacaagagctctt

SEQ ID NO: 32389 - DNA, 18 bp, Artificial Sequence
  Synthetic
ctttgtgcagctgtttga

SEQ ID NO: 32390 - DNA, 18 bp, Artificial Sequence
  Synthetic
gcacagaaaatgcaggtt

SEQ ID NO: 32391 - DNA, 23 bp, Artificial Sequence
  Synthetic
taatggttccattggaatgtttg

SEQ ID NO: 32392 - DNA, 21 bp, Artificial Sequence
  Synthetic
acagtaaagcaagaaccattt

SEQ ID NO: 32393 - DNA, 23 bp, Artificial Sequence
  Synthetic
actgcatatgtatcctatctgat

SEQ ID NO: 32394 - DNA, 21 bp, Artificial Sequence
  Synthetic
cctgaccactcatttattcct

SEQ ID NO: 32395 - DNA, 21 bp, Artificial Sequence
  Synthetic
gctctatgctgacaaaatgac

SEQ ID NO: 32396 - DNA, 20 bp, Artificial Sequence
  Synthetic
agccaatccatgtactttga

SEQ ID NO: 32397 - DNA, 23 bp, Artificial Sequence
  Synthetic
cagttcataaatgtttttctgga

SEQ ID NO: 32398 - DNA, 18 bp, Artificial Sequence
  Synthetic
gggttggaagtgtgaaga

SEQ ID NO: 32399 - DNA, 23 bp, Artificial Sequence
  Synthetic
gcttcttactgaatatcttccag

SEQ ID NO: 32400 - DNA, 21 bp, Artificial Sequence
  Synthetic
aatttgggaggaaggaggtat

SEQ ID NO: 32401 - DNA, 21 bp, Artificial Sequence
  Synthetic
ttctacttccaagcagatagc

SEQ ID NO: 32402 - DNA, 23 bp, Artificial Sequence
  Synthetic
gctctatttgttatttctgaagc

SEQ ID NO: 32403 - DNA, 18 bp, Artificial Sequence
  Synthetic
ccagagatcaccaaagct

SEQ ID NO: 32404 - DNA, 19 bp, Artificial Sequence
  Synthetic
aatctgttcacaagtggca

SEQ ID NO: 32405 - DNA, 19 bp, Artificial Sequence
  Synthetic
gcatctgcactcccattcg

SEQ ID NO: 32406 - DNA, 23 bp, Artificial Sequence
  Synthetic
cctcacaaaaattacaatgcaat

SEQ ID NO: 32407 - DNA, 21 bp, Artificial Sequence
  Synthetic
cacacgaggaaactatcttgt

SEQ ID NO: 32408 - DNA, 18 bp, Artificial Sequence
  Synthetic
ctcctctctctcctgcag

SEQ ID NO: 32409 - DNA, 18 bp, Artificial Sequence
  Synthetic
ttttgaccccggtacctc

SEQ ID NO: 32410 - DNA, 23 bp, Artificial Sequence
  Synthetic
ctacttaaatcaaattgctgtgt

SEQ ID NO: 32411 - DNA, 18 bp, Artificial Sequence
  Synthetic
aacacctgctcctgtctt

SEQ ID NO: 32412 - DNA, 19 bp, Artificial Sequence
  Synthetic
ggtccctttcttcttcgga

SEQ ID NO: 32413 - DNA, 18 bp, Artificial Sequence
  Synthetic
tgactgtgaggagggtcc

SEQ ID NO: 32414 - DNA, 19 bp, Artificial Sequence
  Synthetic
cttcccacttgctcaggtg

SEQ ID NO: 32415 - DNA, 22 bp, Artificial Sequence
  Synthetic
cgccctttggtaatttcataat

SEQ ID NO: 32416 - DNA, 22 bp, Artificial Sequence
  Synthetic
gttgactctgttaaaggtatga

SEQ ID NO: 32417 - DNA, 22 bp, Artificial Sequence
  Synthetic
ggttgagtatcaatactgctaa

SEQ ID NO: 32418 - DNA, 22 bp, Artificial Sequence
  Synthetic
cctttgaacaaattcatccgta

SEQ ID NO: 32419 - DNA, 19 bp, Artificial Sequence
  Synthetic
gcctttccttgtctggatt

SEQ ID NO: 32420 - DNA, 22 bp, Artificial Sequence
  Synthetic
tccatcagagataacagtgttt

SEQ ID NO: 32421 - DNA, 22 bp, Artificial Sequence
  Synthetic
gtcttcatttacaactgcatct

SEQ ID NO: 32422 - DNA, 24 bp, Artificial Sequence
  Synthetic
gtattcctggtattatcacaaact

SEQ ID NO: 32423 - DNA, 20 bp, Artificial Sequence
  Synthetic
ccgtatttgttgatcttcga

SEQ ID NO: 32424 - DNA, 19 bp, Artificial Sequence
  Synthetic
acatacctaagggggttgt

SEQ ID NO: 32425 - DNA, 18 bp, Artificial Sequence
  Synthetic
aaacatgtccaaaaccgc

SEQ ID NO: 32426 - DNA, 23 bp, Artificial Sequence
  Synthetic
cacaggttcttttataacaacag

SEQ ID NO: 32427 - DNA, 18 bp, Artificial Sequence
  Synthetic
aggcaaaacacctgaaga

SEQ ID NO: 32428 - DNA, 23 bp, Artificial Sequence
  Synthetic
cgccgcatattaaaataatcaat

SEQ ID NO: 32429 - DNA, 23 bp, Artificial Sequence
  Synthetic
tcataaacatctaatggcaattg

SEQ ID NO: 32430 - DNA, 18 bp, Artificial Sequence
  Synthetic
atgtaacacgccttccag

SEQ ID NO: 32431 - DNA, 21 bp, Artificial Sequence
  Synthetic
catcatccaaagtgtcctcta

SEQ ID NO: 32432 - DNA, 23 bp, Artificial Sequence
  Synthetic
tcacatttaatgcatttccagta

SEQ ID NO: 32433 - DNA, 23 bp, Artificial Sequence
  Synthetic
acagtcatagttgttaagatgtt

SEQ ID NO: 32434 - DNA, 19 bp, Artificial Sequence
  Synthetic
gttcgtgcatcatcatcaa

SEQ ID NO: 32435 - DNA, 22 bp, Artificial Sequence
  Synthetic
acagcctttaaatcttcactag

SEQ ID NO: 32436 - DNA, 18 bp, Artificial Sequence
  Synthetic
cacctttggccaaaacca

SEQ ID NO: 32437 - DNA, 21 bp, Artificial Sequence
  Synthetic
tggtacatcaaatcgtacaca

SEQ ID NO: 32438 - DNA, 25 bp, Artificial Sequence
  Synthetic
ccactcagtaatcttatattcaaca

SEQ ID NO: 32439 - DNA, 23 bp, Artificial Sequence
  Synthetic
atgacactatcttcaaccttaaa

SEQ ID NO: 32440 - DNA, 21 bp, Artificial Sequence
  Synthetic
caacatgcctaaacaagctaa

SEQ ID NO: 32441 - DNA, 20 bp, Artificial Sequence
  Synthetic
cgcatagaacaaccaacttg

SEQ ID NO: 32442 - DNA, 19 bp, Artificial Sequence
  Synthetic
gcaccccctttaagactaa

SEQ ID NO: 32443 - DNA, 18 bp, Artificial Sequence
  Synthetic
cagaggaaagcacacagc

SEQ ID NO: 32444 - DNA, 18 bp, Artificial Sequence
  Synthetic
aagcacccaagaaccatt

SEQ ID NO: 32445 - DNA, 21 bp, Artificial Sequence
  Synthetic
cttgaaacacaaaaagcatca

SEQ ID NO: 32446 - DNA, 21 bp, Artificial Sequence
  Synthetic
caacacatggttctaccttag

SEQ ID NO: 32447 - DNA, 21 bp, Artificial Sequence
  Synthetic
gtaccagtatgacaaccagta

SEQ ID NO: 32448 - DNA, 21 bp, Artificial Sequence
  Synthetic
cataatctgacgtccttggaa

SEQ ID NO: 32449 - DNA, 22 bp, Artificial Sequence
  Synthetic
tgccataaataacttcatcagt

SEQ ID NO: 32450 - DNA, 19 bp, Artificial Sequence
  Synthetic
aagccccaataacagctaa

SEQ ID NO: 32451 - DNA, 20 bp, Artificial Sequence
  Synthetic
agtgctacaataatgccaca

SEQ ID NO: 32452 - DNA, 24 bp, Artificial Sequence
  Synthetic
cgttcataagcagatttagcaata

SEQ ID NO: 32453 - DNA, 20 bp, Artificial Sequence
  Synthetic
actagtggccagttacaatc

SEQ ID NO: 32454 - DNA, 18 bp, Artificial Sequence
  Synthetic
ggtgttcctccttgttgt

SEQ ID NO: 32455 - DNA, 19 bp, Artificial Sequence
  Synthetic
tccacaaactcgacaaaca

SEQ ID NO: 32456 - DNA, 20 bp, Artificial Sequence
  Synthetic
gtgttcagccacaaacttac

SEQ ID NO: 32457 - DNA, 19 bp, Artificial Sequence
  Synthetic
ccaatgcatgacacatggt

SEQ ID NO: 32458 - DNA, 21 bp, Artificial Sequence
  Synthetic
tgaaattttacaccgcttgtt

SEQ ID NO: 32459 - DNA, 18 bp, Artificial Sequence
  Synthetic
gttggcaggacattacgc

SEQ ID NO: 32460 - DNA, 18 bp, Artificial Sequence
  Synthetic
agcacgatcacacttagg

SEQ ID NO: 32461 - DNA, 24 bp, Artificial Sequence
  Synthetic
cgcataatcagaattataacacac

SEQ ID NO: 32462 - DNA, 25 bp, Artificial Sequence
  Synthetic
cgttctattaaaagaacactatcag

SEQ ID NO: 32463 - DNA, 18 bp, Artificial Sequence
  Synthetic
cttgcagcaaagaagagg

SEQ ID NO: 32464 - DNA, 20 bp, Artificial Sequence
  Synthetic
cgctcactaacaatctcttg

SEQ ID NO: 32465 - DNA, 23 bp, Artificial Sequence
  Synthetic
caatagaatacagcaagaccaat

SEQ ID NO: 32466 - DNA, 25 bp, Artificial Sequence
  Synthetic
gagcattaataacagaaagctcata

SEQ ID NO: 32467 - DNA, 23 bp, Artificial Sequence
  Synthetic
tgaagcgattaacatttacagaa

SEQ ID NO: 32468 - DNA, 18 bp, Artificial Sequence
  Synthetic
ataccaagacacacggct

SEQ ID NO: 32469 - DNA, 19 bp, Artificial Sequence
  Synthetic
atcaaagggatgaggtgct

SEQ ID NO: 32470 - DNA, 22 bp, Artificial Sequence
  Synthetic
ccaatatatccccactgttgaa

SEQ ID NO: 32471 - DNA, 18 bp, Artificial Sequence
  Synthetic
caactgcattcggtggat

SEQ ID NO: 32472 - DNA, 22 bp, Artificial Sequence
  Synthetic
gcatgttttaaacaaactgcac

SEQ ID NO: 32473 - DNA, 18 bp, Artificial Sequence
  Synthetic
gcttccaacacacgtcta

SEQ ID NO: 32474 - DNA, 23 bp, Artificial Sequence
  Synthetic
gcaaaataaaacacacaatcagt

SEQ ID NO: 32475 - DNA, 19 bp, Artificial Sequence
  Synthetic
gagtgtatgctggagtcat

SEQ ID NO: 32476 - DNA, 24 bp, Artificial Sequence
  Synthetic
cataactgagtatacttagcaaca

SEQ ID NO: 32477 - DNA, 18 bp, Artificial Sequence
  Synthetic
accttgggcttacacaaa

SEQ ID NO: 32478 - DNA, 20 bp, Artificial Sequence
  Synthetic
ttcctaggatgtgaggattc

SEQ ID NO: 32479 - DNA, 22 bp, Artificial Sequence
  Synthetic
tgtattcaaaacgaattcccat

SEQ ID NO: 32480 - DNA, 23 bp, Artificial Sequence
  Synthetic
gccatattcttataaacctgagt

SEQ ID NO: 32481 - DNA, 18 bp, Artificial Sequence
  Synthetic
tacggaggttgacaagca

SEQ ID NO: 32482 - DNA, 19 bp, Artificial Sequence
  Synthetic
tctttgcgatgattaccca

SEQ ID NO: 32483 - DNA, 25 bp, Artificial Sequence
  Synthetic
gtgttttacacttaatctcactcat

SEQ ID NO: 32484 - DNA, 21 bp, Artificial Sequence
  Synthetic
agttatgctggaaaaacacat

SEQ ID NO: 32485 - DNA, 21 bp, Artificial Sequence
  Synthetic
acgaaccattcaatttacacg

SEQ ID NO: 32486 - DNA, 25 bp, Artificial Sequence
  Synthetic
caaaaatattacacttgtctccttg

SEQ ID NO: 32487 - DNA, 23 bp, Artificial Sequence
  Synthetic
caacacaaccaagataactatca

SEQ ID NO: 32488 - DNA, 23 bp, Artificial Sequence
  Synthetic
gtagttcatttacttctgtgagt

SEQ ID NO: 32489 - DNA, 20 bp, Artificial Sequence
  Synthetic
ggaaatagactagcagaggt

SEQ ID NO: 32490 - DNA, 20 bp, Artificial Sequence
  Synthetic
ttggcttttgacacattcat

SEQ ID NO: 32491 - DNA, 18 bp, Artificial Sequence
  Synthetic
tcagcattacatacggcg

SEQ ID NO: 32492 - DNA, 21 bp, Artificial Sequence
  Synthetic
acatcctgtacaacagcatat

SEQ ID NO: 32493 - DNA, 23 bp, Artificial Sequence
  Synthetic
tgtgaaaccatttattactccaa

SEQ ID NO: 32494 - DNA, 20 bp, Artificial Sequence
  Synthetic
aaatctgccaaagaatagcc

SEQ ID NO: 32495 - DNA, 19 bp, Artificial Sequence
  Synthetic
ctacccctggtttgaacat

SEQ ID NO: 32496 - DNA, 18 bp, Artificial Sequence
  Synthetic
gccaggcggaaacctagt

SEQ ID NO: 32497 - DNA, 25 bp, Artificial Sequence
  Synthetic
gcttattcaaaattttctgtctgac

SEQ ID NO: 32498 - DNA, 22 bp, Artificial Sequence
  Synthetic
attcatcataccatcttgttgt

SEQ ID NO: 32499 - DNA, 23 bp, Artificial Sequence
  Synthetic
cattacaacacaaaactttcaac

SEQ ID NO: 32500 - DNA, 21 bp, Artificial Sequence
  Synthetic
cggtcaaaaatcacactgaaa

SEQ ID NO: 32501 - DNA, 18 bp, Artificial Sequence
  Synthetic
gttctcgccattttccgt

SEQ ID NO: 32502 - DNA, 20 bp, Artificial Sequence
  Synthetic
tccagaatccgctccactat

SEQ ID NO: 32503 - DNA, 23 bp, Artificial Sequence
  Synthetic
tcaagtcgattaaaaatcacact

SEQ ID NO: 32504 - DNA, 20 bp, Artificial Sequence
  Synthetic
tttctgttttggagggagtg

SEQ ID NO: 32505 - DNA, 18 bp, Artificial Sequence
  Synthetic
gctccaagaaaggacccg

SEQ ID NO: 32506 - DNA, 18 bp, Artificial Sequence
  Synthetic
ataggctgtcgtcgtccg

SEQ ID NO: 32507 - DNA, 20 bp, Artificial Sequence
  Synthetic
gcaagttccctgttgcgaaa

SEQ ID NO: 32508 - DNA, 19 bp, Artificial Sequence
  Synthetic
tatcacccacgtagagcgc

SEQ ID NO: 32509 - DNA, 20 bp, Artificial Sequence
  Synthetic
catggagtaataggccaggc

SEQ ID NO: 32510 - DNA, 20 bp, Artificial Sequence
  Synthetic
tggtgtgaagcagtacacag

SEQ ID NO: 32511 - DNA, 19 bp, Artificial Sequence
  Synthetic
cctcgcccccatagatgtt

SEQ ID NO: 32512 - DNA, 18 bp, Artificial Sequence
  Synthetic
gacctgttgacagcgcag

SEQ ID NO: 32513 - DNA, 18 bp, Artificial Sequence
  Synthetic
aggctgtaggtcaccagc

SEQ ID NO: 32514 - DNA, 18 bp, Artificial Sequence
  Synthetic
ccaacaacacctcacggc

SEQ ID NO: 32515 - DNA, 18 bp, Artificial Sequence
  Synthetic
aagagacttggcccctgg

SEQ ID NO: 32516 - DNA, 18 bp, Artificial Sequence
  Synthetic
atggagacctagcctgcg

SEQ ID NO: 32517 - DNA, 18 bp, Artificial Sequence
  Synthetic
acatcatatgcccccccg

SEQ ID NO: 32518 - DNA, 18 bp, Artificial Sequence
  Synthetic
tcgtaccatgagcagccc

SEQ ID NO: 32519 - DNA, 20 bp, Artificial Sequence
  Synthetic
gccgatatagaaggggcgta

SEQ ID NO: 32520 - DNA, 20 bp, Artificial Sequence
  Synthetic
gctgcagcaatccaaggatt

SEQ ID NO: 32521 - DNA, 19 bp, Artificial Sequence
  Synthetic
gaccctgcccaggcctata

SEQ ID NO: 32522 - DNA, 19 bp, Artificial Sequence
  Synthetic
catagtgcgtcggtgagac

SEQ ID NO: 32523 - DNA, 18 bp, Artificial Sequence
  Synthetic
acccgttcttcacatggc

SEQ ID NO: 32524 - DNA, 20 bp, Artificial Sequence
  Synthetic
ggaatgcaaccctaccatga

SEQ ID NO: 32525 - DNA, 18 bp, Artificial Sequence
  Synthetic
tgtctcagactccacccg

SEQ ID NO: 32526 - DNA, 18 bp, Artificial Sequence
  Synthetic
tggactgtgtgtcgaccc

SEQ ID NO: 32527 - DNA, 20 bp, Artificial Sequence
  Synthetic
accttcttctgacgctgaga

SEQ ID NO: 32528 - DNA, 18 bp, Artificial Sequence
  Synthetic
cccccaggtcagggtaca

SEQ ID NO: 32529 - DNA, 18 bp, Artificial Sequence
  Synthetic
agaactccactggcacgg

SEQ ID NO: 32530 - DNA, 20 bp, Artificial Sequence
  Synthetic
gttggaggagcaagatgtga

SEQ ID NO: 32531 - DNA, 21 bp, Artificial Sequence
  Synthetic
tcttgtctgctgtaattggat

SEQ ID NO: 32532 - DNA, 20 bp, Artificial Sequence
  Synthetic
ggatttatgtcaactctccg

SEQ ID NO: 32533 - DNA, 18 bp, Artificial Sequence
  Synthetic
gttttgcggaccagttct

SEQ ID NO: 32534 - DNA, 18 bp, Artificial Sequence
  Synthetic
ttgctcttctgttgggtt

SEQ ID NO: 32535 - DNA, 19 bp, Artificial Sequence
  Synthetic
ccactcactatcagctgaa

SEQ ID NO: 32536 - DNA, 18 bp, Artificial Sequence
  Synthetic
atgcttggagtcatgtcg

SEQ ID NO: 32537 - DNA, 24 bp, Artificial Sequence
  Synthetic
gaattttaacagtttcccagtttc

SEQ ID NO: 32538 - DNA, 20 bp, Artificial Sequence
  Synthetic
aaatgaggagaactgcattc

SEQ ID NO: 32539 - DNA, 20 bp, Artificial Sequence
  Synthetic
tccttgcccaattagcacat

SEQ ID NO: 32540 - DNA, 19 bp, Artificial Sequence
  Synthetic
agggtagtgccagcagtag

SEQ ID NO: 32541 - DNA, 18 bp, Artificial Sequence
  Synthetic
gtggcttccggatgcttg

SEQ ID NO: 32542 - DNA, 16 bp, Artificial Sequence
  Synthetic
gccggtggacaaggct

SEQ ID NO: 32543 - DNA, 15 bp, Artificial Sequence
  Synthetic
acgccagcaggagca

SEQ ID NO: 32544 - DNA, 20 bp, Artificial Sequence
  Synthetic
gccatttgcacgtaatgacc

SEQ ID NO: 32545 - DNA, 16 bp, Artificial Sequence
  Synthetic
attccgtcggctggcc

SEQ ID NO: 32546 - DNA, 18 bp, Artificial Sequence
  Synthetic
ggcgcacgggaatgacat

SEQ ID NO: 32547 - DNA, 16 bp, Artificial Sequence
  Synthetic
gctcttaccgctgccg

SEQ ID NO: 32548 - DNA, 18 bp, Artificial Sequence
  Synthetic
gagcacaaccagtctcgc

SEQ ID NO: 32549 - DNA, 19 bp, Artificial Sequence
  Synthetic
gccggtaaagccagtcatg

SEQ ID NO: 32550 - DNA, 19 bp, Artificial Sequence
  Synthetic
ggtgttcatgtacgctcgt

SEQ ID NO: 32551 - DNA, 18 bp, Artificial Sequence
  Synthetic
ctatgaccacgcagcctg

SEQ ID NO: 32552 - DNA, 18 bp, Artificial Sequence
  Synthetic
taccaggcagcgttgaca

SEQ ID NO: 32553 - DNA, 16 bp, Artificial Sequence
  Synthetic
acaagggctccaggcg

SEQ ID NO: 32554 - DNA, 17 bp, Artificial Sequence
  Synthetic
ccggagcatggagtggt

SEQ ID NO: 32555 - DNA, 18 bp, Artificial Sequence
  Synthetic
tgcagacaccctccacag

SEQ ID NO: 32556 - DNA, 17 bp, Artificial Sequence
  Synthetic
tcgccaaccttctcccg

SEQ ID NO: 32557 - DNA, 16 bp, Artificial Sequence
  Synthetic
aggtggtagcgggcag

SEQ ID NO: 32558 - DNA, 18 bp, Artificial Sequence
  Synthetic
cccactactgaccgtcga

SEQ ID NO: 32559 - DNA, 18 bp, Artificial Sequence
  Synthetic
gttgatgtgggctacggc

SEQ ID NO: 32560 - DNA, 19 bp, Artificial Sequence
  Synthetic
ccacgcttgcacgaggaat

SEQ ID NO: 32561 - DNA, 16 bp, Artificial Sequence
  Synthetic
tcgtcgccacacacga

SEQ ID NO: 32562 - DNA, 20 bp, Artificial Sequence
  Synthetic
cctggctatgaggacgctaa

SEQ ID NO: 32563 - DNA, 20 bp, Artificial Sequence
  Synthetic
gccgctattggagtgagttt

SEQ ID NO: 32564 - DNA, 23 bp, Artificial Sequence
  Synthetic
taattctctaagtgcaaatgctg

SEQ ID NO: 32565 - DNA, 18 bp, Artificial Sequence
  Synthetic
actacctctccagtaccc

SEQ ID NO: 32566 - DNA, 18 bp, Artificial Sequence
  Synthetic
cccttatatctgcgtggc

SEQ ID NO: 32567 - DNA, 19 bp, Artificial Sequence
  Synthetic
tggtcccgattccgtatcc

SEQ ID NO: 32568 - DNA, 18 bp, Artificial Sequence
  Synthetic
atctggctttccggtaca

SEQ ID NO: 32569 - DNA, 21 bp, Artificial Sequence
  Synthetic
ctaacagtcctattttggctt

SEQ ID NO: 32570 - DNA, 18 bp, Artificial Sequence
  Synthetic
agcattttgtcctggcac

SEQ ID NO: 32571 - DNA, 20 bp, Artificial Sequence
  Synthetic
catggtgaattactttgcct

SEQ ID NO: 32572 - DNA, 20 bp, Artificial Sequence
  Synthetic
cggggtgtgcacttctagtg

SEQ ID NO: 32573 - DNA, 21 bp, Artificial Sequence
  Synthetic
ctgtacaatacgtgtcacaat

SEQ ID NO: 32574 - DNA, 18 bp, Artificial Sequence
  Synthetic
gaacataccccgtgcgac

SEQ ID NO: 32575 - DNA, 19 bp, Artificial Sequence
  Synthetic
gaacttctacaagggacgg

SEQ ID NO: 32576 - DNA, 21 bp, Artificial Sequence
  Synthetic
tatccctctgtaaaagcaaca

SEQ ID NO: 32577 - DNA, 25 bp, Artificial Sequence
  Synthetic
acatctaccttattgttacttgact

SEQ ID NO: 32578 - DNA, 19 bp, Artificial Sequence
  Synthetic
tcttgcaaacagttgttcc

SEQ ID NO: 32579 - DNA, 20 bp, Artificial Sequence
  Synthetic
gtaatggctgaagaggacaa

SEQ ID NO: 32580 - DNA, 22 bp, Artificial Sequence
  Synthetic
caggatatagatcagcatgact

SEQ ID NO: 32581 - DNA, 18 bp, Artificial Sequence
  Synthetic
aatattccgtgcacaccg

SEQ ID NO: 32582 - DNA, 23 bp, Artificial Sequence
  Synthetic
ttgtatactttcgttttagctgt

SEQ ID NO: 32583 - DNA, 21 bp, Artificial Sequence
  Synthetic
tctgtcaccatttgtttcttg

SEQ ID NO: 32584 - DNA, 19 bp, Artificial Sequence
  Synthetic
ggggtgtctgttgggtaga

SEQ ID NO: 32585 - DNA, 20 bp, Artificial Sequence
  Synthetic
agcctccatctccaacactt

SEQ ID NO: 32586 - DNA, 20 bp, Artificial Sequence
  Synthetic
caaatcctccacctataggg

SEQ ID NO: 32587 - DNA, 21 bp, Artificial Sequence
  Synthetic
acatctggtaaaccttcactt

SEQ ID NO: 32588 - DNA, 20 bp, Artificial Sequence
  Synthetic
tgccaagatacctaacatcc

SEQ ID NO: 32589 - DNA, 21 bp, Artificial Sequence
  Synthetic
cgtttacgtttttgtaaagca

SEQ ID NO: 32590 - DNA, 20 bp, Artificial Sequence
  Synthetic
ttggaacagttagggcatta

SEQ ID NO: 32591 - DNA, 21 bp, Artificial Sequence
  Synthetic
ctgtgtttgtttaggatccat

SEQ ID NO: 32592 - DNA, 23 bp, Artificial Sequence
  Synthetic
agtcaggatatttacaagtttca

SEQ ID NO: 32593 - DNA, 25 bp, Artificial Sequence
  Synthetic
ggtctgttaaataattgattatcgg

SEQ ID NO: 32594 - DNA, 23 bp, Artificial Sequence
  Synthetic
cagccaatatagatgttatcgtc

SEQ ID NO: 32595 - DNA, 20 bp, Artificial Sequence
  Synthetic
gtattccaaggggattcgat

SEQ ID NO: 32596 - DNA, 20 bp, Artificial Sequence
  Synthetic
gcgggtttagtagtactctt

SEQ ID NO: 32597 - DNA, 18 bp, Artificial Sequence
  Synthetic
ctctgctgatgttgctcc

SEQ ID NO: 32598 - DNA, 21 bp, Artificial Sequence
  Synthetic
gctcttattatgtcacaggct

SEQ ID NO: 32599 - DNA, 19 bp, Artificial Sequence
  Synthetic
tcactccttggaacatcct

SEQ ID NO: 32600 - DNA, 22 bp, Artificial Sequence
  Synthetic
ttttgttactacaacccctttc

SEQ ID NO: 32601 - DNA, 20 bp, Artificial Sequence
  Synthetic
gaaactgagccttcaatgtt

SEQ ID NO: 32602 - DNA, 19 bp, Artificial Sequence
  Synthetic
ctcctttcagcataagcct

SEQ ID NO: 32603 - DNA, 25 bp, Artificial Sequence
  Synthetic
ggataaagcactatatcttttcctt

SEQ ID NO: 32604 - DNA, 19 bp, Artificial Sequence
  Synthetic
agaccgtatttgctggttt

SEQ ID NO: 32605 - DNA, 22 bp, Artificial Sequence
  Synthetic
ggctgttttagttagaacttct

SEQ ID NO: 32606 - DNA, 21 bp, Artificial Sequence
  Synthetic
ggtgtgacagaataaccatac

SEQ ID NO: 32607 - DNA, 19 bp, Artificial Sequence
  Synthetic
acggggaattaaaccatct

SEQ ID NO: 32608 - DNA, 20 bp, Artificial Sequence
  Synthetic
atcaaagacggaatctccat

SEQ ID NO: 32609 - DNA, 23 bp, Artificial Sequence
  Synthetic
agcagcagtttctttagaaaatt

SEQ ID NO: 32610 - DNA, 20 bp, Artificial Sequence
  Synthetic
agtagcatctgatggttcat

SEQ ID NO: 32611 - DNA, 19 bp, Artificial Sequence
  Synthetic
tggtaaggtgaaccacatt

SEQ ID NO: 32612 - DNA, 21 bp, Artificial Sequence
  Synthetic
accaaaagtttcacatccttt

SEQ ID NO: 32613 - DNA, 23 bp, Artificial Sequence
  Synthetic
gatgtttaacacaaaaaccagta

SEQ ID NO: 32614 - DNA, 20 bp, Artificial Sequence
  Synthetic
cacctaaatcagcagctaca

SEQ ID NO: 32615 - DNA, 21 bp, Artificial Sequence
  Synthetic
gcgttcttacaatacgtacaa

SEQ ID NO: 32616 - DNA, 25 bp, Artificial Sequence
  Synthetic
acctttaatagtataactactacgc

SEQ ID NO: 32617 - DNA, 21 bp, Artificial Sequence
  Synthetic
gcttttacttggctaaaacca

SEQ ID NO: 32618 - DNA, 24 bp, Artificial Sequence
  Synthetic
ccagaatagaatttaaagcctgat

SEQ ID NO: 32619 - DNA, 24 bp, Artificial Sequence
  Synthetic
aataggatcttttatacccaaagg

SEQ ID NO: 32620 - DNA, 23 bp, Artificial Sequence
  Synthetic
tcacaatctaatacatgacacat

SEQ ID NO: 32621 - DNA, 19 bp, Artificial Sequence
  Synthetic
ccacttgtaatggcagcta

SEQ ID NO: 32622 - DNA, 21 bp, Artificial Sequence
  Synthetic
agctgctatactcttcaaaca

SEQ ID NO: 32623 - DNA, 21 bp, Artificial Sequence
  Synthetic
cgccacacataactatttcac

SEQ ID NO: 32624 - DNA, 25 bp, Artificial Sequence
  Synthetic
gagtaccaagatcattatacagttt

SEQ ID NO: 32625 - DNA, 24 bp, Artificial Sequence
  Synthetic
ctctatcactaacaatctcttgaa

SEQ ID NO: 32626 - DNA, 24 bp, Artificial Sequence
  Synthetic
tgtagtaataaacagctagaccta

SEQ ID NO: 32627 - DNA, 18 bp, Artificial Sequence
  Synthetic
accaggaggagctttagc

SEQ ID NO: 32628 - DNA, 23 bp, Artificial Sequence
  Synthetic
tccaaaacatacataaaccatct

SEQ ID NO: 32629 - DNA, 22 bp, Artificial Sequence
  Synthetic
aagcctgctgtagtaactatat

SEQ ID NO: 32630 - DNA, 20 bp, Artificial Sequence
  Synthetic
agtaatggcttgagcatagg

SEQ ID NO: 32631 - DNA, 22 bp, Artificial Sequence
  Synthetic
tcgctaacaaatgggtttaaat

SEQ ID NO: 32632 - DNA, 21 bp, Artificial Sequence
  Synthetic
agggtcataagcagttatagg

SEQ ID NO: 32633 - DNA, 21 bp, Artificial Sequence
  Synthetic
ccacagactcaatactgtcat

SEQ ID NO: 32634 - DNA, 23 bp, Artificial Sequence
  Synthetic
agattgacttttaacacactcat

SEQ ID NO: 32635 - DNA, 20 bp, Artificial Sequence
  Synthetic
caaagtacttgcaccttagc

SEQ ID NO: 32636 - DNA, 21 bp, Artificial Sequence
  Synthetic
agtatttccttgtggttgagt

SEQ ID NO: 32637 - DNA, 22 bp, Artificial Sequence
  Synthetic
aagaataggaaactgaggatca

SEQ ID NO: 32638 - DNA, 22 bp, Artificial Sequence
  Synthetic
agcaacagagtcttctacataa

SEQ ID NO: 32639 - DNA, 23 bp, Artificial Sequence
  Synthetic
ggatcatcaagttctaccactat

SEQ ID NO: 32640 - DNA, 21 bp, Artificial Sequence
  Synthetic
tctaaaattctcaaggcagga

SEQ ID NO: 32641 - DNA, 19 bp, Artificial Sequence
  Synthetic
ctccttcatgacttgggtc

SEQ ID NO: 32642 - DNA, 18 bp, Artificial Sequence
  Synthetic
cgcttatgtctctgcagt

SEQ ID NO: 32643 - DNA, 18 bp, Artificial Sequence
  Synthetic
aaaatcgtccattgctgc

SEQ ID NO: 32644 - DNA, 21 bp, Artificial Sequence
  Synthetic
cctcacatacaagaacatagg

SEQ ID NO: 32645 - DNA, 22 bp, Artificial Sequence
  Synthetic
aaatccttccaattgtggtgat

SEQ ID NO: 32646 - DNA, 25 bp, Artificial Sequence
  Synthetic
ttctctctattgttatactgttctg

SEQ ID NO: 32647 - DNA, 18 bp, Artificial Sequence
  Synthetic
ctttgtgctgctgtttga

SEQ ID NO: 32648 - DNA, 20 bp, Artificial Sequence
  Synthetic
ccagagagtacccttccctc

SEQ ID NO: 32649 - DNA, 19 bp, Artificial Sequence
  Synthetic
tctcagttcaagagtgctg

SEQ ID NO: 32650 - DNA, 20 bp, Artificial Sequence
  Synthetic
acctttagttggatctccca

SEQ ID NO: 32651 - DNA, 18 bp, Artificial Sequence
  Synthetic
tcctcgtcgtcgtcgaag

SEQ ID NO: 32652 - DNA, 18 bp, Artificial Sequence
  Synthetic
gtcatctccaacccagtg

SEQ ID NO: 32653 - DNA, 23 bp, Artificial Sequence
  Synthetic
ccaaatatttttaacagccagtc

SEQ ID NO: 32654 - DNA, 24 bp, Artificial Sequence
  Synthetic
agtaaatacactaatgtctggacc

SEQ ID NO: 32655 - DNA, 19 bp, Artificial Sequence
  Synthetic
agcaggatctgaagaaaca

SEQ ID NO: 32656 - DNA, 18 bp, Artificial Sequence
  Synthetic
aactgaactaggcgggaa

SEQ ID NO: 32657 - DNA, 24 bp, Artificial Sequence
  Synthetic
ccatactttcagcttctactatat

SEQ ID NO: 32658 - DNA, 19 bp, Artificial Sequence
  Synthetic
caccatcctgtattgtgct

SEQ ID NO: 32659 - DNA, 25 bp, Artificial Sequence
  Synthetic
ggtgtaaataattagactctggtat

SEQ ID NO: 32660 - DNA, 20 bp, Artificial Sequence
  Synthetic
ggagattcctcattttcgtc

SEQ ID NO: 32661 - DNA, 18 bp, Artificial Sequence
  Synthetic
gctcacatggctcagaaa

SEQ ID NO: 32662 - DNA, 20 bp, Artificial Sequence
  Synthetic
actttaggttgtctgcactt

SEQ ID NO: 32663 - DNA, 18 bp, Artificial Sequence
  Synthetic
tctcaaatcggtgcttca

SEQ ID NO: 32664 - DNA, 21 bp, Artificial Sequence
  Synthetic
tgaatgtgtgtcttctcagat

SEQ ID NO: 32665 - DNA, 18 bp, Artificial Sequence
  Synthetic
agttttcaaggctgggga

SEQ ID NO: 32666 - DNA, 18 bp, Artificial Sequence
  Synthetic
attttggacccagcttgc

SEQ ID NO: 32667 - DNA, 20 bp, Artificial Sequence
  Synthetic
cttatcattgggatcagctg

SEQ ID NO: 32668 - DNA, 20 bp, Artificial Sequence
  Synthetic
ggttccattggttctcacat

SEQ ID NO: 32669 - DNA, 22 bp, Artificial Sequence
  Synthetic
aagcaattttctagattcagcc

SEQ ID NO: 32670 - DNA, 20 bp, Artificial Sequence
  Synthetic
agccactcttaaatcgagtc

SEQ ID NO: 32671 - DNA, 20 bp, Artificial Sequence
  Synthetic
ccctcagagagactaatgtc

SEQ ID NO: 32672 - DNA, 18 bp, Artificial Sequence
  Synthetic
caactcgtttcgccatgt

SEQ ID NO: 32673 - DNA, 21 bp, Artificial Sequence
  Synthetic
gtgtcagtgctcttattaggt

SEQ ID NO: 32674 - DNA, 20 bp, Artificial Sequence
  Synthetic
aactgtaaaggagagctctg

SEQ ID NO: 32675 - DNA, 24 bp, Artificial Sequence
  Synthetic
caagtcctatagaatctatccact

SEQ ID NO: 32676 - DNA, 18 bp, Artificial Sequence
  Synthetic
gtggcatcggtaggtgta

SEQ ID NO: 32677 - DNA, 24 bp, Artificial Sequence
  Synthetic
attcttctttcttaatccttccag

SEQ ID NO: 32678 - DNA, 24 bp, Artificial Sequence
  Synthetic
cgcttttacaatatacacagctta

SEQ ID NO: 32679 - DNA, 22 bp, Artificial Sequence
  Synthetic
aattgcattatctggttcatct

SEQ ID NO: 32680 - DNA, 21 bp, Artificial Sequence
  Synthetic
tggtgagcttaaattgctatg

SEQ ID NO: 32681 - DNA, 22 bp, Artificial Sequence
  Synthetic
acaatcagctaactgtgcatat

SEQ ID NO: 32682 - DNA, 23 bp, Artificial Sequence
  Synthetic
agaatcttttcctgtaacacatt

SEQ ID NO: 32683 - DNA, 19 bp, Artificial Sequence
  Synthetic
tgcaatgtccacagttcat

SEQ ID NO: 32684 - DNA, 21 bp, Artificial Sequence
  Synthetic
aatccacaatgtctgaatggt

SEQ ID NO: 32685 - DNA, 20 bp, Artificial Sequence
  Synthetic
gatgtgcctgtaaatgtagg

SEQ ID NO: 32686 - DNA, 20 bp, Artificial Sequence
  Synthetic
taacaccaggaataggggta

SEQ ID NO: 32687 - DNA, 19 bp, Artificial Sequence
  Synthetic
ttgtttaccactgcgagta

SEQ ID NO: 32688 - DNA, 18 bp, Artificial Sequence
  Synthetic
agggatgaccactaaggc

SEQ ID NO: 32689 - DNA, 25 bp, Artificial Sequence
  Synthetic
tgtatttactagttctaatggagga

SEQ ID NO: 32690 - DNA, 23 bp, Artificial Sequence
  Synthetic
tgccctatcattagtacctttta

SEQ ID NO: 32691 - DNA, 20 bp, Artificial Sequence
  Synthetic
tttgagtgtttccctctgat

SEQ ID NO: 32692 - DNA, 21 bp, Artificial Sequence
  Synthetic
cattcagattcctgtgttctt

SEQ ID NO: 32693 - DNA, 20 bp, Artificial Sequence
  Synthetic
ggggattgtctgtaagaaca

SEQ ID NO: 32694 - DNA, 21 bp, Artificial Sequence
  Synthetic
acaattgtctgaccttgaatg

SEQ ID NO: 32695 - DNA, 21 bp, Artificial Sequence
  Synthetic
ccattattctcttgtctgctg

SEQ ID NO: 32696 - DNA, 20 bp, Artificial Sequence
  Synthetic
ccagggtttgtatcaactct

SEQ ID NO: 32697 - DNA, 19 bp, Artificial Sequence
  Synthetic
cttgggttaagtgcaacac

SEQ ID NO: 32698 - DNA, 20 bp, Artificial Sequence
  Synthetic
cttgttcctcagttggattc

SEQ ID NO: 32699 - DNA, 19 bp, Artificial Sequence
  Synthetic
ccacaattattgcctcagc

SEQ ID NO: 32700 - DNA, 19 bp, Artificial Sequence
  Synthetic
gggatcttgtgaccattga

SEQ ID NO: 32701 - DNA, 23 bp, Artificial Sequence
  Synthetic
ttgttgtaattgaatactggaga

SEQ ID NO: 32702 - DNA, 23 bp, Artificial Sequence
  Synthetic
ttttcgtttcattaccaacacta

SEQ ID NO: 32703 - DNA, 22 bp, Artificial Sequence
  Synthetic
gctgaatagaatcaatccagtg

SEQ ID NO: 32704 - DNA, 19 bp, Artificial Sequence
  Synthetic
cagaaactgcagttctctg

SEQ ID NO: 32705 - DNA, 20 bp, Artificial Sequence
  Synthetic
cggtagttttcgctacagaa

SEQ ID NO: 32706 - DNA, 25 bp, Artificial Sequence
  Synthetic
cattttaaggtattagcagaacctt

SEQ ID NO: 32707 - DNA, 21 bp, Artificial Sequence
  Synthetic
tttctgcatctacaggaacaa

SEQ ID NO: 32708 - DNA, 23 bp, Artificial Sequence
  Synthetic
ctgtataggcttttcacctatag

SEQ ID NO: 32709 - DNA, 22 bp, Artificial Sequence
  Synthetic
actcttactataccctctgatg

SEQ ID NO: 32710 - DNA, 24 bp, Artificial Sequence
  Synthetic
gactgtataactaactgtgcatta

SEQ ID NO: 32711 - DNA, 24 bp, Artificial Sequence
  Synthetic
gcccactataaacatttgaatttg

SEQ ID NO: 32712 - DNA, 22 bp, Artificial Sequence
  Synthetic
caaaaaaacacagcatctccat

SEQ ID NO: 32713 - DNA, 18 bp, Artificial Sequence
  Synthetic
ggtgtgtgtaaatgccct

SEQ ID NO: 32714 - DNA, 23 bp, Artificial Sequence
  Synthetic
gtttctataaactcacaagcatt

SEQ ID NO: 32715 - DNA, 20 bp, Artificial Sequence
  Synthetic
actttgaaatggcctggtta

SEQ ID NO: 32716 - DNA, 20 bp, Artificial Sequence
  Synthetic
tgtcttttaagccagtcagg

SEQ ID NO: 32717 - DNA, 22 bp, Artificial Sequence
  Synthetic
tctatgttggaggtaacaagta

SEQ ID NO: 32718 - DNA, 23 bp, Artificial Sequence
  Synthetic
aatagttcatggcttgtatctgt

SEQ ID NO: 32719 - DNA, 23 bp, Artificial Sequence
  Synthetic
agaaggaccaaataatacatcag

SEQ ID NO: 32720 - DNA, 23 bp, Artificial Sequence
  Synthetic
cctttaggtaatttcacagtttg

SEQ ID NO: 32721 - DNA, 20 bp, Artificial Sequence
  Synthetic
ggactgtggtgtaactgcat

SEQ ID NO: 32722 - DNA, 24 bp, Artificial Sequence
  Synthetic
ttctaatggtatagattccccaat

SEQ ID NO: 32723 - DNA, 20 bp, Artificial Sequence
  Synthetic
caatagattgtgctgttgct

SEQ ID NO: 32724 - DNA, 22 bp, Artificial Sequence
  Synthetic
aagaaaatagacgtttccacaa

SEQ ID NO: 32725 - DNA, 23 bp, Artificial Sequence
  Synthetic
tcaataatggaactaacaagctc

SEQ ID NO: 32726 - DNA, 19 bp, Artificial Sequence
  Synthetic
tgggctaatacatcagctg

SEQ ID NO: 32727 - DNA, 23 bp, Artificial Sequence
  Synthetic
acaaaaatataaagtgcatgtgc

SEQ ID NO: 32728 - DNA, 19 bp, Artificial Sequence
  Synthetic
gcccaatacagcttctact

SEQ ID NO: 32729 - DNA, 22 bp, Artificial Sequence
  Synthetic
agttattacagcagaaggagta

SEQ ID NO: 32730 - DNA, 22 bp, Artificial Sequence
  Synthetic
gatccatctgtactttcttcaa

SEQ ID NO: 32731 - DNA, 23 bp, Artificial Sequence
  Synthetic
ctaaagagttcgaaactaccttt

SEQ ID NO: 32732 - DNA, 23 bp, Artificial Sequence
  Synthetic
aaacccatatgaaataacctgta

SEQ ID NO: 32733 - DNA, 18 bp, Artificial Sequence
  Synthetic
gatgaggcgaagaagtgg

SEQ ID NO: 32734 - DNA, 18 bp, Artificial Sequence
  Synthetic
ttcagcagttggggcaga

SEQ ID NO: 32735 - DNA, 22 bp, Artificial Sequence
  Synthetic
ccctgaggatcaacaaatacat

SEQ ID NO: 32736 - DNA, 18 bp, Artificial Sequence
  Synthetic
ttcaaattgtacagcgcg

SEQ ID NO: 32737 - DNA, 19 bp, Artificial Sequence
  Synthetic
ctgcagctggaatatcact

SEQ ID NO: 32738 - DNA, 21 bp, Artificial Sequence
  Synthetic
ggatgaaccacatttaacacg

SEQ ID NO: 32739 - DNA, 22 bp, Artificial Sequence
  Synthetic
gctgtacatattcatccgtact

SEQ ID NO: 32740 - DNA, 20 bp, Artificial Sequence
  Synthetic
aagttccaattcctaaaggc

SEQ ID NO: 32741 - DNA, 22 bp, Artificial Sequence
  Synthetic
gtgttaatttaattgggggaca

SEQ ID NO: 32742 - DNA, 18 bp, Artificial Sequence
  Synthetic
tcaggagaacgaaaacgg

SEQ ID NO: 32743 - DNA, 19 bp, Artificial Sequence
  Synthetic
ggcgttgtcaaacaggaca

SEQ ID NO: 32744 - DNA, 18 bp, Artificial Sequence
  Synthetic
gcactcgtactgctcgct

SEQ ID NO: 32745 - DNA, 18 bp, Artificial Sequence
  Synthetic
tttcctgcatgccgttta

SEQ ID NO: 32746 - DNA, 18 bp, Artificial Sequence
  Synthetic
cccctggacatctggaca

SEQ ID NO: 32747 - DNA, 17 bp, Artificial Sequence
  Synthetic
agtgtgtgcctgggtgt

SEQ ID NO: 32748 - DNA, 17 bp, Artificial Sequence
  Synthetic
ggctggtccagggactt

SEQ ID NO: 32749 - DNA, 20 bp, Artificial Sequence
  Synthetic
ggcttagtgtgtcatggtga

SEQ ID NO: 32750 - DNA, 19 bp, Artificial Sequence
  Synthetic
tcaatgtcgacgaagatgc

SEQ ID NO: 32751 - DNA, 20 bp, Artificial Sequence
  Synthetic
tcccaggtctacgtgtgaaa

SEQ ID NO: 32752 - DNA, 18 bp, Artificial Sequence
  Synthetic
acgtgttccacccgtgaa

SEQ ID NO: 32753 - DNA, 18 bp, Artificial Sequence
  Synthetic
aggccaatagagccgagg

SEQ ID NO: 32754 - DNA, 19 bp, Artificial Sequence
  Synthetic
gcagtaaccgcagtccatg

SEQ ID NO: 32755 - DNA, 18 bp, Artificial Sequence
  Synthetic
cagggttggtgccttcac

SEQ ID NO: 32756 - DNA, 18 bp, Artificial Sequence
  Synthetic
agagaaggtggcccctgg

SEQ ID NO: 32757 - DNA, 18 bp, Artificial Sequence
  Synthetic
cgggagatgatggcgctg

SEQ ID NO: 32758 - DNA, 16 bp, Artificial Sequence
  Synthetic
aatggagccccgaccc

SEQ ID NO: 32759 - DNA, 16 bp, Artificial Sequence
  Synthetic
tgctgaccgaggccga

SEQ ID NO: 32760 - DNA, 19 bp, Artificial Sequence
  Synthetic
ggcgcaaggaaaaggagaa

SEQ ID NO: 32761 - DNA, 20 bp, Artificial Sequence
  Synthetic
acctcgcaaacatgctatca

SEQ ID NO: 32762 - DNA, 18 bp, Artificial Sequence
  Synthetic
gcgcggaatcaggaccat

SEQ ID NO: 32763 - DNA, 18 bp, Artificial Sequence
  Synthetic
cacccgccatggacctaa

SEQ ID NO: 32764 - DNA, 16 bp, Artificial Sequence
  Synthetic
cttgacgggggcagct

SEQ ID NO: 32765 - DNA, 16 bp, Artificial Sequence
  Synthetic
tacacccaccccggct

SEQ ID NO: 32766 - DNA, 16 bp, Artificial Sequence
  Synthetic
ctcgagggctgcagca

SEQ ID NO: 32767 - DNA, 18 bp, Artificial Sequence
  Synthetic
cgggctagcgagaatcca

SEQ ID NO: 32768 - DNA, 20 bp, Artificial Sequence
  Synthetic
tgagaagagctgacggtact

SEQ ID NO: 32769 - DNA, 16 bp, Artificial Sequence
  Synthetic
tgacgtcagcaggccg

SEQ ID NO: 32770 - DNA, 20 bp, Artificial Sequence
  Synthetic
tgcttcactttcttggggtg

SEQ ID NO: 32771 - DNA, 15 bp, Artificial Sequence
  Synthetic
aagggtgcagcggct

SEQ ID NO: 32772 - DNA, 19 bp, Artificial Sequence
  Synthetic
tggggcattccttgtacga

SEQ ID NO: 32773 - DNA, 19 bp, Artificial Sequence
  Synthetic
tgagcgctaagaagcagcc

SEQ ID NO: 32774 - DNA, 19 bp, Artificial Sequence
  Synthetic
gtcgtcatcaaggcccttg

SEQ ID NO: 32775 - DNA, 17 bp, Artificial Sequence
  Synthetic
cgttaacgcgagctccg

SEQ ID NO: 32776 - DNA, 19 bp, Artificial Sequence
  Synthetic
cggtcacgtctcatgttgg

SEQ ID NO: 32777 - DNA, 16 bp, Artificial Sequence
  Synthetic
cccgtggcctgcgtaa

SEQ ID NO: 32778 - DNA, 16 bp, Artificial Sequence
  Synthetic
cgcacctgcaagcaca

SEQ ID NO: 32779 - DNA, 20 bp, Artificial Sequence
  Synthetic
cctctgcttatcaatcggta

SEQ ID NO: 32780 - DNA, 18 bp, Artificial Sequence
  Synthetic
caaccctgttaggcacgg

SEQ ID NO: 32781 - DNA, 16 bp, Artificial Sequence
  Synthetic
gtgtccggagccgaca

SEQ ID NO: 32782 - DNA, 17 bp, Artificial Sequence
  Synthetic
acggttcctcactgggc

SEQ ID NO: 32783 - DNA, 19 bp, Artificial Sequence
  Synthetic
cctcctcctgctcctgttc

SEQ ID NO: 32784 - DNA, 18 bp, Artificial Sequence
  Synthetic
tactgggactcctgggcc

SEQ ID NO: 32785 - DNA, 20 bp, Artificial Sequence
  Synthetic
gtcttctttggcatccgagg

SEQ ID NO: 32786 - DNA, 16 bp, Artificial Sequence
  Synthetic
aggaactccagcggcg

SEQ ID NO: 32787 - DNA, 18 bp, Artificial Sequence
  Synthetic
acacgatggactgcctgg

SEQ ID NO: 32788 - DNA, 17 bp, Artificial Sequence
  Synthetic
gtcccccctggcattgt

SEQ ID NO: 32789 - DNA, 17 bp, Artificial Sequence
  Synthetic
gatgggtggagaggcca

SEQ ID NO: 32790 - DNA, 16 bp, Artificial Sequence
  Synthetic
tcagacacgcgacggg

SEQ ID NO: 32791 - DNA, 16 bp, Artificial Sequence
  Synthetic
acccgagaccgcagac

SEQ ID NO: 32792 - DNA, 20 bp, Artificial Sequence
  Synthetic
cactcccatacctggacctc

SEQ ID NO: 32793 - DNA, 16 bp, Artificial Sequence
  Synthetic
gcagccttgcgtggtg

SEQ ID NO: 32794 - DNA, 19 bp, Artificial Sequence
  Synthetic
cggatgcctgcctatggat

SEQ ID NO: 32795 - DNA, 18 bp, Artificial Sequence
  Synthetic
ttgagtggcctcgggacc

SEQ ID NO: 32796 - DNA, 17 bp, Artificial Sequence
  Synthetic
ggctgtggcgagtacca

SEQ ID NO: 32797 - DNA, 20 bp, Artificial Sequence
  Synthetic
tgcggatgtgttgttggtat

SEQ ID NO: 32798 - DNA, 20 bp, Artificial Sequence
  Synthetic
gctaccttcacctcctccaa

SEQ ID NO: 32799 - DNA, 18 bp, Artificial Sequence
  Synthetic
ttcctacgccctgcttca

SEQ ID NO: 32800 - DNA, 16 bp, Artificial Sequence
  Synthetic
agggacctcagcgcct

SEQ ID NO: 32801 - DNA, 20 bp, Artificial Sequence
  Synthetic
cgggttttctcagtacgtgc

SEQ ID NO: 32802 - DNA, 20 bp, Artificial Sequence
  Synthetic
ggggtgatttcacggatcag

SEQ ID NO: 32803 - DNA, 19 bp, Artificial Sequence
  Synthetic
cggtgctctcatgttggtc

SEQ ID NO: 32804 - DNA, 20 bp, Artificial Sequence
  Synthetic
agacagttgcagggatgaga

SEQ ID NO: 32805 - DNA, 19 bp, Artificial Sequence
  Synthetic
ccaggaagtccaaaactcc

SEQ ID NO: 32806 - DNA, 16 bp, Artificial Sequence
  Synthetic
aaccgccacccccttt

SEQ ID NO: 32807 - DNA, 16 bp, Artificial Sequence
  Synthetic
gcttggggcccacatg

SEQ ID NO: 32808 - DNA, 19 bp, Artificial Sequence
  Synthetic
gggtctcttttccgcttgt

SEQ ID NO: 32809 - DNA, 18 bp, Artificial Sequence
  Synthetic
ggacttgaggtgggctga

SEQ ID NO: 32810 - DNA, 19 bp, Artificial Sequence
  Synthetic
gcaaaggccaaagggagac

SEQ ID NO: 32811 - DNA, 18 bp, Artificial Sequence
  Synthetic
ctgcagacaccacccagt

SEQ ID NO: 32812 - DNA, 19 bp, Artificial Sequence
  Synthetic
gctctcagcctacaagagc

SEQ ID NO: 32813 - DNA, 20 bp, Artificial Sequence
  Synthetic
ggccctacattctggacaga

SEQ ID NO: 32814 - DNA, 16 bp, Artificial Sequence
  Synthetic
tccagacaccaggcgc

SEQ ID NO: 32815 - DNA, 18 bp, Artificial Sequence
  Synthetic
ctgacgcacagcctgtac

SEQ ID NO: 32816 - DNA, 18 bp, Artificial Sequence
  Synthetic
tggtctactgggagctgg

SEQ ID NO: 32817 - DNA, 16 bp, Artificial Sequence
  Synthetic
tgtgtgggcgagctga

SEQ ID NO: 32818 - DNA, 19 bp, Artificial Sequence
  Synthetic
gcctcaaccatcagtcacc

SEQ ID NO: 32819 - DNA, 16 bp, Artificial Sequence
  Synthetic
cctaccttggggcggt

SEQ ID NO: 32820 - DNA, 18 bp, Artificial Sequence
  Synthetic
taccccctggccacctac

SEQ ID NO: 32821 - DNA, 20 bp, Artificial Sequence
  Synthetic
tgcgaaactacctggatgac

SEQ ID NO: 32822 - DNA, 19 bp, Artificial Sequence
  Synthetic
tcatcaaggcctccctgag

SEQ ID NO: 32823 - DNA, 20 bp, Artificial Sequence
  Synthetic
ggccagccaagtctacagat

SEQ ID NO: 32824 - DNA, 15 bp, Artificial Sequence
  Synthetic
aatgcgcggcccatg

SEQ ID NO: 32825 - DNA, 18 bp, Artificial Sequence
  Synthetic
ttgtgacacacgtagcac

SEQ ID NO: 32826 - DNA, 19 bp, Artificial Sequence
  Synthetic
caagcctaactgcacgaca

SEQ ID NO: 32827 - DNA, 19 bp, Artificial Sequence
  Synthetic
agtgttgctgtatcaaggt

SEQ ID NO: 32828 - DNA, 18 bp, Artificial Sequence
  Synthetic
atccattctggcgtttcc

SEQ ID NO: 32829 - DNA, 19 bp, Artificial Sequence
  Synthetic
ccaatccccttcttctgtt

SEQ ID NO: 32830 - DNA, 24 bp, Artificial Sequence
  Synthetic
gggttacatcatctattagtccta

SEQ ID NO: 32831 - DNA, 23 bp, Artificial Sequence
  Synthetic
ccaactgaatttcaattgcttta

SEQ ID NO: 32832 - DNA, 19 bp, Artificial Sequence
  Synthetic
tttccctccaacatgtgta

SEQ ID NO: 32833 - DNA, 18 bp, Artificial Sequence
  Synthetic
gcttaaatggcggggtcg

SEQ ID NO: 32834 - DNA, 18 bp, Artificial Sequence
  Synthetic
agcactacaggtaggtgt

SEQ ID NO: 32835 - DNA, 18 bp, Artificial Sequence
  Synthetic
taatgtccgccttgggaa

SEQ ID NO: 32836 - DNA, 23 bp, Artificial Sequence
  Synthetic
gacacgtttagttttttaggaaa

SEQ ID NO: 32837 - DNA, 24 bp, Artificial Sequence
  Synthetic
ttgtataatgaagcatcaggtagt

SEQ ID NO: 32838 - DNA, 20 bp, Artificial Sequence
  Synthetic
ccaatgttcacctaagggag

SEQ ID NO: 32839 - DNA, 22 bp, Artificial Sequence
  Synthetic
tgcctgcctattataaaatgtc

SEQ ID NO: 32840 - DNA, 24 bp, Artificial Sequence
  Synthetic
acatatttgtactacgtgatgtgt

SEQ ID NO: 32841 - DNA, 18 bp, Artificial Sequence
  Synthetic
tctgcataggggtccttt

SEQ ID NO: 32842 - DNA, 20 bp, Artificial Sequence
  Synthetic
tatagtagcccgccaaaacg

SEQ ID NO: 32843 - DNA, 21 bp, Artificial Sequence
  Synthetic
cagacacattcttggacagaa

SEQ ID NO: 32844 - DNA, 19 bp, Artificial Sequence
  Synthetic
cttacatggttgttggcaa

SEQ ID NO: 32845 - DNA, 24 bp, Artificial Sequence
  Synthetic
cgttgctaatatagacaatctaac

SEQ ID NO: 32846 - DNA, 22 bp, Artificial Sequence
  Synthetic
tttactctttccttctccagta

SEQ ID NO: 32847 - DNA, 24 bp, Artificial Sequence
  Synthetic
ccatgtttaaaagatacattcgac

SEQ ID NO: 32848 - DNA, 25 bp, Artificial Sequence
  Synthetic
ctctaaaaagtttattccctggtat

SEQ ID NO: 32849 - DNA, 25 bp, Artificial Sequence
  Synthetic
gtcctgataataaatgtatttccag

SEQ ID NO: 32850 - DNA, 18 bp, Artificial Sequence
  Synthetic
aagaccttgtcgcggagg

SEQ ID NO: 32851 - DNA, 18 bp, Artificial Sequence
  Synthetic
aggtctagttggtctgct

SEQ ID NO: 32852 - DNA, 18 bp, Artificial Sequence
  Synthetic
aaattcaggtggaggcac

SEQ ID NO: 32853 - DNA, 22 bp, Artificial Sequence
  Synthetic
ggtgttatggcttaattcatct

SEQ ID NO: 32854 - DNA, 22 bp, Artificial Sequence
  Synthetic
tcatcagtgcttaatactttgg

SEQ ID NO: 32855 - DNA, 18 bp, Artificial Sequence
  Synthetic
aaagctgaattgggggac

SEQ ID NO: 32856 - DNA, 21 bp, Artificial Sequence
  Synthetic
ttttgtgctattggaagtacc

SEQ ID NO: 32857 - DNA, 20 bp, Artificial Sequence
  Synthetic
atggaaaatgctttctccac

SEQ ID NO: 32858 - DNA, 19 bp, Artificial Sequence
  Synthetic
agctggctaattgctcgtt

SEQ ID NO: 32859 - DNA, 20 bp, Artificial Sequence
  Synthetic
cctcactatcgtccccattg

SEQ ID NO: 32860 - DNA, 19 bp, Artificial Sequence
  Synthetic
tgtctacacataccccggc

SEQ ID NO: 32861 - DNA, 20 bp, Artificial Sequence
  Synthetic
atctgtacctgattgtgccg

SEQ ID NO: 32862 - DNA, 18 bp, Artificial Sequence
  Synthetic
acattttgccaccgtgtc

SEQ ID NO: 32863 - DNA, 18 bp, Artificial Sequence
  Synthetic
tggtcatatgcccattgc

SEQ ID NO: 32864 - DNA, 22 bp, Artificial Sequence
  Synthetic
aataaactctatgtcgtggtgt

SEQ ID NO: 32865 - DNA, 18 bp, Artificial Sequence
  Synthetic
attgccatccagtgcatt

SEQ ID NO: 32866 - DNA, 18 bp, Artificial Sequence
  Synthetic
ttaaacggctggccaatg

SEQ ID NO: 32867 - DNA, 19 bp, Artificial Sequence
  Synthetic
cttcctgtgcaaacctaac

SEQ ID NO: 32868 - DNA, 16 bp, Artificial Sequence
  Synthetic
tcccgtgctgctttgc

SEQ ID NO: 32869 - DNA, 18 bp, Artificial Sequence
  Synthetic
ttgataggaaggttgccc

SEQ ID NO: 32870 - DNA, 18 bp, Artificial Sequence
  Synthetic
ttggtcaagggactgcaa

SEQ ID NO: 32871 - DNA, 18 bp, Artificial Sequence
  Synthetic
aactactgcaacagacgc

SEQ ID NO: 32872 - DNA, 16 bp, Artificial Sequence
  Synthetic
atcggatgcccccacg

SEQ ID NO: 32873 - DNA, 19 bp, Artificial Sequence
  Synthetic
gtctgtgtagagccacaat

SEQ ID NO: 32874 - DNA, 18 bp, Artificial Sequence
  Synthetic
tagcgatgcatcaggaag

SEQ ID NO: 32875 - DNA, 23 bp, Artificial Sequence
  Synthetic
agatttaagttctataggagggc

SEQ ID NO: 32876 - DNA, 20 bp, Artificial Sequence
  Synthetic
tgttccttttagcacaaagc

SEQ ID NO: 32877 - DNA, 23 bp, Artificial Sequence
  Synthetic
cataactggaaaataaactgcaa

SEQ ID NO: 32878 - DNA, 20 bp, Artificial Sequence
  Synthetic
caacacatgacacacacatt

SEQ ID NO: 32879 - DNA, 18 bp, Artificial Sequence
  Synthetic
acaagcatgcacacctgc

SEQ ID NO: 32880 - DNA, 19 bp, Artificial Sequence
  Synthetic
cagtcttcccggcaattcc

SEQ ID NO: 32881 - DNA, 18 bp, Artificial Sequence
  Synthetic
gatttgccagtggagcgc

SEQ ID NO: 32882 - DNA, 18 bp, Artificial Sequence
  Synthetic
gcagggccagcaagaaga

SEQ ID NO: 32883 - DNA, 18 bp, Artificial Sequence
  Synthetic
ggcggacatcacaaccat

SEQ ID NO: 32884 - DNA, 18 bp, Artificial Sequence
  Synthetic
caacagtatgggtgcgcg

SEQ ID NO: 32885 - DNA, 19 bp, Artificial Sequence
  Synthetic
acactgccttggtgggtag

SEQ ID NO: 32886 - DNA, 18 bp, Artificial Sequence
  Synthetic
gtcgatcaggcaccttgg

SEQ ID NO: 32887 - DNA, 18 bp, Artificial Sequence
  Synthetic
tgagggcaggtgataggc

SEQ ID NO: 32888 - DNA, 18 bp, Artificial Sequence
  Synthetic
ccgctcctatctggccat

SEQ ID NO: 32889 - DNA, 18 bp, Artificial Sequence
  Synthetic
cgagatgccttgccatgg

SEQ ID NO: 32890 - DNA, 20 bp, Artificial Sequence
  Synthetic
ccactatggtgcccaaaagg

SEQ ID NO: 32891 - DNA, 16 bp, Artificial Sequence
  Synthetic
ggtcgaccgctccaca

SEQ ID NO: 32892 - DNA, 20 bp, Artificial Sequence
  Synthetic
gccactgagggattaagcac

SEQ ID NO: 32893 - DNA, 18 bp, Artificial Sequence
  Synthetic
ggggttgtcactgaccca

SEQ ID NO: 32894 - DNA, 20 bp, Artificial Sequence
  Synthetic
tctacaacttgagtgaccgc

SEQ ID NO: 32895 - DNA, 18 bp, Artificial Sequence
  Synthetic
tgtgtgaggccggtgaaa

SEQ ID NO: 32896 - DNA, 16 bp, Artificial Sequence
  Synthetic
ggcaatacgcggcgac

SEQ ID NO: 32897 - DNA, 18 bp, Artificial Sequence
  Synthetic
gctactgcagggttccct

SEQ ID NO: 32898 - DNA, 16 bp, Artificial Sequence
  Synthetic
ttggacggcgccttcc

SEQ ID NO: 32899 - DNA, 18 bp, Artificial Sequence
  Synthetic
gtggtatgacccgtgctg

SEQ ID NO: 32900 - DNA, 16 bp, Artificial Sequence
  Synthetic
ggtggtgcaggtggct

SEQ ID NO: 32901 - DNA, 18 bp, Artificial Sequence
  Synthetic
aggaggagggagagcaca

SEQ ID NO: 32902 - DNA, 18 bp, Artificial Sequence
  Synthetic
gtcctcctcggagcaagt

SEQ ID NO: 32903 - DNA, 20 bp, Artificial Sequence
  Synthetic
tccttagccccaaacccata

SEQ ID NO: 32904 - DNA, 20 bp, Artificial Sequence
  Synthetic
gttgagtcaaagcatcgggt

SEQ ID NO: 32905 - DNA, 18 bp, Artificial Sequence
  Synthetic
gcctccgtgaaggctctc

SEQ ID NO: 32906 - DNA, 18 bp, Artificial Sequence
  Synthetic
ccatatggtcggggcgta

SEQ ID NO: 32907 - DNA, 16 bp, Artificial Sequence
  Synthetic
aaacggccgctctccc

SEQ ID NO: 32908 - DNA, 20 bp, Artificial Sequence
  Synthetic
cggggttgttcaacagtttg

SEQ ID NO: 32909 - DNA, 17 bp, Artificial Sequence
  Synthetic
gtgtacggcgtgttcgg

SEQ ID NO: 32910 - DNA, 16 bp, Artificial Sequence
  Synthetic
aactgtgtggcggcgg

SEQ ID NO: 32911 - DNA, 18 bp, Artificial Sequence
  Synthetic
gcctgaaacagaccgtcc

SEQ ID NO: 32912 - DNA, 18 bp, Artificial Sequence
  Synthetic
ctgttttgccgacgaccg

SEQ ID NO: 32913 - DNA, 18 bp, Artificial Sequence
  Synthetic
tggacgatgggaatcggg

SEQ ID NO: 32914 - DNA, 18 bp, Artificial Sequence
  Synthetic
aaaccttcgtcgcgcatc

SEQ ID NO: 32915 - DNA, 20 bp, Artificial Sequence
  Synthetic
ccatgaatttcactgcgcct

SEQ ID NO: 32916 - DNA, 18 bp, Artificial Sequence
  Synthetic
tcagggagaaggaggcac

SEQ ID NO: 32917 - DNA, 18 bp, Artificial Sequence
  Synthetic
ccagagcggcaacaccta

SEQ ID NO: 32918 - DNA, 16 bp, Artificial Sequence
  Synthetic
gcttccgccagcccta

SEQ ID NO: 32919 - DNA, 18 bp, Artificial Sequence
  Synthetic
aattgccgaccatcaccg

SEQ ID NO: 32920 - DNA, 19 bp, Artificial Sequence
  Synthetic
ggataacgcgctggtatgc

SEQ ID NO: 32921 - DNA, 18 bp, Artificial Sequence
  Synthetic
cctgtcgcggattttcgg

SEQ ID NO: 32922 - DNA, 17 bp, Artificial Sequence
  Synthetic
ggcagcagggtttcgga

SEQ ID NO: 32923 - DNA, 20 bp, Artificial Sequence
  Synthetic
agcgttgatgatttgttggc

SEQ ID NO: 32924 - DNA, 18 bp, Artificial Sequence
  Synthetic
ttttgtggtggcaagcct

SEQ ID NO: 32925 - DNA, 20 bp, Artificial Sequence
  Synthetic
ggacatcttttgctgacgct

SEQ ID NO: 32926 - DNA, 20 bp, Artificial Sequence
  Synthetic
gagggcggttttcactttcc

SEQ ID NO: 32927 - DNA, 19 bp, Artificial Sequence
  Synthetic
actgtccacaaataccggc

SEQ ID NO: 32928 - DNA, 20 bp, Artificial Sequence
  Synthetic
accttaaataagctcgccgc

SEQ ID NO: 32929 - DNA, 18 bp, Artificial Sequence
  Synthetic
gcatcaccaagcttgccg

SEQ ID NO: 32930 - DNA, 16 bp, Artificial Sequence
  Synthetic
ttactgcgccgccgac

SEQ ID NO: 32931 - DNA, 16 bp, Artificial Sequence
  Synthetic
atatgccgaccgccgc

SEQ ID NO: 32932 - DNA, 15 bp, Artificial Sequence
  Synthetic
tgcggacgcgcgtat

SEQ ID NO: 32933 - DNA, 19 bp, Artificial Sequence
  Synthetic
cccgagcagaatgttgagc

SEQ ID NO: 32934 - DNA, 17 bp, Artificial Sequence
  Synthetic
cgtagctgtggcgcatc

SEQ ID NO: 32935 - DNA, 16 bp, Artificial Sequence
  Synthetic
cgcgtgccagacggat

SEQ ID NO: 32936 - DNA, 20 bp, Artificial Sequence
  Synthetic
gccctaccaacaaatcaccg

SEQ ID NO: 32937 - DNA, 16 bp, Artificial Sequence
  Synthetic
cgggctacggcttcct

SEQ ID NO: 32938 - DNA, 17 bp, Artificial Sequence
  Synthetic
cgcgaaatgggcattgc

SEQ ID NO: 32939 - DNA, 16 bp, Artificial Sequence
  Synthetic
aggacggcgtggtgtt

SEQ ID NO: 32940 - DNA, 18 bp, Artificial Sequence
  Synthetic
aactgcaaccccgaaacc

SEQ ID NO: 32941 - DNA, 16 bp, Artificial Sequence
  Synthetic
gcttccacgcctccga

SEQ ID NO: 32942 - DNA, 17 bp, Artificial Sequence
  Synthetic
aaaaggccgtccgttcg

SEQ ID NO: 32943 - DNA, 18 bp, Artificial Sequence
  Synthetic
cgcaaccggacgtttctg

SEQ ID NO: 32944 - DNA, 18 bp, Artificial Sequence
  Synthetic
gcataccgtttcccgacg

SEQ ID NO: 32945 - DNA, 20 bp, Artificial Sequence
  Synthetic
aacggcttgtttttcggatg

SEQ ID NO: 32946 - DNA, 20 bp, Artificial Sequence
  Synthetic
ggttaattggctgcgtatgc

SEQ ID NO: 32947 - DNA, 19 bp, Artificial Sequence
  Synthetic
gggtcagaccgaacacttg

SEQ ID NO: 32948 - DNA, 17 bp, Artificial Sequence
  Synthetic
gccggtcgaaacgcaaa

SEQ ID NO: 32949 - DNA, 18 bp, Artificial Sequence
  Synthetic
aattcggtgtcgtccacg

SEQ ID NO: 32950 - DNA, 17 bp, Artificial Sequence
  Synthetic
cggcgcggtaatttcgg

SEQ ID NO: 32951 - DNA, 20 bp, Artificial Sequence
  Synthetic
gtcggcattcggatattccc

SEQ ID NO: 32952 - DNA, 16 bp, Artificial Sequence
  Synthetic
agacagcgtgcgcctc

SEQ ID NO: 32953 - DNA, 15 bp, Artificial Sequence
  Synthetic
agcgcgtcggcaaag

SEQ ID NO: 32954 - DNA, 18 bp, Artificial Sequence
  Synthetic
cgcggtttgggtatgcac

SEQ ID NO: 32955 - DNA, 20 bp, Artificial Sequence
  Synthetic
caacccgcttccttcagttt

SEQ ID NO: 32956 - DNA, 16 bp, Artificial Sequence
  Synthetic
tcggcgcgatttgctg

SEQ ID NO: 32957 - DNA, 18 bp, Artificial Sequence
  Synthetic
ctcatcggcgacaacgtc

SEQ ID NO: 32958 - DNA, 15 bp, Artificial Sequence
  Synthetic
aacgcgcgcaacgtc

SEQ ID NO: 32959 - DNA, 16 bp, Artificial Sequence
  Synthetic
cgcgcccgattcttcg

SEQ ID NO: 32960 - DNA, 17 bp, Artificial Sequence
  Synthetic
gcaaacctgctgctgct

SEQ ID NO: 32961 - DNA, 16 bp, Artificial Sequence
  Synthetic
ttctcgcccctcgcct

SEQ ID NO: 32962 - DNA, 16 bp, Artificial Sequence
  Synthetic
tatggaagggcgcgcc

SEQ ID NO: 32963 - DNA, 17 bp, Artificial Sequence
  Synthetic
cgtcatcatcctgccgc

SEQ ID NO: 32964 - DNA, 19 bp, Artificial Sequence
  Synthetic
gcaaaaccgccctttcaga

SEQ ID NO: 32965 - DNA, 16 bp, Artificial Sequence
  Synthetic
gcacgctcgaaaccgc

SEQ ID NO: 32966 - DNA, 16 bp, Artificial Sequence
  Synthetic
cacgccgacggtttcg

SEQ ID NO: 32967 - DNA, 20 bp, Artificial Sequence
  Synthetic
cgaaaccgaacagggcatac

SEQ ID NO: 32968 - DNA, 18 bp, Artificial Sequence
  Synthetic
tgccaacgtaccagcaga

SEQ ID NO: 32969 - DNA, 16 bp, Artificial Sequence
  Synthetic
tcatcgggcgcggaaa

SEQ ID NO: 32970 - DNA, 16 bp, Artificial Sequence
  Synthetic
ggcgaagggctgctgt

SEQ ID NO: 32971 - DNA, 17 bp, Artificial Sequence
  Synthetic
gcaatatcacggggcgc

SEQ ID NO: 32972 - DNA, 17 bp, Artificial Sequence
  Synthetic
caaagccctcgccttcg

SEQ ID NO: 32973 - DNA, 17 bp, Artificial Sequence
  Synthetic
agaccacatcggcgtgt

SEQ ID NO: 32974 - DNA, 16 bp, Artificial Sequence
  Synthetic
tccagcccgccttcct

SEQ ID NO: 32975 - DNA, 16 bp, Artificial Sequence
  Synthetic
ttgagccgctgccacg

SEQ ID NO: 32976 - DNA, 16 bp, Artificial Sequence
  Synthetic
ttggtgaagctgcgcc

SEQ ID NO: 32977 - DNA, 19 bp, Artificial Sequence
  Synthetic
gacggcattttgctcacac

SEQ ID NO: 32978 - DNA, 16 bp, Artificial Sequence
  Synthetic
tcagacggcagcgacc

SEQ ID NO: 32979 - DNA, 17 bp, Artificial Sequence
  Synthetic
tcggttcgctgttgtgc

SEQ ID NO: 32980 - DNA, 16 bp, Artificial Sequence
  Synthetic
cttcgccacgcccaac

SEQ ID NO: 32981 - DNA, 16 bp, Artificial Sequence
  Synthetic
cctgcttgccgcccat

SEQ ID NO: 32982 - DNA, 19 bp, Artificial Sequence
  Synthetic
ttcatcccattcccaatca

SEQ ID NO: 32983 - DNA, 17 bp, Artificial Sequence
  Synthetic
cggcaggatttccgcct

SEQ ID NO: 32984 - DNA, 19 bp, Artificial Sequence
  Synthetic
gcgacaccaaagcaaacac

SEQ ID NO: 32985 - DNA, 16 bp, Artificial Sequence
  Synthetic
cgcagcctcgacgaac

SEQ ID NO: 32986 - DNA, 16 bp, Artificial Sequence
  Synthetic
cggcgaccactgttcg

SEQ ID NO: 32987 - DNA, 18 bp, Artificial Sequence
  Synthetic
gcttcctgcccgtcatcc

SEQ ID NO: 32988 - DNA, 16 bp, Artificial Sequence
  Synthetic
cgtcggtgcgattgcc

SEQ ID NO: 32989 - DNA, 16 bp, Artificial Sequence
  Synthetic
gccgtcattacccgcc

SEQ ID NO: 32990 - DNA, 18 bp, Artificial Sequence
  Synthetic
atccaaaccgacgttgcc

SEQ ID NO: 32991 - DNA, 20 bp, Artificial Sequence
  Synthetic
caactcccctttcgagcttt

SEQ ID NO: 32992 - DNA, 16 bp, Artificial Sequence
  Synthetic
attgccgctgcccgtc

SEQ ID NO: 32993 - DNA, 17 bp, Artificial Sequence
  Synthetic
tctgttcggggtcgctg

SEQ ID NO: 32994 - DNA, 17 bp, Artificial Sequence
  Synthetic
agggtaacgggtacgcc

SEQ ID NO: 32995 - DNA, 18 bp, Artificial Sequence
  Synthetic
cggctctgcattctgcca

SEQ ID NO: 32996 - DNA, 20 bp, Artificial Sequence
  Synthetic
actcgttttcagacggcatt

SEQ ID NO: 32997 - DNA, 16 bp, Artificial Sequence
  Synthetic
tctttcgccgccttgc

SEQ ID NO: 32998 - DNA, 19 bp, Artificial Sequence
  Synthetic
cggcatcggtttcgcaata

SEQ ID NO: 32999 - DNA, 16 bp, Artificial Sequence
  Synthetic
caaggttggcggcgac

SEQ ID NO: 33000 - DNA, 20 bp, Artificial Sequence
  Synthetic
accagacaccatgaacctct

SEQ ID NO: 33001 - DNA, 18 bp, Artificial Sequence
  Synthetic
ttgcccgcctgaacaaag

SEQ ID NO: 33002 - DNA, 19 bp, Artificial Sequence
  Synthetic
cgcagaagccaaacagcag

SEQ ID NO: 33003 - DNA, 19 bp, Artificial Sequence
  Synthetic
ggcatcaccctcaacctca

SEQ ID NO: 33004 - DNA, 16 bp, Artificial Sequence
  Synthetic
tcctgaccgcacgctg

SEQ ID NO: 33005 - DNA, 18 bp, Artificial Sequence
  Synthetic
aaacaggcacagctcgac

SEQ ID NO: 33006 - DNA, 16 bp, Artificial Sequence
  Synthetic
ccgaatggctgcacgc

SEQ ID NO: 33007 - DNA, 20 bp, Artificial Sequence
  Synthetic
cgctgattctccacatcacc

SEQ ID NO: 33008 - DNA, 17 bp, Artificial Sequence
  Synthetic
tcccgccacatcaacct

SEQ ID NO: 33009 - DNA, 18 bp, Artificial Sequence
  Synthetic
caaaccctgcacaccacg

SEQ ID NO: 33010 - DNA, 18 bp, Artificial Sequence
  Synthetic
tgctctttctgtcccccg

SEQ ID NO: 33011 - DNA, 17 bp, Artificial Sequence
  Synthetic
gccgtctgaacgttccg

SEQ ID NO: 33012 - DNA, 18 bp, Artificial Sequence
  Synthetic
cgcctatcccctgtcgtc

SEQ ID NO: 33013 - DNA, 20 bp, Artificial Sequence
  Synthetic
caccaaggcatttaggggat

SEQ ID NO: 33014 - DNA, 19 bp, Artificial Sequence
  Synthetic
ggcagttcaggcagtcgat

SEQ ID NO: 33015 - DNA, 19 bp, Artificial Sequence
  Synthetic
cctgaaactctacgccctg

SEQ ID NO: 33016 - DNA, 19 bp, Artificial Sequence
  Synthetic
cgataatggcagatacggc

SEQ ID NO: 33017 - DNA, 16 bp, Artificial Sequence
  Synthetic
cgaatggggacgcgac

SEQ ID NO: 33018 - DNA, 18 bp, Artificial Sequence
  Synthetic
catgcgcttcaccgacaa

SEQ ID NO: 33019 - DNA, 17 bp, Artificial Sequence
  Synthetic
acgaagccgccggattt

SEQ ID NO: 33020 - DNA, 17 bp, Artificial Sequence
  Synthetic
tcatccgacaaccgcga

SEQ ID NO: 33021 - DNA, 17 bp, Artificial Sequence
  Synthetic
gcccaatccgtccgcat

SEQ ID NO: 33022 - DNA, 18 bp, Artificial Sequence
  Synthetic
caggacaggcaaccgttt

SEQ ID NO: 33023 - DNA, 20 bp, Artificial Sequence
  Synthetic
aaaacgtcgaactggcattg

SEQ ID NO: 33024 - DNA, 18 bp, Artificial Sequence
  Synthetic
gcactggacgcacaagtt

SEQ ID NO: 33025 - DNA, 16 bp, Artificial Sequence
  Synthetic
gcgtgctgttccccca

SEQ ID NO: 33026 - DNA, 16 bp, Artificial Sequence
  Synthetic
tgccgtccatcctgcc

SEQ ID NO: 33027 - DNA, 17 bp, Artificial Sequence
  Synthetic
actcgccaccctttccg

SEQ ID NO: 33028 - DNA, 18 bp, Artificial Sequence
  Synthetic
gtcagcttcggacaccac

SEQ ID NO: 33029 - DNA, 18 bp, Artificial Sequence
  Synthetic
gtcgaaccgtcgcaaacc

SEQ ID NO: 33030 - DNA, 20 bp, Artificial Sequence
  Synthetic
cgtgtttgaaaaccgcgaac

SEQ ID NO: 33031 - DNA, 17 bp, Artificial Sequence
  Synthetic
cgcttatgccctgcacg

SEQ ID NO: 33032 - DNA, 20 bp, Artificial Sequence
  Synthetic
gcatttcccaagtggcgaaa

SEQ ID NO: 33033 - DNA, 16 bp, Artificial Sequence
  Synthetic
atcccccacgtcgacg

SEQ ID NO: 33034 - DNA, 16 bp, Artificial Sequence
  Synthetic
atcctgcccatcgccc

SEQ ID NO: 33035 - DNA, 18 bp, Artificial Sequence
  Synthetic
cgtccgaaccgcaacact

SEQ ID NO: 33036 - DNA, 17 bp, Artificial Sequence
  Synthetic
gcccaccttcaaacgcg

SEQ ID NO: 33037 - DNA, 18 bp, Artificial Sequence
  Synthetic
gccgttgccgtttcagac

SEQ ID NO: 33038 - DNA, 18 bp, Artificial Sequence
  Synthetic
ccgcacaacgcatacacg

SEQ ID NO: 33039 - DNA, 17 bp, Artificial Sequence
  Synthetic
gcattcaaccgccaggc

SEQ ID NO: 33040 - DNA, 16 bp, Artificial Sequence
  Synthetic
aactgcacgcactgcc

SEQ ID NO: 33041 - DNA, 16 bp, Artificial Sequence
  Synthetic
cgacggcgaaacggtg

SEQ ID NO: 33042 - DNA, 18 bp, Artificial Sequence
  Synthetic
gggaaacgggagaaacgg

SEQ ID NO: 33043 - DNA, 16 bp, Artificial Sequence
  Synthetic
gcggctcggtcgagat

SEQ ID NO: 33044 - DNA, 16 bp, Artificial Sequence
  Synthetic
agctccggatgcgctg

SEQ ID NO: 33045 - DNA, 20 bp, Artificial Sequence
  Synthetic
cctgtccaaatcttcctgcg

SEQ ID NO: 33046 - DNA, 20 bp, Artificial Sequence
  Synthetic
tgcatcagcgagtttacacc

SEQ ID NO: 33047 - DNA, 15 bp, Artificial Sequence
  Synthetic
tggcttcgcgcacga

SEQ ID NO: 33048 - DNA, 18 bp, Artificial Sequence
  Synthetic
gttgcggttgagcaggag

SEQ ID NO: 33049 - DNA, 18 bp, Artificial Sequence
  Synthetic
ctgaacataccggcgcag

SEQ ID NO: 33050 - DNA, 18 bp, Artificial Sequence
  Synthetic
ggacgcgttctgcaaaca

SEQ ID NO: 33051 - DNA, 16 bp, Artificial Sequence
  Synthetic
ggcgtgtgcttgggca

SEQ ID NO: 33052 - DNA, 18 bp, Artificial Sequence
  Synthetic
ttggcggaatattcgggc

SEQ ID NO: 33053 - DNA, 16 bp, Artificial Sequence
  Synthetic
tgcgggctacggcatg

SEQ ID NO: 33054 - DNA, 16 bp, Artificial Sequence
  Synthetic
caatcccgcaccgcag

SEQ ID NO: 33055 - DNA, 16 bp, Artificial Sequence
  Synthetic
cccttccccgcattgc

SEQ ID NO: 33056 - DNA, 16 bp, Artificial Sequence
  Synthetic
tggctgtgttccgggc

SEQ ID NO: 33057 - DNA, 20 bp, Artificial Sequence
  Synthetic
gcgaagaaaacgaaaaagga

SEQ ID NO: 33058 - DNA, 18 bp, Artificial Sequence
  Synthetic
ggtcaaaacatcggcaac

SEQ ID NO: 33059 - DNA, 17 bp, Artificial Sequence
  Synthetic
agggaattttgcgccgg

SEQ ID NO: 33060 - DNA, 20 bp, Artificial Sequence
  Synthetic
gcccaaacttttaacggctt

SEQ ID NO: 33061 - DNA, 17 bp, Artificial Sequence
  Synthetic
cggatacagcagcgcga

SEQ ID NO: 33062 - DNA, 17 bp, Artificial Sequence
  Synthetic
cacagaagcagcaccgg

SEQ ID NO: 33063 - DNA, 17 bp, Artificial Sequence
  Synthetic
tttgagcgcgtcaagca

SEQ ID NO: 33064 - DNA, 17 bp, Artificial Sequence
  Synthetic
cgccctgcaaaccgaag

SEQ ID NO: 33065 - DNA, 16 bp, Artificial Sequence
  Synthetic
aacccgcctcgccgaa

SEQ ID NO: 33066 - DNA, 20 bp, Artificial Sequence
  Synthetic
ccacatggttacactggcaa

SEQ ID NO: 33067 - DNA, 17 bp, Artificial Sequence
  Synthetic
gcgttttgccgcctctt

SEQ ID NO: 33068 - DNA, 16 bp, Artificial Sequence
  Synthetic
cgctgtgcgtggtcga

SEQ ID NO: 33069 - DNA, 18 bp, Artificial Sequence
  Synthetic
tgtccctccgcttcagat

SEQ ID NO: 33070 - DNA, 16 bp, Artificial Sequence
  Synthetic
atgctgcacgccgtcg

SEQ ID NO: 33071 - DNA, 23 bp, Artificial Sequence
  Synthetic
catgattttgaccacatcataat

SEQ ID NO: 33072 - DNA, 19 bp, Artificial Sequence
  Synthetic
gaaaacttactccgaagcg

SEQ ID NO: 33073 - DNA, 20 bp, Artificial Sequence
  Synthetic
agcaggttgtatttttgacg

SEQ ID NO: 33074 - DNA, 19 bp, Artificial Sequence
  Synthetic
gggcgacttcttcttcgtc

SEQ ID NO: 33075 - DNA, 19 bp, Artificial Sequence
  Synthetic
acatttaccgccacacaca

SEQ ID NO: 33076 - DNA, 18 bp, Artificial Sequence
  Synthetic
acacccgctcaacctgat

SEQ ID NO: 33077 - DNA, 17 bp, Artificial Sequence
  Synthetic
accgcctcaaagggacc

SEQ ID NO: 33078 - DNA, 19 bp, Artificial Sequence
  Synthetic
accgtagaagattggcaat

SEQ ID NO: 33079 - DNA, 17 bp, Artificial Sequence
  Synthetic
caaaacaacgcgctccg

SEQ ID NO: 33080 - DNA, 20 bp, Artificial Sequence
  Synthetic
acctgattaaaacacaaccg

SEQ ID NO: 33081 - DNA, 16 bp, Artificial Sequence
  Synthetic
gcccggacaccaaacc

SEQ ID NO: 33082 - DNA, 17 bp, Artificial Sequence
  Synthetic
ggcgaattggcgggaaa

SEQ ID NO: 33083 - DNA, 17 bp, Artificial Sequence
  Synthetic
ctccagcagctttgccc

SEQ ID NO: 33084 - DNA, 18 bp, Artificial Sequence
  Synthetic
ccagcttgggatctcatc

SEQ ID NO: 33085 - DNA, 18 bp, Artificial Sequence
  Synthetic
acctccgtccgaaaacct

SEQ ID NO: 33086 - DNA, 18 bp, Artificial Sequence
  Synthetic
ccggtttgcgttccgaag

SEQ ID NO: 33087 - DNA, 18 bp, Artificial Sequence
  Synthetic
agaacctgcaacgcatcg

SEQ ID NO: 33088 - DNA, 18 bp, Artificial Sequence
  Synthetic
gtgcttcggctttttgcg

SEQ ID NO: 33089 - DNA, 16 bp, Artificial Sequence
  Synthetic
tcctgccggcttaccc

SEQ ID NO: 33090 - DNA, 18 bp, Artificial Sequence
  Synthetic
attttcaggatgtggcgg

SEQ ID NO: 33091 - DNA, 17 bp, Artificial Sequence
  Synthetic
cggtcgagttcgcccat

SEQ ID NO: 33092 - DNA, 16 bp, Artificial Sequence
  Synthetic
ccgcctacacacggca

SEQ ID NO: 33093 - DNA, 20 bp, Artificial Sequence
  Synthetic
gccgcctattcttccgatac

SEQ ID NO: 33094 - DNA, 15 bp, Artificial Sequence
  Synthetic
tttgggcgcgttcgg

SEQ ID NO: 33095 - DNA, 16 bp, Artificial Sequence
  Synthetic
gcggccccgaactgat

SEQ ID NO: 33096 - DNA, 16 bp, Artificial Sequence
  Synthetic
agcaacaccgcctccg

SEQ ID NO: 33097 - DNA, 16 bp, Artificial Sequence
  Synthetic
gctgcaccgcgtgatc

SEQ ID NO: 33098 - DNA, 20 bp, Artificial Sequence
  Synthetic
gcgaaatccaagacttcggt

SEQ ID NO: 33099 - DNA, 16 bp, Artificial Sequence
  Synthetic
ggggctggcgacatca

SEQ ID NO: 33100 - DNA, 19 bp, Artificial Sequence
  Synthetic
cgataaagcgcgagaatgc

SEQ ID NO: 33101 - DNA, 16 bp, Artificial Sequence
  Synthetic
gaatgcgcgcagtccc

SEQ ID NO: 33102 - DNA, 19 bp, Artificial Sequence
  Synthetic
ggcaatgtcggcagtttct

SEQ ID NO: 33103 - DNA, 17 bp, Artificial Sequence
  Synthetic
accgaaccgacctcacc

SEQ ID NO: 33104 - DNA, 16 bp, Artificial Sequence
  Synthetic
gcttcgaccgcttcgc

SEQ ID NO: 33105 - DNA, 18 bp, Artificial Sequence
  Synthetic
tcggcgcgattttcagac

SEQ ID NO: 33106 - DNA, 20 bp, Artificial Sequence
  Synthetic
cacgcagtttttcaggatgc

SEQ ID NO: 33107 - DNA, 18 bp, Artificial Sequence
  Synthetic
caatgcctttgccacggg

SEQ ID NO: 33108 - DNA, 17 bp, Artificial Sequence
  Synthetic
ggtttgccacgcggttc

SEQ ID NO: 33109 - DNA, 19 bp, Artificial Sequence
  Synthetic
agaccttctttcatgcggc

SEQ ID NO: 33110 - DNA, 20 bp, Artificial Sequence
  Synthetic
gcttccagaaaatcgacgtg

SEQ ID NO: 33111 - DNA, 17 bp, Artificial Sequence
  Synthetic
cgaacaactcgccgcca

SEQ ID NO: 33112 - DNA, 18 bp, Artificial Sequence
  Synthetic
cgtcagcttcgccgaatc

SEQ ID NO: 33113 - DNA, 18 bp, Artificial Sequence
  Synthetic
cccaacgcaaagcccata

SEQ ID NO: 33114 - DNA, 19 bp, Artificial Sequence
  Synthetic
cgcaagtgcagattgggaa

SEQ ID NO: 33115 - DNA, 19 bp, Artificial Sequence
  Synthetic
gcagccgtctttttgcaac

SEQ ID NO: 33116 - DNA, 16 bp, Artificial Sequence
  Synthetic
ggcagcgaaggcacac

SEQ ID NO: 33117 - DNA, 15 bp, Artificial Sequence
  Synthetic
cgcctgccgcaacat

SEQ ID NO: 33118 - DNA, 16 bp, Artificial Sequence
  Synthetic
aacgcctgcgccttgc

SEQ ID NO: 33119 - DNA, 19 bp, Artificial Sequence
  Synthetic
ccatttccaaggcgcgttc

SEQ ID NO: 33120 - DNA, 16 bp, Artificial Sequence
  Synthetic
ttccgcaccctgccga

SEQ ID NO: 33121 - DNA, 23 bp, Artificial Sequence
  Synthetic
ggtttattaaaatcgcaaaaccc

SEQ ID NO: 33122 - DNA, 16 bp, Artificial Sequence
  Synthetic
accaactctccggcgg

SEQ ID NO: 33123 - DNA, 16 bp, Artificial Sequence
  Synthetic
gccgtgcagccggtat

SEQ ID NO: 33124 - DNA, 16 bp, Artificial Sequence
  Synthetic
ttcggctccggttggg

SEQ ID NO: 33125 - DNA, 20 bp, Artificial Sequence
  Synthetic
aagcgatatgattgaaggtg

SEQ ID NO: 33126 - DNA, 18 bp, Artificial Sequence
  Synthetic
gcgaaggaatcaacgcgg

SEQ ID NO: 33127 - DNA, 18 bp, Artificial Sequence
  Synthetic
gcctgttgagtatcgccc

SEQ ID NO: 33128 - DNA, 16 bp, Artificial Sequence
  Synthetic
agcaggcgcaggttgc

SEQ ID NO: 33129 - DNA, 17 bp, Artificial Sequence
  Synthetic
gagcgggaatggttcgc

SEQ ID NO: 33130 - DNA, 16 bp, Artificial Sequence
  Synthetic
aaccggcaaaccaggc

SEQ ID NO: 33131 - DNA, 18 bp, Artificial Sequence
  Synthetic
aggcaatccgaaacgcac

SEQ ID NO: 33132 - DNA, 18 bp, Artificial Sequence
  Synthetic
cgatacggcggacggttt

SEQ ID NO: 33133 - DNA, 16 bp, Artificial Sequence
  Synthetic
caatgcgccgcacctg

SEQ ID NO: 33134 - DNA, 17 bp, Artificial Sequence
  Synthetic
tcgccctataccacgcg

SEQ ID NO: 33135 - DNA, 16 bp, Artificial Sequence
  Synthetic
tgcctgcagccgagct

SEQ ID NO: 33136 - DNA, 18 bp, Artificial Sequence
  Synthetic
tgataaaacatccggcgc

SEQ ID NO: 33137 - DNA, 18 bp, Artificial Sequence
  Synthetic
ggcgtgtcagggctgttc

SEQ ID NO: 33138 - DNA, 16 bp, Artificial Sequence
  Synthetic
ataccggcggcaggtt

SEQ ID NO: 33139 - DNA, 20 bp, Artificial Sequence
  Synthetic
cgtcttttgcggttatccac

SEQ ID NO: 33140 - DNA, 20 bp, Artificial Sequence
  Synthetic
gccgatggaaaagcctttgt

SEQ ID NO: 33141 - DNA, 17 bp, Artificial Sequence
  Synthetic
gtaaccgcgcccagttt

SEQ ID NO: 33142 - DNA, 20 bp, Artificial Sequence
  Synthetic
atacgctgcttgaactcctc

SEQ ID NO: 33143 - DNA, 17 bp, Artificial Sequence
  Synthetic
acgacaccgacaggacg

SEQ ID NO: 33144 - DNA, 16 bp, Artificial Sequence
  Synthetic
tcacgggtatgggcgc

SEQ ID NO: 33145 - DNA, 16 bp, Artificial Sequence
  Synthetic
gaggcgcaaacgtggg

SEQ ID NO: 33146 - DNA, 17 bp, Artificial Sequence
  Synthetic
cgacacgcgccctgaaa

SEQ ID NO: 33147 - DNA, 19 bp, Artificial Sequence
  Synthetic
tccggctgttttcggttac

SEQ ID NO: 33148 - DNA, 16 bp, Artificial Sequence
  Synthetic
tgaacgcatcgcccgc

SEQ ID NO: 33149 - DNA, 18 bp, Artificial Sequence
  Synthetic
cccaatgtgtagcgtccc

SEQ ID NO: 33150 - DNA, 16 bp, Artificial Sequence
  Synthetic
gtcgccaagccgaagc

SEQ ID NO: 33151 - DNA, 20 bp, Artificial Sequence
  Synthetic
cggcgttcaacttatcgaca

SEQ ID NO: 33152 - DNA, 16 bp, Artificial Sequence
  Synthetic
agccctgtcgcccaga

SEQ ID NO: 33153 - DNA, 17 bp, Artificial Sequence
  Synthetic
cgtcaaacgctaccgcc

SEQ ID NO: 33154 - DNA, 17 bp, Artificial Sequence
  Synthetic
tctgccttccgcgtctt

SEQ ID NO: 33155 - DNA, 19 bp, Artificial Sequence
  Synthetic
gccttttgcgcctgatacg

SEQ ID NO: 33156 - DNA, 15 bp, Artificial Sequence
  Synthetic
tcatcacgcgcccga

SEQ ID NO: 33157 - DNA, 17 bp, Artificial Sequence
  Synthetic
cccttcccaagcctgca

SEQ ID NO: 33158 - DNA, 19 bp, Artificial Sequence
  Synthetic
gtctttgcggcgttggttt

SEQ ID NO: 33159 - DNA, 16 bp, Artificial Sequence
  Synthetic
gttgatgcctgccggg

SEQ ID NO: 33160 - DNA, 16 bp, Artificial Sequence
  Synthetic
aaagcccgcagcgtcg

SEQ ID NO: 33161 - DNA, 17 bp, Artificial Sequence
  Synthetic
tggttccggggctgtac

SEQ ID NO: 33162 - DNA, 18 bp, Artificial Sequence
  Synthetic
ggaatcaggcattggggc

SEQ ID NO: 33163 - DNA, 20 bp, Artificial Sequence
  Synthetic
caaaatagaaaaggcggctt

SEQ ID NO: 33164 - DNA, 18 bp, Artificial Sequence
  Synthetic
aactgcgttttgaacacc

SEQ ID NO: 33165 - DNA, 19 bp, Artificial Sequence
  Synthetic
gcggctaccaaagaaaccg

SEQ ID NO: 33166 - DNA, 18 bp, Artificial Sequence
  Synthetic
caagaacccagtctcgcc

SEQ ID NO: 33167 - DNA, 20 bp, Artificial Sequence
  Synthetic
gctattccgaagcggtttgc

SEQ ID NO: 33168 - DNA, 20 bp, Artificial Sequence
  Synthetic
aactcggttttcagctggaa

SEQ ID NO: 33169 - DNA, 19 bp, Artificial Sequence
  Synthetic
gctgctgtagttgtcgacg

SEQ ID NO: 33170 - DNA, 19 bp, Artificial Sequence
  Synthetic
gcttccaaggccgtctgaa

SEQ ID NO: 33171 - DNA, 18 bp, Artificial Sequence
  Synthetic
ctgcctcgaccaattccc

SEQ ID NO: 33172 - DNA, 23 bp, Artificial Sequence
  Synthetic
ttttgaaacatgaaaatccatcc

SEQ ID NO: 33173 - DNA, 17 bp, Artificial Sequence
  Synthetic
ccgaacggtggcgacat

SEQ ID NO: 33174 - DNA, 19 bp, Artificial Sequence
  Synthetic
tcggtttccaacgtatcgg

SEQ ID NO: 33175 - DNA, 17 bp, Artificial Sequence
  Synthetic
cgtggcggtctttcagg

SEQ ID NO: 33176 - DNA, 19 bp, Artificial Sequence
  Synthetic
caaaaacatccccatgcgg

SEQ ID NO: 33177 - DNA, 18 bp, Artificial Sequence
  Synthetic
tgatactcggtcgggtcg

SEQ ID NO: 33178 - DNA, 17 bp, Artificial Sequence
  Synthetic
cgcaaggcgttttcgga

SEQ ID NO: 33179 - DNA, 20 bp, Artificial Sequence
  Synthetic
ggctttcatggagtcggtaa

SEQ ID NO: 33180 - DNA, 17 bp, Artificial Sequence
  Synthetic
aaactcaaagccgccgg

SEQ ID NO: 33181 - DNA, 17 bp, Artificial Sequence
  Synthetic
gccgttgccgttttggt

SEQ ID NO: 33182 - DNA, 16 bp, Artificial Sequence
  Synthetic
acgcatcgctgccgac

SEQ ID NO: 33183 - DNA, 18 bp, Artificial Sequence
  Synthetic
tcgtactctccaacggct

SEQ ID NO: 33184 - DNA, 16 bp, Artificial Sequence
  Synthetic
ccacactgttcggcgc

SEQ ID NO: 33185 - DNA, 20 bp, Artificial Sequence
  Synthetic
gccatcgcggtattcatctc

SEQ ID NO: 33186 - DNA, 18 bp, Artificial Sequence
  Synthetic
gcctttatcgcgccgatt

SEQ ID NO: 33187 - DNA, 20 bp, Artificial Sequence
  Synthetic
ggataatcagcaggctgccc

SEQ ID NO: 33188 - DNA, 19 bp, Artificial Sequence
  Synthetic
ttgaaagaattgatggccg

SEQ ID NO: 33189 - DNA, 20 bp, Artificial Sequence
  Synthetic
tggaagaaagctttaccctg

SEQ ID NO: 33190 - DNA, 16 bp, Artificial Sequence
  Synthetic
ccgtcgcacctttgcc

SEQ ID NO: 33191 - DNA, 20 bp, Artificial Sequence
  Synthetic
tccgtccaaaccttccaaag

SEQ ID NO: 33192 - DNA, 16 bp, Artificial Sequence
  Synthetic
cgtggttggcggcaac

SEQ ID NO: 33193 - DNA, 20 bp, Artificial Sequence
  Synthetic
acatcaccaaagacgcagaa

SEQ ID NO: 33194 - DNA, 17 bp, Artificial Sequence
  Synthetic
gcgatgtcggtttcggc

SEQ ID NO: 33195 - DNA, 17 bp, Artificial Sequence
  Synthetic
cgaatacgcgggcgaag

SEQ ID NO: 33196 - DNA, 20 bp, Artificial Sequence
  Synthetic
ttacgagcgtttttctccgc

SEQ ID NO: 33197 - DNA, 16 bp, Artificial Sequence
  Synthetic
aaccgcgccgactacc

SEQ ID NO: 33198 - DNA, 18 bp, Artificial Sequence
  Synthetic
acatacaaaccggtgccg

SEQ ID NO: 33199 - DNA, 16 bp, Artificial Sequence
  Synthetic
attgcagacggcgggc

SEQ ID NO: 33200 - DNA, 19 bp, Artificial Sequence
  Synthetic
gcccgaactacgacggtag

SEQ ID NO: 33201 - DNA, 18 bp, Artificial Sequence
  Synthetic
tggcggtgaaagaactcg

SEQ ID NO: 33202 - DNA, 20 bp, Artificial Sequence
  Synthetic
gcgtttgtttcatgccgaaa

SEQ ID NO: 33203 - DNA, 19 bp, Artificial Sequence
  Synthetic
aaaccggttgaagactgat

SEQ ID NO: 33204 - DNA, 17 bp, Artificial Sequence
  Synthetic
aattcgacaccgccgtc

SEQ ID NO: 33205 - DNA, 16 bp, Artificial Sequence
  Synthetic
ctttcggcggcaaccc

SEQ ID NO: 33206 - DNA, 15 bp, Artificial Sequence
  Synthetic
tgcgccgcctgttgt

SEQ ID NO: 33207 - DNA, 17 bp, Artificial Sequence
  Synthetic
cgacaacgaagccaccc

SEQ ID NO: 33208 - DNA, 20 bp, Artificial Sequence
  Synthetic
cggttttaatcgcttgggca

SEQ ID NO: 33209 - DNA, 18 bp, Artificial Sequence
  Synthetic
ggcaacgaaatcggcgag

SEQ ID NO: 33210 - DNA, 15 bp, Artificial Sequence
  Synthetic
atgacggcggcggtt

SEQ ID NO: 33211 - DNA, 18 bp, Artificial Sequence
  Synthetic
cgggcgttttcaggagaa

SEQ ID NO: 33212 - DNA, 16 bp, Artificial Sequence
  Synthetic
acaggcttctgcggcg

SEQ ID NO: 33213 - DNA, 17 bp, Artificial Sequence
  Synthetic
ggcgcgcaaaatcaggg

SEQ ID NO: 33214 - DNA, 18 bp, Artificial Sequence
  Synthetic
acatcgccgaaaaacgcc

SEQ ID NO: 33215 - DNA, 19 bp, Artificial Sequence
  Synthetic
gcggtctcaatcccaaaga

SEQ ID NO: 33216 - DNA, 17 bp, Artificial Sequence
  Synthetic
gcggcggacgtattgca

SEQ ID NO: 33217 - DNA, 24 bp, Artificial Sequence
  Synthetic
ggtaacatatctgctaatctggta

SEQ ID NO: 33218 - DNA, 19 bp, Artificial Sequence
  Synthetic
aagtcgaagccaacgaagg

SEQ ID NO: 33219 - DNA, 20 bp, Artificial Sequence
  Synthetic
gtaaaaacttcggttgcggc

SEQ ID NO: 33220 - DNA, 19 bp, Artificial Sequence
  Synthetic
cgtttcaacgccgaagaca

SEQ ID NO: 33221 - DNA, 18 bp, Artificial Sequence
  Synthetic
ccagggcatcgtacacgt

SEQ ID NO: 33222 - DNA, 18 bp, Artificial Sequence
  Synthetic
ccgtccccatccctttgt

SEQ ID NO: 33223 - DNA, 17 bp, Artificial Sequence
  Synthetic
gcgcgtgcaaaccgatt

SEQ ID NO: 33224 - DNA, 18 bp, Artificial Sequence
  Synthetic
gtctgtgcgcaaaagctg

SEQ ID NO: 33225 - DNA, 17 bp, Artificial Sequence
  Synthetic
gtccgcccagcaggaaa

SEQ ID NO: 33226 - DNA, 17 bp, Artificial Sequence
  Synthetic
tgtccttcacgccggaa

SEQ ID NO: 33227 - DNA, 17 bp, Artificial Sequence
  Synthetic
cggcgttcggatgcgaa

SEQ ID NO: 33228 - DNA, 16 bp, Artificial Sequence
  Synthetic
cgcgtccgtagcccaa

SEQ ID NO: 33229 - DNA, 16 bp, Artificial Sequence
  Synthetic
aaccctcgtccgcgtc

SEQ ID NO: 33230 - DNA, 15 bp, Artificial Sequence
  Synthetic
cgcttcgcgcccaaa

SEQ ID NO: 33231 - DNA, 23 bp, Artificial Sequence
  Synthetic
gtattatcaatgacaacggtaga

SEQ ID NO: 33232 - DNA, 18 bp, Artificial Sequence
  Synthetic
cctacggtactgcctgta

SEQ ID NO: 33233 - DNA, 17 bp, Artificial Sequence
  Synthetic
gccgtacccagcatcct

SEQ ID NO: 33234 - DNA, 16 bp, Artificial Sequence
  Synthetic
caaacgcaggtcgccg

SEQ ID NO: 33235 - DNA, 18 bp, Artificial Sequence
  Synthetic
cacgataatggcggcagg

SEQ ID NO: 33236 - DNA, 16 bp, Artificial Sequence
  Synthetic
atccctcgccagagcc

SEQ ID NO: 33237 - DNA, 17 bp, Artificial Sequence
  Synthetic
cgtaccggcgacctgat

SEQ ID NO: 33238 - DNA, 20 bp, Artificial Sequence
  Synthetic
ggtatgcccgaattgcacaa

SEQ ID NO: 33239 - DNA, 16 bp, Artificial Sequence
  Synthetic
gcaacatcggacgcgg

SEQ ID NO: 33240 - DNA, 17 bp, Artificial Sequence
  Synthetic
tcgaagcgggactgctt

SEQ ID NO: 33241 - DNA, 18 bp, Artificial Sequence
  Synthetic
gcgtttcctgcgtggtaa

SEQ ID NO: 33242 - DNA, 18 bp, Artificial Sequence
  Synthetic
cctgcgctttgagttcgg

SEQ ID NO: 33243 - DNA, 17 bp, Artificial Sequence
  Synthetic
tcagcccaccgatccaa

SEQ ID NO: 33244 - DNA, 18 bp, Artificial Sequence
  Synthetic
gccccaaagccctggttt

SEQ ID NO: 33245 - DNA, 17 bp, Artificial Sequence
  Synthetic
gcatgaacggccaaggc

SEQ ID NO: 33246 - DNA, 19 bp, Artificial Sequence
  Synthetic
cagtttgcgcaaagcctga

SEQ ID NO: 33247 - DNA, 17 bp, Artificial Sequence
  Synthetic
aatgggcgcattcaccc

SEQ ID NO: 33248 - DNA, 19 bp, Artificial Sequence
  Synthetic
cggcccaaaaccttttccg

SEQ ID NO: 33249 - DNA, 17 bp, Artificial Sequence
  Synthetic
cccgaagccgtggatgt

SEQ ID NO: 33250 - DNA, 18 bp, Artificial Sequence
  Synthetic
gctctatggcgcgattgc

SEQ ID NO: 33251 - DNA, 17 bp, Artificial Sequence
  Synthetic
cgaccaaatcgtccggc

SEQ ID NO: 33252 - DNA, 17 bp, Artificial Sequence
  Synthetic
atcgtcagccgttcggc

SEQ ID NO: 33253 - DNA, 16 bp, Artificial Sequence
  Synthetic
actggctcgccctgct

SEQ ID NO: 33254 - DNA, 16 bp, Artificial Sequence
  Synthetic
ccgccttcgccgaaga

SEQ ID NO: 33255 - DNA, 16 bp, Artificial Sequence
  Synthetic
tgcgcccggtacaacc

SEQ ID NO: 33256 - DNA, 19 bp, Artificial Sequence
  Synthetic
cgtaatttcctgttgccaa

SEQ ID NO: 33257 - DNA, 18 bp, Artificial Sequence
  Synthetic
ccaactggccggtacact

SEQ ID NO: 33258 - DNA, 18 bp, Artificial Sequence
  Synthetic
agccgaaacacgaaacgc

SEQ ID NO: 33259 - DNA, 20 bp, Artificial Sequence
  Synthetic
ccaagaaggaaataccggat

SEQ ID NO: 33260 - DNA, 18 bp, Artificial Sequence
  Synthetic
cagtcctcttgagcagtt

SEQ ID NO: 33261 - DNA, 20 bp, Artificial Sequence
  Synthetic
ggcaagctttattatcgtgt

SEQ ID NO: 33262 - DNA, 18 bp, Artificial Sequence
  Synthetic
cttcttgtgaagcagtgc

SEQ ID NO: 33263 - DNA, 20 bp, Artificial Sequence
  Synthetic
tcattaaaagcttgttggcc

SEQ ID NO: 33264 - DNA, 21 bp, Artificial Sequence
  Synthetic
cagttcaactttttgttcgtg

SEQ ID NO: 33265 - DNA, 18 bp, Artificial Sequence
  Synthetic
attcgacgtgacagtctg

SEQ ID NO: 33266 - DNA, 22 bp, Artificial Sequence
  Synthetic
cgtcaaacaagatgtcaatttg

SEQ ID NO: 33267 - DNA, 18 bp, Artificial Sequence
  Synthetic
ctgtttgagcaggtcggg

SEQ ID NO: 33268 - DNA, 15 bp, Artificial Sequence
  Synthetic
agtggtcggcggcaa

SEQ ID NO: 33269 - DNA, 18 bp, Artificial Sequence
  Synthetic
cgatacgggtggtgcaaa

SEQ ID NO: 33270 - DNA, 16 bp, Artificial Sequence
  Synthetic
tccgtgccggcaaaca

SEQ ID NO: 33271 - DNA, 18 bp, Artificial Sequence
  Synthetic
ctttgtagggaacgcggc

SEQ ID NO: 33272 - DNA, 17 bp, Artificial Sequence
  Synthetic
cggcgcgatgatttcgg

SEQ ID NO: 33273 - DNA, 16 bp, Artificial Sequence
  Synthetic
aggaatgcgggggacg

SEQ ID NO: 33274 - DNA, 19 bp, Artificial Sequence
  Synthetic
cggttgctgacattgtcgt

SEQ ID NO: 33275 - DNA, 16 bp, Artificial Sequence
  Synthetic
cgccctgcttcgagga

SEQ ID NO: 33276 - DNA, 19 bp, Artificial Sequence
  Synthetic
cgacgatttggttgcccaa

SEQ ID NO: 33277 - DNA, 17 bp, Artificial Sequence
  Synthetic
cggcaaacggcatcacc

SEQ ID NO: 33278 - DNA, 19 bp, Artificial Sequence
  Synthetic
gtgctgcaccatcattggg

SEQ ID NO: 33279 - DNA, 16 bp, Artificial Sequence
  Synthetic
ccaacgcgggtttggg

SEQ ID NO: 33280 - DNA, 18 bp, Artificial Sequence
  Synthetic
gtgcaagatccgggcaat

SEQ ID NO: 33281 - DNA, 19 bp, Artificial Sequence
  Synthetic
ttaccgtacaggcaatgcg

SEQ ID NO: 33282 - DNA, 20 bp, Artificial Sequence
  Synthetic
cctacggtttggacgatgac

SEQ ID NO: 33283 - DNA, 16 bp, Artificial Sequence
  Synthetic
ccgacggcgaatggct

SEQ ID NO: 33284 - DNA, 19 bp, Artificial Sequence
  Synthetic
cctatttcgacgacgcgca

SEQ ID NO: 33285 - DNA, 18 bp, Artificial Sequence
  Synthetic
ttgaggacgttttgcgcg

SEQ ID NO: 33286 - DNA, 20 bp, Artificial Sequence
  Synthetic
gcgaaggttttgatatgccg

SEQ ID NO: 33287 - DNA, 19 bp, Artificial Sequence
  Synthetic
gcggttgtcgaatgttccg

SEQ ID NO: 33288 - DNA, 16 bp, Artificial Sequence
  Synthetic
aaggcgagctggcgga

SEQ ID NO: 33289 - DNA, 18 bp, Artificial Sequence
  Synthetic
gtgtccaccattacgggc

SEQ ID NO: 33290 - DNA, 15 bp, Artificial Sequence
  Synthetic
tgggcgcggacatca

SEQ ID NO: 33291 - DNA, 20 bp, Artificial Sequence
  Synthetic
cctgtgtcttcgatgagctg

SEQ ID NO: 33292 - DNA, 17 bp, Artificial Sequence
  Synthetic
atgtgccgtctgaacgc

SEQ ID NO: 33293 - DNA, 18 bp, Artificial Sequence
  Synthetic
gagacaacgatgcgggga

SEQ ID NO: 33294 - DNA, 19 bp, Artificial Sequence
  Synthetic
gttatgcggcaaatcaggc

SEQ ID NO: 33295 - DNA, 19 bp, Artificial Sequence
  Synthetic
ttaggcggcgaaaccattt

SEQ ID NO: 33296 - DNA, 17 bp, Artificial Sequence
  Synthetic
gcgcggcaaagtcagag

SEQ ID NO: 33297 - DNA, 18 bp, Artificial Sequence
  Synthetic
tgaatattgcccgtgccc

SEQ ID NO: 33298 - DNA, 18 bp, Artificial Sequence
  Synthetic
ctttggcgaggttggctt

SEQ ID NO: 33299 - DNA, 22 bp, Artificial Sequence
  Synthetic
gaaatcgcagtattgaaaaagt

SEQ ID NO: 33300 - DNA, 18 bp, Artificial Sequence
  Synthetic
gccgaactcgctgactgc

SEQ ID NO: 33301 - DNA, 20 bp, Artificial Sequence
  Synthetic
gggtctgatatgctgcaatt

SEQ ID NO: 33302 - DNA, 18 bp, Artificial Sequence
  Synthetic
gttttcaggatgccgggc

SEQ ID NO: 33303 - DNA, 18 bp, Artificial Sequence
  Synthetic
cggggaagtcggctttgt

SEQ ID NO: 33304 - DNA, 17 bp, Artificial Sequence
  Synthetic
ttatgcgcgaactcggc

SEQ ID NO: 33305 - DNA, 17 bp, Artificial Sequence
  Synthetic
ggcgcaaagggcaacag

SEQ ID NO: 33306 - DNA, 18 bp, Artificial Sequence
  Synthetic
aacaaacgctccgaaccg

SEQ ID NO: 33307 - DNA, 18 bp, Artificial Sequence
  Synthetic
aatccccctgaccgtacg

SEQ ID NO: 33308 - DNA, 18 bp, Artificial Sequence
  Synthetic
gccgcagtcttgacgttt

SEQ ID NO: 33309 - DNA, 15 bp, Artificial Sequence
  Synthetic
tggcaagcgcgacga

SEQ ID NO: 33310 - DNA, 17 bp, Artificial Sequence
  Synthetic
tgctcctcgcctcatgc

SEQ ID NO: 33311 - DNA, 16 bp, Artificial Sequence
  Synthetic
acctcgacccccgttc

SEQ ID NO: 33312 - DNA, 18 bp, Artificial Sequence
  Synthetic
gaggacaccgttttcgcc

SEQ ID NO: 33313 - DNA, 19 bp, Artificial Sequence
  Synthetic
cctcgacagccatcccaat

SEQ ID NO: 33314 - DNA, 20 bp, Artificial Sequence
  Synthetic
gcccctgatgtttcaagtcg

SEQ ID NO: 33315 - DNA, 20 bp, Artificial Sequence
  Synthetic
gcgtagtcatgcgttttcct

SEQ ID NO: 33316 - DNA, 19 bp, Artificial Sequence
  Synthetic
aaatgattgagcgcaaaga

SEQ ID NO: 33317 - DNA, 16 bp, Artificial Sequence
  Synthetic
tcggcacaacctgcgc

SEQ ID NO: 33318 - DNA, 17 bp, Artificial Sequence
  Synthetic
cgaagccgtccgtttcg

SEQ ID NO: 33319 - DNA, 16 bp, Artificial Sequence
  Synthetic
ttcgtgcagtcgggcg

SEQ ID NO: 33320 - DNA, 17 bp, Artificial Sequence
  Synthetic
gagtccgaccgtccaca

SEQ ID NO: 33321 - DNA, 19 bp, Artificial Sequence
  Synthetic
cgtgccgaacatgggtatg

SEQ ID NO: 33322 - DNA, 16 bp, Artificial Sequence
  Synthetic
gaatcgcggcggcttc

SEQ ID NO: 33323 - DNA, 20 bp, Artificial Sequence
  Synthetic
cgcagaacatggtgtcgtaa

SEQ ID NO: 33324 - DNA, 19 bp, Artificial Sequence
  Synthetic
tgttgttgaggtcgaggat

SEQ ID NO: 33325 - DNA, 16 bp, Artificial Sequence
  Synthetic
ggccaaacgtgtcgct

SEQ ID NO: 33326 - DNA, 18 bp, Artificial Sequence
  Synthetic
cgcccccgaatttttgca

SEQ ID NO: 33327 - DNA, 16 bp, Artificial Sequence
  Synthetic
caaacgcccgatgccc

SEQ ID NO: 33328 - DNA, 20 bp, Artificial Sequence
  Synthetic
ccatgcctgcatcaaatcgg

SEQ ID NO: 33329 - DNA, 19 bp, Artificial Sequence
  Synthetic
tcatatggcgtgtctcccg

SEQ ID NO: 33330 - DNA, 17 bp, Artificial Sequence
  Synthetic
acgtcgagggcttggaa

SEQ ID NO: 33331 - DNA, 16 bp, Artificial Sequence
  Synthetic
aagggtcgccgctgtc

SEQ ID NO: 33332 - DNA, 20 bp, Artificial Sequence
  Synthetic
gctttttctgccggtttacg

SEQ ID NO: 33333 - DNA, 20 bp, Artificial Sequence
  Synthetic
tgcccgtaaattccaacacg

SEQ ID NO: 33334 - DNA, 20 bp, Artificial Sequence
  Synthetic
ccttgtttcagcgtgttgcc

SEQ ID NO: 33335 - DNA, 20 bp, Artificial Sequence
  Synthetic
ggcaattttgacgaaacgcc

SEQ ID NO: 33336 - DNA, 19 bp, Artificial Sequence
  Synthetic
cggcaaccaaatcgtcgat

SEQ ID NO: 33337 - DNA, 21 bp, Artificial Sequence
  Synthetic
ttgttgatacggtttcccaaa

SEQ ID NO: 33338 - DNA, 19 bp, Artificial Sequence
  Synthetic
cggcatttccacaggttcg

SEQ ID NO: 33339 - DNA, 18 bp, Artificial Sequence
  Synthetic
tcaatcgtgttcaaacgc

SEQ ID NO: 33340 - DNA, 18 bp, Artificial Sequence
  Synthetic
tttcaagcgcatacaggc

SEQ ID NO: 33341 - DNA, 18 bp, Artificial Sequence
  Synthetic
tagtccattgtgcgccct

SEQ ID NO: 33342 - DNA, 21 bp, Artificial Sequence
  Synthetic
aataaataggcagcctgaaac

SEQ ID NO: 33343 - DNA, 19 bp, Artificial Sequence
  Synthetic
ttttggttagcagcacggt

SEQ ID NO: 33344 - DNA, 18 bp, Artificial Sequence
  Synthetic
aatccaagctgcctgaaa

SEQ ID NO: 33345 - DNA, 23 bp, Artificial Sequence
  Synthetic
tatgacgaacttcatcatcatgt

SEQ ID NO: 33346 - DNA, 18 bp, Artificial Sequence
  Synthetic
ttgtgtcgtgtctcatcg

SEQ ID NO: 33347 - DNA, 15 bp, Artificial Sequence
  Synthetic
aagcattgccgcccg

SEQ ID NO: 33348 - DNA, 17 bp, Artificial Sequence
  Synthetic
gtagcgcagattgccgg

SEQ ID NO: 33349 - DNA, 21 bp, Artificial Sequence
  Synthetic
ggatatggatgtccgacaatc

SEQ ID NO: 33350 - DNA, 20 bp, Artificial Sequence
  Synthetic
ctgaaacaatcgtctcaagg

SEQ ID NO: 33351 - DNA, 20 bp, Artificial Sequence
  Synthetic
gaaattgtagagcggctcca

SEQ ID NO: 33352 - DNA, 18 bp, Artificial Sequence
  Synthetic
cgcctgattcccctttcc

SEQ ID NO: 33353 - DNA, 23 bp, Artificial Sequence
  Synthetic
ggtatcaaaccgaattttttgtg

SEQ ID NO: 33354 - DNA, 20 bp, Artificial Sequence
  Synthetic
ggataggcaaaaaccggctc

SEQ ID NO: 33355 - DNA, 15 bp, Artificial Sequence
  Synthetic
catcgctgcgccgtt

SEQ ID NO: 33356 - DNA, 17 bp, Artificial Sequence
  Synthetic
tccgggtgcgttcaaac

SEQ ID NO: 33357 - DNA, 15 bp, Artificial Sequence
  Synthetic
ttcggcgcagtggca

SEQ ID NO: 33358 - DNA, 19 bp, Artificial Sequence
  Synthetic
ggtacacaattgtcccggg

SEQ ID NO: 33359 - DNA, 19 bp, Artificial Sequence
  Synthetic
cctcgtctatcagttccaa

SEQ ID NO: 33360 - DNA, 20 bp, Artificial Sequence
  Synthetic
ggtatgcagaccgtatcgtc

SEQ ID NO: 33361 - DNA, 18 bp, Artificial Sequence
  Synthetic
tttcccaaagccgcgaag

SEQ ID NO: 33362 - DNA, 20 bp, Artificial Sequence
  Synthetic
cgaagccacgaaaccgtaaa

SEQ ID NO: 33363 - DNA, 18 bp, Artificial Sequence
  Synthetic
acctttcgtatcggcggt

SEQ ID NO: 33364 - DNA, 18 bp, Artificial Sequence
  Synthetic
gcggatgattcggaggca

SEQ ID NO: 33365 - DNA, 17 bp, Artificial Sequence
  Synthetic
gttttcgcggcaatgcc

SEQ ID NO: 33366 - DNA, 17 bp, Artificial Sequence
  Synthetic
gcgtccagggtcagctt

SEQ ID NO: 33367 - DNA, 18 bp, Artificial Sequence
  Synthetic
tattttactgcgcccgcc

SEQ ID NO: 33368 - DNA, 20 bp, Artificial Sequence
  Synthetic
gactacggtgttgtcggaac

SEQ ID NO: 33369 - DNA, 16 bp, Artificial Sequence
  Synthetic
ttcttcgggcgcgagg

SEQ ID NO: 33370 - DNA, 20 bp, Artificial Sequence
  Synthetic
caacagcagtttttcggtgg

SEQ ID NO: 33371 - DNA, 17 bp, Artificial Sequence
  Synthetic
atagcggcaatgtcggc

SEQ ID NO: 33372 - DNA, 16 bp, Artificial Sequence
  Synthetic
aggtgcgcgaggtgtc

SEQ ID NO: 33373 - DNA, 17 bp, Artificial Sequence
  Synthetic
gcttgaccacggcaacc

SEQ ID NO: 33374 - DNA, 16 bp, Artificial Sequence
  Synthetic
ttccgccctgccgatt

SEQ ID NO: 33375 - DNA, 18 bp, Artificial Sequence
  Synthetic
gcggtggcttcgatgttg

SEQ ID NO: 33376 - DNA, 19 bp, Artificial Sequence
  Synthetic
cctggctgttccatcatgc

SEQ ID NO: 33377 - DNA, 16 bp, Artificial Sequence
  Synthetic
gcaggctttgacgggc

SEQ ID NO: 33378 - DNA, 17 bp, Artificial Sequence
  Synthetic
ccgcgcggaaactttga

SEQ ID NO: 33379 - DNA, 16 bp, Artificial Sequence
  Synthetic
tttcgggcaggtgcgc

SEQ ID NO: 33380 - DNA, 16 bp, Artificial Sequence
  Synthetic
ggcggcagatcgagga

SEQ ID NO: 33381 - DNA, 17 bp, Artificial Sequence
  Synthetic
cgcctcgccgaaagcat

SEQ ID NO: 33382 - DNA, 18 bp, Artificial Sequence
  Synthetic
tgaaaaccttgccgggac

SEQ ID NO: 33383 - DNA, 18 bp, Artificial Sequence
  Synthetic
cggactatacggcggacg

SEQ ID NO: 33384 - DNA, 16 bp, Artificial Sequence
  Synthetic
cggcggcttatgcgac

SEQ ID NO: 33385 - DNA, 18 bp, Artificial Sequence
  Synthetic
caggcctgaaaccgaccc

SEQ ID NO: 33386 - DNA, 17 bp, Artificial Sequence
  Synthetic
gcggacgcttggggtat

SEQ ID NO: 33387 - DNA, 16 bp, Artificial Sequence
  Synthetic
atgcggcagacgaggg

SEQ ID NO: 33388 - DNA, 15 bp, Artificial Sequence
  Synthetic
tccggcaaaagcgcg

SEQ ID NO: 33389 - DNA, 16 bp, Artificial Sequence
  Synthetic
gccggaagctggaagc

SEQ ID NO: 33390 - DNA, 17 bp, Artificial Sequence
  Synthetic
cggcttgccgtacatcg

SEQ ID NO: 33391 - DNA, 20 bp, Artificial Sequence
  Synthetic
gccgtccgtttgaaatgttc

SEQ ID NO: 33392 - DNA, 16 bp, Artificial Sequence
  Synthetic
ccgatgccgcgtcctt

SEQ ID NO: 33393 - DNA, 16 bp, Artificial Sequence
  Synthetic
acaccacggcggatgt

SEQ ID NO: 33394 - DNA, 19 bp, Artificial Sequence
  Synthetic
caagtcggcaagatggtta

SEQ ID NO: 33395 - DNA, 18 bp, Artificial Sequence
  Synthetic
aaccccttgggcgaagtg

SEQ ID NO: 33396 - DNA, 18 bp, Artificial Sequence
  Synthetic
taaacaacgggtgcacgc

SEQ ID NO: 33397 - DNA, 20 bp, Artificial Sequence
  Synthetic
ccattgcacatccataccga

SEQ ID NO: 33398 - DNA, 16 bp, Artificial Sequence
  Synthetic
ctttaccgcccggcac

SEQ ID NO: 33399 - DNA, 18 bp, Artificial Sequence
  Synthetic
cgtccaacacggtggtca

SEQ ID NO: 33400 - DNA, 17 bp, Artificial Sequence
  Synthetic
gcgatgtcggcaatgct

SEQ ID NO: 33401 - DNA, 17 bp, Artificial Sequence
  Synthetic
ggcgggtgctggtttct

SEQ ID NO: 33402 - DNA, 17 bp, Artificial Sequence
  Synthetic
cgtctgcctttacgccg

SEQ ID NO: 33403 - DNA, 16 bp, Artificial Sequence
  Synthetic
cggcggtcagctccat

SEQ ID NO: 33404 - DNA, 23 bp, Artificial Sequence
  Synthetic
gcttgaagttttaaaggagaaga

SEQ ID NO: 33405 - DNA, 20 bp, Artificial Sequence
  Synthetic
cgtgagctgggtttaaaacg

SEQ ID NO: 33406 - DNA, 20 bp, Artificial Sequence
  Synthetic
gcggcactgttttaccgtaa

SEQ ID NO: 33407 - DNA, 18 bp, Artificial Sequence
  Synthetic
cggatgatgccgtggaac

SEQ ID NO: 33408 - DNA, 19 bp, Artificial Sequence
  Synthetic
gctgtttgaggtcggggat

SEQ ID NO: 33409 - DNA, 16 bp, Artificial Sequence
  Synthetic
tcgaataccgcgccgc

SEQ ID NO: 33410 - DNA, 19 bp, Artificial Sequence
  Synthetic
cccatagacatcgcttcgc

SEQ ID NO: 33411 - DNA, 16 bp, Artificial Sequence
  Synthetic
ggaagcggccagccat

SEQ ID NO: 33412 - DNA, 18 bp, Artificial Sequence
  Synthetic
accatttggcagccgttg

SEQ ID NO: 33413 - DNA, 16 bp, Artificial Sequence
  Synthetic
ggcggtaatggcggga

SEQ ID NO: 33414 - DNA, 16 bp, Artificial Sequence
  Synthetic
atccccgcgtatgccg

SEQ ID NO: 33415 - DNA, 19 bp, Artificial Sequence
  Synthetic
cttcgtcgaaaaggtgcga

SEQ ID NO: 33416 - DNA, 16 bp, Artificial Sequence
  Synthetic
atgccgcccggaatgc

SEQ ID NO: 33417 - DNA, 18 bp, Artificial Sequence
  Synthetic
cgcgacccatggctaact

SEQ ID NO: 33418 - DNA, 16 bp, Artificial Sequence
  Synthetic
aggcggctgcggtttc

SEQ ID NO: 33419 - DNA, 17 bp, Artificial Sequence
  Synthetic
gcggggttgctgctgta

SEQ ID NO: 33420 - DNA, 20 bp, Artificial Sequence
  Synthetic
gcaaagtttgacaacgattc

SEQ ID NO: 33421 - DNA, 18 bp, Artificial Sequence
  Synthetic
gcgcgctggatttttgtc

SEQ ID NO: 33422 - DNA, 18 bp, Artificial Sequence
  Synthetic
cttcacgtttacgccgcc

SEQ ID NO: 33423 - DNA, 16 bp, Artificial Sequence
  Synthetic
cccaaatcgcgcaggc

SEQ ID NO: 33424 - DNA, 15 bp, Artificial Sequence
  Synthetic
agcgtttgccgtggc

SEQ ID NO: 33425 - DNA, 18 bp, Artificial Sequence
  Synthetic
catcgtttggccttggct

SEQ ID NO: 33426 - DNA, 16 bp, Artificial Sequence
  Synthetic
ccgtcgtcgccctgat

SEQ ID NO: 33427 - DNA, 20 bp, Artificial Sequence
  Synthetic
gctacgatgtggacagcatc

SEQ ID NO: 33428 - DNA, 18 bp, Artificial Sequence
  Synthetic
tgattatcggcggcgaag

SEQ ID NO: 33429 - DNA, 20 bp, Artificial Sequence
  Synthetic
tgaaagaacacggcgacatc

SEQ ID NO: 33430 - DNA, 16 bp, Artificial Sequence
  Synthetic
cacaacaccgccgcac

SEQ ID NO: 33431 - DNA, 19 bp, Artificial Sequence
  Synthetic
agaccgacatttcgctgtc

SEQ ID NO: 33432 - DNA, 18 bp, Artificial Sequence
  Synthetic
ggcagccaggaatgaggc

SEQ ID NO: 33433 - DNA, 19 bp, Artificial Sequence
  Synthetic
gccgctgaaacgtaccaat

SEQ ID NO: 33434 - DNA, 16 bp, Artificial Sequence
  Synthetic
acgaacagcccggcat

SEQ ID NO: 33435 - DNA, 19 bp, Artificial Sequence
  Synthetic
gccgtcggtcagtgtgaaa

SEQ ID NO: 33436 - DNA, 19 bp, Artificial Sequence
  Synthetic
tgaggatggcttgggcaat

SEQ ID NO: 33437 - DNA, 16 bp, Artificial Sequence
  Synthetic
cggatgccagttgcgc

SEQ ID NO: 33438 - DNA, 18 bp, Artificial Sequence
  Synthetic
tgaaacatacgccggtcg

SEQ ID NO: 33439 - DNA, 16 bp, Artificial Sequence
  Synthetic
gatgacgacgcggctg

SEQ ID NO: 33440 - DNA, 16 bp, Artificial Sequence
  Synthetic
aggcgcggacgagttc

SEQ ID NO: 33441 - DNA, 19 bp, Artificial Sequence
  Synthetic
gaatgactatgcggcaatt

SEQ ID NO: 33442 - DNA, 20 bp, Artificial Sequence
  Synthetic
cagataaaccgccgatggaa

SEQ ID NO: 33443 - DNA, 19 bp, Artificial Sequence
  Synthetic
gattttccggtcaggtcgg

SEQ ID NO: 33444 - DNA, 20 bp, Artificial Sequence
  Synthetic
gcgcatggcaaacaaaatgc

SEQ ID NO: 33445 - DNA, 19 bp, Artificial Sequence
  Synthetic
gaacaggtaggtcagcacg

SEQ ID NO: 33446 - DNA, 18 bp, Artificial Sequence
  Synthetic
gacgaccgcttcctgaac

SEQ ID NO: 33447 - DNA, 19 bp, Artificial Sequence
  Synthetic
gttatcccttgtccgctcc

SEQ ID NO: 33448 - DNA, 18 bp, Artificial Sequence
  Synthetic
cgagcctatgttctggct

SEQ ID NO: 33449 - DNA, 21 bp, Artificial Sequence
  Synthetic
ttctgaaaatgctgattgtca

SEQ ID NO: 33450 - DNA, 17 bp, Artificial Sequence
  Synthetic
cacggacaggaacggga

SEQ ID NO: 33451 - DNA, 20 bp, Artificial Sequence
  Synthetic
ccgaaacatgattttttgcc

SEQ ID NO: 33452 - DNA, 20 bp, Artificial Sequence
  Synthetic
ggttggtgtcttcggcaaat

SEQ ID NO: 33453 - DNA, 20 bp, Artificial Sequence
  Synthetic
ggtgtgtacggtttcttggc

SEQ ID NO: 33454 - DNA, 16 bp, Artificial Sequence
  Synthetic
ccactttggccgctgc

SEQ ID NO: 33455 - DNA, 16 bp, Artificial Sequence
  Synthetic
gccgaaccgcgatgtg

SEQ ID NO: 33456 - DNA, 18 bp, Artificial Sequence
  Synthetic
gatgacgatgcggctgac

SEQ ID NO: 33457 - DNA, 19 bp, Artificial Sequence
  Synthetic
tttgttgcctgcttttgcc

SEQ ID NO: 33458 - DNA, 16 bp, Artificial Sequence
  Synthetic
gcgctgaccacgggtt

SEQ ID NO: 33459 - DNA, 17 bp, Artificial Sequence
  Synthetic
tgcacaccgaccctgaa

SEQ ID NO: 33460 - DNA, 17 bp, Artificial Sequence
  Synthetic
gggacacaccaacaccg

SEQ ID NO: 33461 - DNA, 16 bp, Artificial Sequence
  Synthetic
accgtgtccgccgttt

SEQ ID NO: 33462 - DNA, 17 bp, Artificial Sequence
  Synthetic
ttttcagcagtccggcg

SEQ ID NO: 33463 - DNA, 20 bp, Artificial Sequence
  Synthetic
cgggttgaaagcctcatcac

SEQ ID NO: 33464 - DNA, 18 bp, Artificial Sequence
  Synthetic
ggagaaaggctcgtgcaa

SEQ ID NO: 33465 - DNA, 20 bp, Artificial Sequence
  Synthetic
tgtttcagcaaattccccca

SEQ ID NO: 33466 - DNA, 20 bp, Artificial Sequence
  Synthetic
caataccgtccggcatgatt

SEQ ID NO: 33467 - DNA, 19 bp, Artificial Sequence
  Synthetic
caagggtatggctgttcgc

SEQ ID NO: 33468 - DNA, 20 bp, Artificial Sequence
  Synthetic
cccatatatccgcaaagtca

SEQ ID NO: 33469 - DNA, 18 bp, Artificial Sequence
  Synthetic
acgaaatgccgctttggt

SEQ ID NO: 33470 - DNA, 19 bp, Artificial Sequence
  Synthetic
ccaattcgcgtgacaggat

SEQ ID NO: 33471 - DNA, 17 bp, Artificial Sequence
  Synthetic
caacggggacagaacgc

SEQ ID NO: 33472 - DNA, 18 bp, Artificial Sequence
  Synthetic
cggcaggatattggcagg

SEQ ID NO: 33473 - DNA, 18 bp, Artificial Sequence
  Synthetic
cttttgcctcgccgcttt

SEQ ID NO: 33474 - DNA, 19 bp, Artificial Sequence
  Synthetic
gccttggaatgcgtcgata

SEQ ID NO: 33475 - DNA, 16 bp, Artificial Sequence
  Synthetic
caatgcgtccgcctcg

SEQ ID NO: 33476 - DNA, 16 bp, Artificial Sequence
  Synthetic
ggatacacgcgcgcat

SEQ ID NO: 33477 - DNA, 20 bp, Artificial Sequence
  Synthetic
gcccatcatggtcaggtaca

SEQ ID NO: 33478 - DNA, 18 bp, Artificial Sequence
  Synthetic
tcgccgtcgatgactttc

SEQ ID NO: 33479 - DNA, 17 bp, Artificial Sequence
  Synthetic
gccgtacacgtcgtcca

SEQ ID NO: 33480 - DNA, 16 bp, Artificial Sequence
  Synthetic
cgcctgccgacaatgc

SEQ ID NO: 33481 - DNA, 18 bp, Artificial Sequence
  Synthetic
ccctacctgccgatggaa

SEQ ID NO: 33482 - DNA, 18 bp, Artificial Sequence
  Synthetic
gcgaagacatccgcgaaa

SEQ ID NO: 33483 - DNA, 16 bp, Artificial Sequence
  Synthetic
gcgtctattgcgcgcc

SEQ ID NO: 33484 - DNA, 18 bp, Artificial Sequence
  Synthetic
ccgtcctcaaaggcttgg

SEQ ID NO: 33485 - DNA, 20 bp, Artificial Sequence
  Synthetic
tgttggaaaaattggcgcaa

SEQ ID NO: 33486 - DNA, 18 bp, Artificial Sequence
  Synthetic
gcgtacagccgtctgaaa

SEQ ID NO: 33487 - DNA, 18 bp, Artificial Sequence
  Synthetic
ccgcaggcaaaaatcgcc

SEQ ID NO: 33488 - DNA, 17 bp, Artificial Sequence
  Synthetic
actgtatcccgccgtcg

SEQ ID NO: 33489 - DNA, 16 bp, Artificial Sequence
  Synthetic
tacacggcagcgtggc

SEQ ID NO: 33490 - DNA, 18 bp, Artificial Sequence
  Synthetic
cggaggtcgagaaagccg

SEQ ID NO: 33491 - DNA, 16 bp, Artificial Sequence
  Synthetic
gcggtgttcggcagca

SEQ ID NO: 33492 - DNA, 18 bp, Artificial Sequence
  Synthetic
cccgaggcatattggagc

SEQ ID NO: 33493 - DNA, 18 bp, Artificial Sequence
  Synthetic
ccgatgtcaggcgggaat

SEQ ID NO: 33494 - DNA, 16 bp, Artificial Sequence
  Synthetic
aggccggcgttcaaca

SEQ ID NO: 33495 - DNA, 15 bp, Artificial Sequence
  Synthetic
ttgcggcttggcgga

SEQ ID NO: 33496 - DNA, 18 bp, Artificial Sequence
  Synthetic
gctggcggcaatgtgttt

SEQ ID NO: 33497 - DNA, 19 bp, Artificial Sequence
  Synthetic
tcgagttggaaggctacga

SEQ ID NO: 33498 - DNA, 18 bp, Artificial Sequence
  Synthetic
gcctgccggtttgagttc

SEQ ID NO: 33499 - DNA, 18 bp, Artificial Sequence
  Synthetic
tgatcgagcgcaacaacc

SEQ ID NO: 33500 - DNA, 16 bp, Artificial Sequence
  Synthetic
ttcgcctgcaaccggc

SEQ ID NO: 33501 - DNA, 17 bp, Artificial Sequence
  Synthetic
ccggcggtttggaagac

SEQ ID NO: 33502 - DNA, 20 bp, Artificial Sequence
  Synthetic
tttccgcatgatggttgtct

SEQ ID NO: 33503 - DNA, 16 bp, Artificial Sequence
  Synthetic
gcagcttgcgtggagc

SEQ ID NO: 33504 - DNA, 20 bp, Artificial Sequence
  Synthetic
ccgttcaaagtcatctgcct

SEQ ID NO: 33505 - DNA, 17 bp, Artificial Sequence
  Synthetic
gggtcaaatggcaggcg

SEQ ID NO: 33506 - DNA, 18 bp, Artificial Sequence
  Synthetic
gtgaaccaaaccgccctg

SEQ ID NO: 33507 - DNA, 19 bp, Artificial Sequence
  Synthetic
ccgcttttgcacgacatgg

SEQ ID NO: 33508 - DNA, 19 bp, Artificial Sequence
  Synthetic
cgccgatgtatttgcagct

SEQ ID NO: 33509 - DNA, 18 bp, Artificial Sequence
  Synthetic
cttggtggcggaatctgc

SEQ ID NO: 33510 - DNA, 18 bp, Artificial Sequence
  Synthetic
tctgttgccggagagtcg

SEQ ID NO: 33511 - DNA, 23 bp, Artificial Sequence
  Synthetic
aaacaaatcgtcgtaataggatg

SEQ ID NO: 33512 - DNA, 18 bp, Artificial Sequence
  Synthetic
aagctcttgcaggttggg

SEQ ID NO: 33513 - DNA, 19 bp, Artificial Sequence
  Synthetic
ttcgagcgtgaacctcatg

SEQ ID NO: 33514 - DNA, 16 bp, Artificial Sequence
  Synthetic
accctgctcgccaacc

SEQ ID NO: 33515 - DNA, 19 bp, Artificial Sequence
  Synthetic
gccgccgtcaaagaaatgg

SEQ ID NO: 33516 - DNA, 18 bp, Artificial Sequence
  Synthetic
gaaagcgaacctcggcaa

SEQ ID NO: 33517 - DNA, 18 bp, Artificial Sequence
  Synthetic
tggcgttgctgttgagtt

SEQ ID NO: 33518 - DNA, 17 bp, Artificial Sequence
  Synthetic
gaggcaaggcagaaggc

SEQ ID NO: 33519 - DNA, 17 bp, Artificial Sequence
  Synthetic
cgccaaaaatccccggc

SEQ ID NO: 33520 - DNA, 20 bp, Artificial Sequence
  Synthetic
ccgtcggtattacccatcac

SEQ ID NO: 33521 - DNA, 18 bp, Artificial Sequence
  Synthetic
ttgcccagccttcatgtc

SEQ ID NO: 33522 - DNA, 16 bp, Artificial Sequence
  Synthetic
gccttcgcgtgcttcg

SEQ ID NO: 33523 - DNA, 19 bp, Artificial Sequence
  Synthetic
cggtgtacaggaacaggct

SEQ ID NO: 33524 - DNA, 18 bp, Artificial Sequence
  Synthetic
gggttttgagcgatcgcg

SEQ ID NO: 33525 - DNA, 19 bp, Artificial Sequence
  Synthetic
catcacgccacccgtcatg

SEQ ID NO: 33526 - DNA, 17 bp, Artificial Sequence
  Synthetic
tctcaacgccgccaaag

SEQ ID NO: 33527 - DNA, 20 bp, Artificial Sequence
  Synthetic
aggtgttgtttctgttgccc

SEQ ID NO: 33528 - DNA, 18 bp, Artificial Sequence
  Synthetic
gggcggacaaactcttgc

SEQ ID NO: 33529 - DNA, 19 bp, Artificial Sequence
  Synthetic
tacatctcccacaaccgcc

SEQ ID NO: 33530 - DNA, 18 bp, Artificial Sequence
  Synthetic
gcaccatccacctcctct

SEQ ID NO: 33531 - DNA, 17 bp, Artificial Sequence
  Synthetic
cccgcgtacaaaccctg

SEQ ID NO: 33532 - DNA, 15 bp, Artificial Sequence
  Synthetic
acgcaccgccgaact

SEQ ID NO: 33533 - DNA, 17 bp, Artificial Sequence
  Synthetic
gccctgtccgtcatcct

SEQ ID NO: 33534 - DNA, 19 bp, Artificial Sequence
  Synthetic
gcctcaaaccgcttccaaa

SEQ ID NO: 33535 - DNA, 16 bp, Artificial Sequence
  Synthetic
ggcgatgcaggttgcc

SEQ ID NO: 33536 - DNA, 18 bp, Artificial Sequence
  Synthetic
cttttgcaggatgcgccg

SEQ ID NO: 33537 - DNA, 19 bp, Artificial Sequence
  Synthetic
tgttgttgaggcacaccat

SEQ ID NO: 33538 - DNA, 16 bp, Artificial Sequence
  Synthetic
ttttccagcggcgcag

SEQ ID NO: 33539 - DNA, 18 bp, Artificial Sequence
  Synthetic
tcgcctggctcaactacc

SEQ ID NO: 33540 - DNA, 16 bp, Artificial Sequence
  Synthetic
tgccggtgagcgacac

SEQ ID NO: 33541 - DNA, 16 bp, Artificial Sequence
  Synthetic
tagcctacgccgtggc

SEQ ID NO: 33542 - DNA, 16 bp, Artificial Sequence
  Synthetic
agccacgcttttgccg

SEQ ID NO: 33543 - DNA, 16 bp, Artificial Sequence
  Synthetic
gtgctcctggcgcaga

SEQ ID NO: 33544 - DNA, 17 bp, Artificial Sequence
  Synthetic
gcaaagcgcaagatgcc

SEQ ID NO: 33545 - DNA, 18 bp, Artificial Sequence
  Synthetic
gaagtcttgatggcgccg

SEQ ID NO: 33546 - DNA, 16 bp, Artificial Sequence
  Synthetic
cccgcctgcgtgattg

SEQ ID NO: 33547 - DNA, 16 bp, Artificial Sequence
  Synthetic
accatcgccaagcccg

SEQ ID NO: 33548 - DNA, 15 bp, Artificial Sequence
  Synthetic
ttttgcagccgccgc

SEQ ID NO: 33549 - DNA, 16 bp, Artificial Sequence
  Synthetic
tccggagcgggtttgg

SEQ ID NO: 33550 - DNA, 19 bp, Artificial Sequence
  Synthetic
catcaggtgttggcgatgg

SEQ ID NO: 33551 - DNA, 18 bp, Artificial Sequence
  Synthetic
atatcagcaatgcccgac

SEQ ID NO: 33552 - DNA, 19 bp, Artificial Sequence
  Synthetic
aacggttacgcaaatcact

SEQ ID NO: 33553 - DNA, 19 bp, Artificial Sequence
  Synthetic
gcgcgaatacgtttttgag

SEQ ID NO: 33554 - DNA, 21 bp, Artificial Sequence
  Synthetic
gccaatgtgaatatgtccttg

SEQ ID NO: 33555 - DNA, 18 bp, Artificial Sequence
  Synthetic
aaatccaaaatgggccga

SEQ ID NO: 33556 - DNA, 18 bp, Artificial Sequence
  Synthetic
ctatccactttgggcgcg

SEQ ID NO: 33557 - DNA, 23 bp, Artificial Sequence
  Synthetic
aagtatagttttgttctccttgt

SEQ ID NO: 33558 - DNA, 19 bp, Artificial Sequence
  Synthetic
tatcgtggcaaacctatgc

SEQ ID NO: 33559 - DNA, 19 bp, Artificial Sequence
  Synthetic
ttgccacaaattgcgtaag

SEQ ID NO: 33560 - DNA, 18 bp, Artificial Sequence
  Synthetic
atacggatgcctgtatcg

SEQ ID NO: 33561 - DNA, 18 bp, Artificial Sequence
  Synthetic
cgatacaacgggttttgc

SEQ ID NO: 33562 - DNA, 19 bp, Artificial Sequence
  Synthetic
ggcactatggaatcactga

SEQ ID NO: 33563 - DNA, 21 bp, Artificial Sequence
  Synthetic
accagttcttcatcacgttta

SEQ ID NO: 33564 - DNA, 16 bp, Artificial Sequence
  Synthetic
cctcgccattgccgca

SEQ ID NO: 33565 - DNA, 16 bp, Artificial Sequence
  Synthetic
tgttgaacgccgccgc

SEQ ID NO: 33566 - DNA, 23 bp, Artificial Sequence
  Synthetic
gcctaaagaaaaggaggttaaat

SEQ ID NO: 33567 - DNA, 17 bp, Artificial Sequence
  Synthetic
tggtcatagcggcaggc

SEQ ID NO: 33568 - DNA, 15 bp, Artificial Sequence
  Synthetic
tttgagcgcggcggt

SEQ ID NO: 33569 - DNA, 18 bp, Artificial Sequence
  Synthetic
agaatttggcggcagagc

SEQ ID NO: 33570 - DNA, 19 bp, Artificial Sequence
  Synthetic
cccgcttcaatacggatgt

SEQ ID NO: 33571 - DNA, 19 bp, Artificial Sequence
  Synthetic
gctcgattcagacggcaat

SEQ ID NO: 33572 - DNA, 17 bp, Artificial Sequence
  Synthetic
tgccgccaaagaagcct

SEQ ID NO: 33573 - DNA, 17 bp, Artificial Sequence
  Synthetic
gcaaatccaagccgcct

SEQ ID NO: 33574 - DNA, 17 bp, Artificial Sequence
  Synthetic
gcggcgtattggttccg

SEQ ID NO: 33575 - DNA, 20 bp, Artificial Sequence
  Synthetic
gggaagtgatgagcgaatgc

SEQ ID NO: 33576 - DNA, 17 bp, Artificial Sequence
  Synthetic
tccgcaaagcatcctgc

SEQ ID NO: 33577 - DNA, 16 bp, Artificial Sequence
  Synthetic
gctggttcggctgcct

SEQ ID NO: 33578 - DNA, 17 bp, Artificial Sequence
  Synthetic
gcgtccagggtcagctt

SEQ ID NO: 33579 - DNA, 19 bp, Artificial Sequence
  Synthetic
cgggtattttactgcgccc

SEQ ID NO: 33580 - DNA, 19 bp, Artificial Sequence
  Synthetic
tggatgccgtctgaaggtt

SEQ ID NO: 33581 - DNA, 16 bp, Artificial Sequence
  Synthetic
tcggggtcggcggtat

SEQ ID NO: 33582 - DNA, 17 bp, Artificial Sequence
  Synthetic
gcgggccgcttttaagc

SEQ ID NO: 33583 - DNA, 20 bp, Artificial Sequence
  Synthetic
tccttgacgaactgaaagcc

SEQ ID NO: 33584 - DNA, 18 bp, Artificial Sequence
  Synthetic
accacgctatgatgggca

SEQ ID NO: 33585 - DNA, 20 bp, Artificial Sequence
  Synthetic
cgcgctgaaaatgggtttga

SEQ ID NO: 33586 - DNA, 18 bp, Artificial Sequence
  Synthetic
cgctgtacgactggcgac

SEQ ID NO: 33587 - DNA, 16 bp, Artificial Sequence
  Synthetic
tggcaggcccgagcaa

SEQ ID NO: 33588 - DNA, 16 bp, Artificial Sequence
  Synthetic
cggcaggcgggcatta

SEQ ID NO: 33589 - DNA, 16 bp, Artificial Sequence
  Synthetic
aacggcgtggctttcc

SEQ ID NO: 33590 - DNA, 18 bp, Artificial Sequence
  Synthetic
ggacggacatcaatggcg

SEQ ID NO: 33591 - DNA, 16 bp, Artificial Sequence
  Synthetic
tggcgctggaagtcgg

SEQ ID NO: 33592 - DNA, 18 bp, Artificial Sequence
  Synthetic
gctccctaccgtgtgcag

SEQ ID NO: 33593 - DNA, 16 bp, Artificial Sequence
  Synthetic
ggcatgggcaaagggc

SEQ ID NO: 33594 - DNA, 20 bp, Artificial Sequence
  Synthetic
cgtctgaaagatgcgttgga

SEQ ID NO: 33595 - DNA, 17 bp, Artificial Sequence
  Synthetic
gccttggcgttttccct

SEQ ID NO: 33596 - DNA, 17 bp, Artificial Sequence
  Synthetic
gtggtgctgcctgttcc

SEQ ID NO: 33597 - DNA, 17 bp, Artificial Sequence
  Synthetic
gtgcggccttatggtgc

SEQ ID NO: 33598 - DNA, 17 bp, Artificial Sequence
  Synthetic
gcaacggcttttggggt

SEQ ID NO: 33599 - DNA, 19 bp, Artificial Sequence
  Synthetic
ggtggtggttttggatgcc

SEQ ID NO: 33600 - DNA, 18 bp, Artificial Sequence
  Synthetic
ttgccgaagaggtcaaag

SEQ ID NO: 33601 - DNA, 20 bp, Artificial Sequence
  Synthetic
gtgtcgattggtggggaatt

SEQ ID NO: 33602 - DNA, 19 bp, Artificial Sequence
  Synthetic
ggatgttgcgaaagaggca

SEQ ID NO: 33603 - DNA, 19 bp, Artificial Sequence
  Synthetic
cgtcgtgctttataggaac

SEQ ID NO: 33604 - DNA, 20 bp, Artificial Sequence
  Synthetic
ccgcatcgatttgaccatcg

SEQ ID NO: 33605 - DNA, 18 bp, Artificial Sequence
  Synthetic
tctttcaggcgaggcaac

SEQ ID NO: 33606 - DNA, 16 bp, Artificial Sequence
  Synthetic
acaatcgcgccgacgg

SEQ ID NO: 33607 - DNA, 17 bp, Artificial Sequence
  Synthetic
cgccgaggatgagttgc

SEQ ID NO: 33608 - DNA, 19 bp, Artificial Sequence
  Synthetic
gcggtggaatcgacaatca

SEQ ID NO: 33609 - DNA, 16 bp, Artificial Sequence
  Synthetic
agtgggcttagggcgg

SEQ ID NO: 33610 - DNA, 17 bp, Artificial Sequence
  Synthetic
acggcatcggtatcggg

SEQ ID NO: 33611 - DNA, 19 bp, Artificial Sequence
  Synthetic
cgctgctcttggtagtcca

SEQ ID NO: 33612 - DNA, 18 bp, Artificial Sequence
  Synthetic
gatggtcagcgtcgtgtc

SEQ ID NO: 33613 - DNA, 16 bp, Artificial Sequence
  Synthetic
catcgcgcccgacaaa

SEQ ID NO: 33614 - DNA, 20 bp, Artificial Sequence
  Synthetic
gcaggtcgttatgattccgg

SEQ ID NO: 33615 - DNA, 16 bp, Artificial Sequence
  Synthetic
agtgttgcacggggcg

SEQ ID NO: 33616 - DNA, 19 bp, Artificial Sequence
  Synthetic
ccgctctaccttgcactgg

SEQ ID NO: 33617 - DNA, 17 bp, Artificial Sequence
  Synthetic
cgctgccggcaaattcc

SEQ ID NO: 33618 - DNA, 20 bp, Artificial Sequence
  Synthetic
ggcatacgtatttgtgcgtg

SEQ ID NO: 33619 - DNA, 16 bp, Artificial Sequence
  Synthetic
tttgggtgtcggggcg

SEQ ID NO: 33620 - DNA, 19 bp, Artificial Sequence
  Synthetic
gctgaaacttgaaaccgtc

SEQ ID NO: 33621 - DNA, 19 bp, Artificial Sequence
  Synthetic
aggttttgactgcacagca

SEQ ID NO: 33622 - DNA, 17 bp, Artificial Sequence
  Synthetic
cgtccacgcgtccatca

SEQ ID NO: 33623 - DNA, 17 bp, Artificial Sequence
  Synthetic
ggagcgttcgcctttgc

SEQ ID NO: 33624 - DNA, 18 bp, Artificial Sequence
  Synthetic
cgtgaaaccattgcgcct

SEQ ID NO: 33625 - DNA, 18 bp, Artificial Sequence
  Synthetic
ttgacctgcgtgatgtcg

SEQ ID NO: 33626 - DNA, 16 bp, Artificial Sequence
  Synthetic
gctcatcgctgccgac

SEQ ID NO: 33627 - DNA, 18 bp, Artificial Sequence
  Synthetic
gcagacgcgttgttgcac

SEQ ID NO: 33628 - DNA, 16 bp, Artificial Sequence
  Synthetic
gggcgcgtgagaacag

SEQ ID NO: 33629 - DNA, 16 bp, Artificial Sequence
  Synthetic
agggcgatggcggttt

SEQ ID NO: 33630 - DNA, 18 bp, Artificial Sequence
  Synthetic
gacggtgttgacggtgtg

SEQ ID NO: 33631 - DNA, 15 bp, Artificial Sequence
  Synthetic
tcggcatcgtcggca

SEQ ID NO: 33632 - DNA, 17 bp, Artificial Sequence
  Synthetic
gaatccaatgcgggggc

SEQ ID NO: 33633 - DNA, 16 bp, Artificial Sequence
  Synthetic
gcgcgaggcataccac

SEQ ID NO: 33634 - DNA, 18 bp, Artificial Sequence
  Synthetic
tcaatgaaggcgagcagc

SEQ ID NO: 33635 - DNA, 20 bp, Artificial Sequence
  Synthetic
gcgaacctgctttacgatgt

SEQ ID NO: 33636 - DNA, 20 bp, Artificial Sequence
  Synthetic
ggggcttcaacatcacgata

SEQ ID NO: 33637 - DNA, 18 bp, Artificial Sequence
  Synthetic
cctcaccttgccgtttgg

SEQ ID NO: 33638 - DNA, 19 bp, Artificial Sequence
  Synthetic
gcaatgctcggattctcgt

SEQ ID NO: 33639 - DNA, 19 bp, Artificial Sequence
  Synthetic
ccgcacatatacggcaacc

SEQ ID NO: 33640 - DNA, 17 bp, Artificial Sequence
  Synthetic
cacggacaggaacggga

SEQ ID NO: 33641 - DNA, 20 bp, Artificial Sequence
  Synthetic
agtttcgtcaaacccgacat

SEQ ID NO: 33642 - DNA, 18 bp, Artificial Sequence
  Synthetic
gcgccctgcagtcgttat

SEQ ID NO: 33643 - DNA, 19 bp, Artificial Sequence
  Synthetic
tccgtactcaaatcttggg

SEQ ID NO: 33644 - DNA, 18 bp, Artificial Sequence
  Synthetic
ggttgccttggttgcagg

SEQ ID NO: 33645 - DNA, 18 bp, Artificial Sequence
  Synthetic
gggctttggcttcttcgc

SEQ ID NO: 33646 - DNA, 17 bp, Artificial Sequence
  Synthetic
aggatcgaggatggcgg

SEQ ID NO: 33647 - DNA, 18 bp, Artificial Sequence
  Synthetic
ccgacagcacggttttgg

SEQ ID NO: 33648 - DNA, 19 bp, Artificial Sequence
  Synthetic
cgatttggatccggcttgg

SEQ ID NO: 33649 - DNA, 18 bp, Artificial Sequence
  Synthetic
cgtgatttcgatgggcgt

SEQ ID NO: 33650 - DNA, 17 bp, Artificial Sequence
  Synthetic
ggctcttgcgcgcaaat

SEQ ID NO: 33651 - DNA, 15 bp, Artificial Sequence
  Synthetic
ttgcgcggtgtctgc

SEQ ID NO: 33652 - DNA, 16 bp, Artificial Sequence
  Synthetic
gctctgccgtcttgcg

SEQ ID NO: 33653 - DNA, 16 bp, Artificial Sequence
  Synthetic
agccgtcagcgagtgc

SEQ ID NO: 33654 - DNA, 18 bp, Artificial Sequence
  Synthetic
gtcgagttgggctggtat

SEQ ID NO: 33655 - DNA, 16 bp, Artificial Sequence
  Synthetic
aacaaggaagccgcgc

SEQ ID NO: 33656 - DNA, 19 bp, Artificial Sequence
  Synthetic
aggaaaaaggcggcttcaa

SEQ ID NO: 33657 - DNA, 15 bp, Artificial Sequence
  Synthetic
aggtgtgccgccgtt

SEQ ID NO: 33658 - DNA, 16 bp, Artificial Sequence
  Synthetic
ccgccgtgttgtccgt

SEQ ID NO: 33659 - DNA, 22 bp, Artificial Sequence
  Synthetic
tcagtatttaggaagtggatgt

SEQ ID NO: 33660 - DNA, 20 bp, Artificial Sequence
  Synthetic
gtgtggttcttccatgcgaa

SEQ ID NO: 33661 - DNA, 16 bp, Artificial Sequence
  Synthetic
atctggcgcacggcaa

SEQ ID NO: 33662 - DNA, 16 bp, Artificial Sequence
  Synthetic
agcagcctcaccagcg

SEQ ID NO: 33663 - DNA, 19 bp, Artificial Sequence
  Synthetic
cttggttgattgccgcatc

SEQ ID NO: 33664 - DNA, 16 bp, Artificial Sequence
  Synthetic
tgagggcgagggtggt

SEQ ID NO: 33665 - DNA, 18 bp, Artificial Sequence
  Synthetic
gggcgacatcctgcattt

SEQ ID NO: 33666 - DNA, 17 bp, Artificial Sequence
  Synthetic
cgcggccgtagtcttgt

SEQ ID NO: 33667 - DNA, 22 bp, Artificial Sequence
  Synthetic
agatttcaaccaaatgaggaaa

SEQ ID NO: 33668 - DNA, 16 bp, Artificial Sequence
  Synthetic
tgggcgtgggctatgc

SEQ ID NO: 33669 - DNA, 19 bp, Artificial Sequence
  Synthetic
agttcatccacttcgcctg

SEQ ID NO: 33670 - DNA, 19 bp, Artificial Sequence
  Synthetic
gtcggattcgggtattgcc

SEQ ID NO: 33671 - DNA, 16 bp, Artificial Sequence
  Synthetic
cccaagacgcaagcgc

SEQ ID NO: 33672 - DNA, 16 bp, Artificial Sequence
  Synthetic
gcatcaccctgcccga

SEQ ID NO: 33673 - DNA, 19 bp, Artificial Sequence
  Synthetic
gaaatcgatgccgtcgtcg

SEQ ID NO: 33674 - DNA, 18 bp, Artificial Sequence
  Synthetic
aagccctgatgattgccg

SEQ ID NO: 33675 - DNA, 19 bp, Artificial Sequence
  Synthetic
ccctccaacaggacggtac

SEQ ID NO: 33676 - DNA, 16 bp, Artificial Sequence
  Synthetic
tgtgccgccgataccg

SEQ ID NO: 33677 - DNA, 18 bp, Artificial Sequence
  Synthetic
ttgcaggaagtttggcgg

SEQ ID NO: 33678 - DNA, 16 bp, Artificial Sequence
  Synthetic
aatctcggcagggcgg

SEQ ID NO: 33679 - DNA, 15 bp, Artificial Sequence
  Synthetic
tttggcggcgcgtac

SEQ ID NO: 33680 - DNA, 17 bp, Artificial Sequence
  Synthetic
ggtgtgtcggggcagta

SEQ ID NO: 33681 - DNA, 17 bp, Artificial Sequence
  Synthetic
tcatactccggctgccg

SEQ ID NO: 33682 - DNA, 16 bp, Artificial Sequence
  Synthetic
cggtcgttgacgcgga

SEQ ID NO: 33683 - DNA, 15 bp, Artificial Sequence
  Synthetic
gcttgccgcgcagtt

SEQ ID NO: 33684 - DNA, 17 bp, Artificial Sequence
  Synthetic
cgcatagggaacacgcc

SEQ ID NO: 33685 - DNA, 16 bp, Artificial Sequence
  Synthetic
gccagatgcccagtgc

SEQ ID NO: 33686 - DNA, 20 bp, Artificial Sequence
  Synthetic
cggtgtcgttcatggtttct

SEQ ID NO: 33687 - DNA, 16 bp, Artificial Sequence
  Synthetic
ggctttggcgcggtaa

SEQ ID NO: 33688 - DNA, 18 bp, Artificial Sequence
  Synthetic
tcatctttgccaacgccc

SEQ ID NO: 33689 - DNA, 19 bp, Artificial Sequence
  Synthetic
gcctattccaccgtatcgc

SEQ ID NO: 33690 - DNA, 16 bp, Artificial Sequence
  Synthetic
actgcccgaagtcgcg

SEQ ID NO: 33691 - DNA, 20 bp, Artificial Sequence
  Synthetic
gccactatccagcttttccc

SEQ ID NO: 33692 - DNA, 18 bp, Artificial Sequence
  Synthetic
tcaaggccgtatgcgtct

SEQ ID NO: 33693 - DNA, 18 bp, Artificial Sequence
  Synthetic
tttgtacggtgcggttcg

SEQ ID NO: 33694 - DNA, 17 bp, Artificial Sequence
  Synthetic
cgataccgccgcgattc

SEQ ID NO: 33695 - DNA, 19 bp, Artificial Sequence
  Synthetic
gccgtctgaaagaacacgg

SEQ ID NO: 33696 - DNA, 18 bp, Artificial Sequence
  Synthetic
tcgctaccaacaccacca

SEQ ID NO: 33697 - DNA, 16 bp, Artificial Sequence
  Synthetic
gggcaggacgacgagt

SEQ ID NO: 33698 - DNA, 18 bp, Artificial Sequence
  Synthetic
ggtgcagcaggatgtagc

SEQ ID NO: 33699 - DNA, 16 bp, Artificial Sequence
  Synthetic
ttcggggttcgcggac

SEQ ID NO: 33700 - DNA, 17 bp, Artificial Sequence
  Synthetic
gtttctgtaccggcggg

SEQ ID NO: 33701 - DNA, 16 bp, Artificial Sequence
  Synthetic
gcggtcgctcatcacg

SEQ ID NO: 33702 - DNA, 19 bp, Artificial Sequence
  Synthetic
cgcgcgtttcaaaaggtct

SEQ ID NO: 33703 - DNA, 16 bp, Artificial Sequence
  Synthetic
tgcagccgcctcttgc

SEQ ID NO: 33704 - DNA, 18 bp, Artificial Sequence
  Synthetic
gcatgggccgaagtcctc

SEQ ID NO: 33705 - DNA, 16 bp, Artificial Sequence
  Synthetic
ccaccgcctacctcgt

SEQ ID NO: 33706 - DNA, 16 bp, Artificial Sequence
  Synthetic
accgccatcgccgaag

SEQ ID NO: 33707 - DNA, 20 bp, Artificial Sequence
  Synthetic
ggacgaagtgttctttgccg

SEQ ID NO: 33708 - DNA, 20 bp, Artificial Sequence
  Synthetic
ttttcgacacgttcctgtgt

SEQ ID NO: 33709 - DNA, 17 bp, Artificial Sequence
  Synthetic
ccatttcggcggcgttt

SEQ ID NO: 33710 - DNA, 17 bp, Artificial Sequence
  Synthetic
gccggtttgcagcatgg

SEQ ID NO: 33711 - DNA, 20 bp, Artificial Sequence
  Synthetic
gcaggattcggcgaaaatgg

SEQ ID NO: 33712 - DNA, 16 bp, Artificial Sequence
  Synthetic
gggcgtgccgttcaat

SEQ ID NO: 33713 - DNA, 16 bp, Artificial Sequence
  Synthetic
tcggtgtgtcgggcgt

SEQ ID NO: 33714 - DNA, 20 bp, Artificial Sequence
  Synthetic
cggtaattgttcccgaacgt

SEQ ID NO: 33715 - DNA, 16 bp, Artificial Sequence
  Synthetic
aggtcaaccgcgtgct

SEQ ID NO: 33716 - DNA, 17 bp, Artificial Sequence
  Synthetic
ccgacagccgtattgcg

SEQ ID NO: 33717 - DNA, 16 bp, Artificial Sequence
  Synthetic
gtgcagggcggtggat

SEQ ID NO: 33718 - DNA, 20 bp, Artificial Sequence
  Synthetic
cgaggtggatgttcggaatc

SEQ ID NO: 33719 - DNA, 16 bp, Artificial Sequence
  Synthetic
atacggttcgggcggc

SEQ ID NO: 33720 - DNA, 18 bp, Artificial Sequence
  Synthetic
gcacggcggattttttcc

SEQ ID NO: 33721 - DNA, 17 bp, Artificial Sequence
  Synthetic
ggacttcgggttgtgcc

SEQ ID NO: 33722 - DNA, 17 bp, Artificial Sequence
  Synthetic
gggctgcccgtgttgaa

SEQ ID NO: 33723 - DNA, 18 bp, Artificial Sequence
  Synthetic
cggcagcttcaattcgcg

SEQ ID NO: 33724 - DNA, 18 bp, Artificial Sequence
  Synthetic
gctcgatgacttcggcag

SEQ ID NO: 33725 - DNA, 17 bp, Artificial Sequence
  Synthetic
caaggcgggtttgcagt

SEQ ID NO: 33726 - DNA, 18 bp, Artificial Sequence
  Synthetic
catcagacgggacacggg

SEQ ID NO: 33727 - DNA, 16 bp, Artificial Sequence
  Synthetic
ggccaggttgtcggca

SEQ ID NO: 33728 - DNA, 16 bp, Artificial Sequence
  Synthetic
ggtgggcgtgctgcat

SEQ ID NO: 33729 - DNA, 16 bp, Artificial Sequence
  Synthetic
gtcgatgcggatgcgg

SEQ ID NO: 33730 - DNA, 16 bp, Artificial Sequence
  Synthetic
ttggcgcaggtgttgg

SEQ ID NO: 33731 - DNA, 16 bp, Artificial Sequence
  Synthetic
ttgcggcgttcctcgg

SEQ ID NO: 33732 - DNA, 15 bp, Artificial Sequence
  Synthetic
aaccgcaccgccgat

SEQ ID NO: 33733 - DNA, 20 bp, Artificial Sequence
  Synthetic
gcagtttcgactcgtacgtc

SEQ ID NO: 33734 - DNA, 16 bp, Artificial Sequence
  Synthetic
cgggaagatgccggca

SEQ ID NO: 33735 - DNA, 16 bp, Artificial Sequence
  Synthetic
ccgccaacacgccttc

SEQ ID NO: 33736 - DNA, 18 bp, Artificial Sequence
  Synthetic
gttcaccaagcgtttgcc

SEQ ID NO: 33737 - DNA, 16 bp, Artificial Sequence
  Synthetic
gcaggttgcggactgc

SEQ ID NO: 33738 - DNA, 19 bp, Artificial Sequence
  Synthetic
ggaaaaaacatggctcgta

SEQ ID NO: 33739 - DNA, 19 bp, Artificial Sequence
  Synthetic
cgtgcaacattagatggtt

SEQ ID NO: 33740 - DNA, 18 bp, Artificial Sequence
  Synthetic
gcaacgtattggctgaaa

SEQ ID NO: 33741 - DNA, 20 bp, Artificial Sequence
  Synthetic
ccaataattcggactgtcga

SEQ ID NO: 33742 - DNA, 17 bp, Artificial Sequence
  Synthetic
gcgacgtttgccgagga

SEQ ID NO: 33743 - DNA, 20 bp, Artificial Sequence
  Synthetic
gaaggtctgaccgtattgca

SEQ ID NO: 33744 - DNA, 20 bp, Artificial Sequence
  Synthetic
cagtcggtgtgatgcactat

SEQ ID NO: 33745 - DNA, 20 bp, Artificial Sequence
  Synthetic
cgctaccactattggggacg

SEQ ID NO: 33746 - DNA, 15 bp, Artificial Sequence
  Synthetic
attgccgcgctgtcg

SEQ ID NO: 33747 - DNA, 17 bp, Artificial Sequence
  Synthetic
ggacgggcaggaaatcg

SEQ ID NO: 33748 - DNA, 17 bp, Artificial Sequence
  Synthetic
gggcaaggcgacggtat

SEQ ID NO: 33749 - DNA, 19 bp, Artificial Sequence
  Synthetic
ggcaccatattgaagcggt

SEQ ID NO: 33750 - DNA, 17 bp, Artificial Sequence
  Synthetic
ctcaaccgttcggtgcg

SEQ ID NO: 33751 - DNA, 18 bp, Artificial Sequence
  Synthetic
ccgttgagcgaatcctgc

SEQ ID NO: 33752 - DNA, 18 bp, Artificial Sequence
  Synthetic
agccgctggtgatgatgt

SEQ ID NO: 33753 - DNA, 15 bp, Artificial Sequence
  Synthetic
ttgtttcgccgccgc

SEQ ID NO: 33754 - DNA, 21 bp, Artificial Sequence
  Synthetic
gcacacaccacttacctatat

SEQ ID NO: 33755 - DNA, 16 bp, Artificial Sequence
  Synthetic
ggcgcgttcgtggaca

SEQ ID NO: 33756 - DNA, 19 bp, Artificial Sequence
  Synthetic
gcgcgagtttcccgactta

SEQ ID NO: 33757 - DNA, 20 bp, Artificial Sequence
  Synthetic
cgcgcctgattaaacaacac

SEQ ID NO: 33758 - DNA, 20 bp, Artificial Sequence
  Synthetic
gcaaatcaatgccgctatcg

SEQ ID NO: 33759 - DNA, 19 bp, Artificial Sequence
  Synthetic
gggcatttcgattgcttgg

SEQ ID NO: 33760 - DNA, 18 bp, Artificial Sequence
  Synthetic
tccaacgcgatggtttgg

SEQ ID NO: 33761 - DNA, 22 bp, Artificial Sequence
  Synthetic
cctatctaagtttttgtgtcgt

SEQ ID NO: 33762 - DNA, 18 bp, Artificial Sequence
  Synthetic
cgcaggatatggaagccg

SEQ ID NO: 33763 - DNA, 20 bp, Artificial Sequence
  Synthetic
tcagcaggttttgggagatg

SEQ ID NO: 33764 - DNA, 16 bp, Artificial Sequence
  Synthetic
cgttcgagcgactgcg

SEQ ID NO: 33765 - DNA, 16 bp, Artificial Sequence
  Synthetic
tcagccgtccggtcag

SEQ ID NO: 33766 - DNA, 19 bp, Artificial Sequence
  Synthetic
gctttggcttcgaggtagc

SEQ ID NO: 33767 - DNA, 16 bp, Artificial Sequence
  Synthetic
tttcggcgggggagtc

SEQ ID NO: 33768 - DNA, 18 bp, Artificial Sequence
  Synthetic
gccgaggttgaggttgag

SEQ ID NO: 33769 - DNA, 18 bp, Artificial Sequence
  Synthetic
ggtaccggcgatgacgat

SEQ ID NO: 33770 - DNA, 16 bp, Artificial Sequence
  Synthetic
tgggcggtgtgttcgg

SEQ ID NO: 33771 - DNA, 18 bp, Artificial Sequence
  Synthetic
gcgcggtagtagggttcg

SEQ ID NO: 33772 - DNA, 16 bp, Artificial Sequence
  Synthetic
atcgggacaaggcggc

SEQ ID NO: 33773 - DNA, 17 bp, Artificial Sequence
  Synthetic
gcctgtctcaacgcctc

SEQ ID NO: 33774 - DNA, 17 bp, Artificial Sequence
  Synthetic
acactttgctgccggca

SEQ ID NO: 33775 - DNA, 16 bp, Artificial Sequence
  Synthetic
ccggcccgttccaaac

SEQ ID NO: 33776 - DNA, 18 bp, Artificial Sequence
  Synthetic
cgactcgcatgagcatca

SEQ ID NO: 33777 - DNA, 18 bp, Artificial Sequence
  Synthetic
acgcccatgtcgtagtcg

SEQ ID NO: 33778 - DNA, 19 bp, Artificial Sequence
  Synthetic
ttggcatctttacgcgaca

SEQ ID NO: 33779 - DNA, 16 bp, Artificial Sequence
  Synthetic
cgtttcacgcggcgga

SEQ ID NO: 33780 - DNA, 18 bp, Artificial Sequence
  Synthetic
aacggctgttgtttgttc

SEQ ID NO: 33781 - DNA, 18 bp, Artificial Sequence
  Synthetic
aactattccaaccgcgtg

SEQ ID NO: 33782 - DNA, 19 bp, Artificial Sequence
  Synthetic
aacacaatccatcagcgtt

SEQ ID NO: 33783 - DNA, 20 bp, Artificial Sequence
  Synthetic
gaatgttttcagacggcatt

SEQ ID NO: 33784 - DNA, 19 bp, Artificial Sequence
  Synthetic
tggcgttattccttgggac

SEQ ID NO: 33785 - DNA, 18 bp, Artificial Sequence
  Synthetic
agcctgaaattccggcac

SEQ ID NO: 33786 - DNA, 20 bp, Artificial Sequence
  Synthetic
cgtttcggacggattaacgc

SEQ ID NO: 33787 - DNA, 17 bp, Artificial Sequence
  Synthetic
acggcgactgggatgtc

SEQ ID NO: 33788 - DNA, 16 bp, Artificial Sequence
  Synthetic
acatcggcaaagcggc

SEQ ID NO: 33789 - DNA, 17 bp, Artificial Sequence
  Synthetic
ccccgcaaacgaacagc

SEQ ID NO: 33790 - DNA, 18 bp, Artificial Sequence
  Synthetic
gcactgctgtctgtcctg

SEQ ID NO: 33791 - DNA, 19 bp, Artificial Sequence
  Synthetic
ccgaaaacggccattacct

SEQ ID NO: 33792 - DNA, 16 bp, Artificial Sequence
  Synthetic
ttctccggcggcatct

SEQ ID NO: 33793 - DNA, 20 bp, Artificial Sequence
  Synthetic
aaactgccgccatatcttgg

SEQ ID NO: 33794 - DNA, 23 bp, Artificial Sequence
  Synthetic
tggtgcaaattacaactatgatt

SEQ ID NO: 33795 - DNA, 17 bp, Artificial Sequence
  Synthetic
cgcgttgccaatgctgt

SEQ ID NO: 33796 - DNA, 19 bp, Artificial Sequence
  Synthetic
cctgatcgacgtaacccac

SEQ ID NO: 33797 - DNA, 17 bp, Artificial Sequence
  Synthetic
ccctccaaaccgaaccg

SEQ ID NO: 33798 - DNA, 16 bp, Artificial Sequence
  Synthetic
tcgaccgccgaaccac

SEQ ID NO: 33799 - DNA, 16 bp, Artificial Sequence
  Synthetic
tcatcgccctgaccgg

SEQ ID NO: 33800 - DNA, 16 bp, Artificial Sequence
  Synthetic
tcgccttcttcgccgg

SEQ ID NO: 33801 - DNA, 16 bp, Artificial Sequence
  Synthetic
ccacgcccaagttcgg

SEQ ID NO: 33802 - DNA, 18 bp, Artificial Sequence
  Synthetic
atggcgagtgcttcttcg

SEQ ID NO: 33803 - DNA, 16 bp, Artificial Sequence
  Synthetic
gcggacacggctttgg

SEQ ID NO: 33804 - DNA, 16 bp, Artificial Sequence
  Synthetic
gcatccgcgagctgac

SEQ ID NO: 33805 - DNA, 19 bp, Artificial Sequence
  Synthetic
tgatgctgatggctttggg

SEQ ID NO: 33806 - DNA, 18 bp, Artificial Sequence
  Synthetic
cgaatattgtcggccgcc

SEQ ID NO: 33807 - DNA, 18 bp, Artificial Sequence
  Synthetic
atcgaaaaccgccaaggg

SEQ ID NO: 33808 - DNA, 17 bp, Artificial Sequence
  Synthetic
gcgtccgacgaccaaat

SEQ ID NO: 33809 - DNA, 17 bp, Artificial Sequence
  Synthetic
gttttccacccacgccc

SEQ ID NO: 33810 - DNA, 17 bp, Artificial Sequence
  Synthetic
gcatcggcggcattcac

SEQ ID NO: 33811 - DNA, 20 bp, Artificial Sequence
  Synthetic
ggtttcaccgcttttgcatc

SEQ ID NO: 33812 - DNA, 18 bp, Artificial Sequence
  Synthetic
cgccgctgattatcgacg

SEQ ID NO: 33813 - DNA, 16 bp, Artificial Sequence
  Synthetic
accttgccgccatcgc

SEQ ID NO: 33814 - DNA, 16 bp, Artificial Sequence
  Synthetic
acgaatgcgcccccca

SEQ ID NO: 33815 - DNA, 16 bp, Artificial Sequence
  Synthetic
ggcaacgcccgaagtc

SEQ ID NO: 33816 - DNA, 16 bp, Artificial Sequence
  Synthetic
gtccggcacaaacgcc

SEQ ID NO: 33817 - DNA, 17 bp, Artificial Sequence
  Synthetic
gtcgggcaatgcctcct

SEQ ID NO: 33818 - DNA, 15 bp, Artificial Sequence
  Synthetic
tgttcgcggcgttcg

SEQ ID NO: 33819 - DNA, 20 bp, Artificial Sequence
  Synthetic
gtgatttcgtccagcaggat

SEQ ID NO: 33820 - DNA, 20 bp, Artificial Sequence
  Synthetic
ggtaaagttggcgaggatga

SEQ ID NO: 33821 - DNA, 18 bp, Artificial Sequence
  Synthetic
cgcggcaataatcggcaa

SEQ ID NO: 33822 - DNA, 18 bp, Artificial Sequence
  Synthetic
ggatgacggaatcgcgga

SEQ ID NO: 33823 - DNA, 16 bp, Artificial Sequence
  Synthetic
cttcggcgtgctctcg

SEQ ID NO: 33824 - DNA, 18 bp, Artificial Sequence
  Synthetic
gcgcgccataatgtaggc

SEQ ID NO: 33825 - DNA, 18 bp, Artificial Sequence
  Synthetic
gtccgacaatgcctgcat

SEQ ID NO: 33826 - DNA, 18 bp, Artificial Sequence
  Synthetic
gccgtctgaaaggcgttc

SEQ ID NO: 33827 - DNA, 20 bp, Artificial Sequence
  Synthetic
cgtactgtttgagcagctct

SEQ ID NO: 33828 - DNA, 18 bp, Artificial Sequence
  Synthetic
gttccttgccttctgcca

SEQ ID NO: 33829 - DNA, 16 bp, Artificial Sequence
  Synthetic
gcagcgtctcccttgc

SEQ ID NO: 33830 - DNA, 16 bp, Artificial Sequence
  Synthetic
ggtcggggcaggaaca

SEQ ID NO: 33831 - DNA, 19 bp, Artificial Sequence
  Synthetic
ggaaggaatcgcacgcaaa

SEQ ID NO: 33832 - DNA, 18 bp, Artificial Sequence
  Synthetic
ccttaccatgctgcttgc

SEQ ID NO: 33833 - DNA, 20 bp, Artificial Sequence
  Synthetic
gcagacgccgtttaaaatgt

SEQ ID NO: 33834 - DNA, 16 bp, Artificial Sequence
  Synthetic
ttcctccgtaccgcgc

SEQ ID NO: 33835 - DNA, 17 bp, Artificial Sequence
  Synthetic
tgggctgagcgcatcaa

SEQ ID NO: 33836 - DNA, 16 bp, Artificial Sequence
  Synthetic
agctctcggcgcgttc

SEQ ID NO: 33837 - DNA, 17 bp, Artificial Sequence
  Synthetic
ctctccctgtgggccaa

SEQ ID NO: 33838 - DNA, 18 bp, Artificial Sequence
  Synthetic
gggagctcgccaaacaag

SEQ ID NO: 33839 - DNA, 20 bp, Artificial Sequence
  Synthetic
gtcgtcgattttctgaccga

SEQ ID NO: 33840 - DNA, 15 bp, Artificial Sequence
  Synthetic
tttgcggggcgggaa

SEQ ID NO: 33841 - DNA, 19 bp, Artificial Sequence
  Synthetic
gggccgtctataccgttgt

SEQ ID NO: 33842 - DNA, 17 bp, Artificial Sequence
  Synthetic
tcaacgcgccaatcacg

SEQ ID NO: 33843 - DNA, 18 bp, Artificial Sequence
  Synthetic
ccgaccaccagcggatac

SEQ ID NO: 33844 - DNA, 23 bp, Artificial Sequence
  Synthetic
acataaaagagttgggaagaaac

SEQ ID NO: 33845 - DNA, 18 bp, Artificial Sequence
  Synthetic
cgatgagaaccccggcac

SEQ ID NO: 33846 - DNA, 16 bp, Artificial Sequence
  Synthetic
acgacaccgtcaccgc

SEQ ID NO: 33847 - DNA, 19 bp, Artificial Sequence
  Synthetic
tcggacggcatttttttgc

SEQ ID NO: 33848 - DNA, 16 bp, Artificial Sequence
  Synthetic
agccccgccttttggg

SEQ ID NO: 33849 - DNA, 16 bp, Artificial Sequence
  Synthetic
ccacggcaggcagctt

SEQ ID NO: 33850 - DNA, 16 bp, Artificial Sequence
  Synthetic
agatggcgcgggtctg

SEQ ID NO: 33851 - DNA, 20 bp, Artificial Sequence
  Synthetic
ttttcagcctgtggaacagt

SEQ ID NO: 33852 - DNA, 18 bp, Artificial Sequence
  Synthetic
gccctcgaacacgggtac

SEQ ID NO: 33853 - DNA, 17 bp, Artificial Sequence
  Synthetic
accaactcccggttcgg

SEQ ID NO: 33854 - DNA, 18 bp, Artificial Sequence
  Synthetic
caaaccgaactgcccgtc

SEQ ID NO: 33855 - DNA, 16 bp, Artificial Sequence
  Synthetic
tcatctgcggcggcac

SEQ ID NO: 33856 - DNA, 18 bp, Artificial Sequence
  Synthetic
cctgctcacctacgccta

SEQ ID NO: 33857 - DNA, 19 bp, Artificial Sequence
  Synthetic
tgcattttcgccaacatcg

SEQ ID NO: 33858 - DNA, 18 bp, Artificial Sequence
  Synthetic
cgtggatgatgcccgaag

SEQ ID NO: 33859 - DNA, 16 bp, Artificial Sequence
  Synthetic
gcgcgactggatgacg

SEQ ID NO: 33860 - DNA, 18 bp, Artificial Sequence
  Synthetic
cgttatgggcgtatgcgg

SEQ ID NO: 33861 - DNA, 16 bp, Artificial Sequence
  Synthetic
gcaaacgcggcgaaag

SEQ ID NO: 33862 - DNA, 17 bp, Artificial Sequence
  Synthetic
gcgaacatcggccaggt

SEQ ID NO: 33863 - DNA, 19 bp, Artificial Sequence
  Synthetic
cttcgatgccggactgatc

SEQ ID NO: 33864 - DNA, 16 bp, Artificial Sequence
  Synthetic
tcgcccacacacgtcg

SEQ ID NO: 33865 - DNA, 16 bp, Artificial Sequence
  Synthetic
ccgccgccataccttg

SEQ ID NO: 33866 - DNA, 19 bp, Artificial Sequence
  Synthetic
ggtaaaagtaggcggaacc

SEQ ID NO: 33867 - DNA, 18 bp, Artificial Sequence
  Synthetic
agggcgacttttcaagcg

SEQ ID NO: 33868 - DNA, 16 bp, Artificial Sequence
  Synthetic
ggcggctttgccccaa

SEQ ID NO: 33869 - DNA, 15 bp, Artificial Sequence
  Synthetic
atttggcagccgcgc

SEQ ID NO: 33870 - DNA, 18 bp, Artificial Sequence
  Synthetic
cttcggggatttcggcaa

SEQ ID NO: 33871 - DNA, 16 bp, Artificial Sequence
  Synthetic
cacgttccaccagccg

SEQ ID NO: 33872 - DNA, 20 bp, Artificial Sequence
  Synthetic
gcatatagccgagcatcacg

SEQ ID NO: 33873 - DNA, 16 bp, Artificial Sequence
  Synthetic
tttcggcgggctgcac

SEQ ID NO: 33874 - DNA, 17 bp, Artificial Sequence
  Synthetic
gggcgagacgttttcgg

SEQ ID NO: 33875 - DNA, 18 bp, Artificial Sequence
  Synthetic
aaacaccttcgacgacgg

SEQ ID NO: 33876 - DNA, 16 bp, Artificial Sequence
  Synthetic
cgcaacgccgtttgga

SEQ ID NO: 33877 - DNA, 17 bp, Artificial Sequence
  Synthetic
gcagcagcgcgaaagac

SEQ ID NO: 33878 - DNA, 17 bp, Artificial Sequence
  Synthetic
gacaaggcggggaaacg

SEQ ID NO: 33879 - DNA, 17 bp, Artificial Sequence
  Synthetic
cgctcgaaaccgaagcg

SEQ ID NO: 33880 - DNA, 17 bp, Artificial Sequence
  Synthetic
cagacggcaccatcagc

SEQ ID NO: 33881 - DNA, 18 bp, Artificial Sequence
  Synthetic
aacattgccctgcactgg

SEQ ID NO: 33882 - DNA, 17 bp, Artificial Sequence
  Synthetic
gccgcgatgaaaggcgt

SEQ ID NO: 33883 - DNA, 19 bp, Artificial Sequence
  Synthetic
catcagggtgatgtcggct

SEQ ID NO: 33884 - DNA, 17 bp, Artificial Sequence
  Synthetic
gcctgccagtgcttcga

SEQ ID NO: 33885 - DNA, 19 bp, Artificial Sequence
  Synthetic
cctccatactccggacgac

SEQ ID NO: 33886 - DNA, 18 bp, Artificial Sequence
  Synthetic
gcgaaaatgcgccgtcag

SEQ ID NO: 33887 - DNA, 18 bp, Artificial Sequence
  Synthetic
catccggcttgttggacg

SEQ ID NO: 33888 - DNA, 16 bp, Artificial Sequence
  Synthetic
agtttccgcgccaacg

SEQ ID NO: 33889 - DNA, 16 bp, Artificial Sequence
  Synthetic
tgcctctgtcgcgcac

SEQ ID NO: 33890 - DNA, 19 bp, Artificial Sequence
  Synthetic
ggcttccaaaacaacaggc

SEQ ID NO: 33891 - DNA, 20 bp, Artificial Sequence
  Synthetic
ccaaaccgtactgcatcagc

SEQ ID NO: 33892 - DNA, 17 bp, Artificial Sequence
  Synthetic
ggcagcgtacagggctt

SEQ ID NO: 33893 - DNA, 19 bp, Artificial Sequence
  Synthetic
ctctgtgaaacgttccgca

SEQ ID NO: 33894 - DNA, 20 bp, Artificial Sequence
  Synthetic
ccccgaatattgttcccaca

SEQ ID NO: 33895 - DNA, 16 bp, Artificial Sequence
  Synthetic
gctatgccggctgctg

SEQ ID NO: 33896 - DNA, 17 bp, Artificial Sequence
  Synthetic
ctatggcgcgcgaagtc

SEQ ID NO: 33897 - DNA, 17 bp, Artificial Sequence
  Synthetic
gcctgatcgacgcatcc

SEQ ID NO: 33898 - DNA, 18 bp, Artificial Sequence
  Synthetic
ggcattcatcgtcgcgat

SEQ ID NO: 33899 - DNA, 19 bp, Artificial Sequence
  Synthetic
caaaatccgcatcgttgcc

SEQ ID NO: 33900 - DNA, 19 bp, Artificial Sequence
  Synthetic
gtcgaagccgtcaacttca

SEQ ID NO: 33901 - DNA, 19 bp, Artificial Sequence
  Synthetic
gccgcctcaggatttcgtc

SEQ ID NO: 33902 - DNA, 18 bp, Artificial Sequence
  Synthetic
acacaatgatgctccgat

SEQ ID NO: 33903 - DNA, 18 bp, Artificial Sequence
  Synthetic
aagacgctggaaagcttg

SEQ ID NO: 33904 - DNA, 21 bp, Artificial Sequence
  Synthetic
ccattttcatcttcctgtgta

SEQ ID NO: 33905 - DNA, 25 bp, Artificial Sequence
  Synthetic
gactcttctactttcttattgtcat

SEQ ID NO: 33906 - DNA, 19 bp, Artificial Sequence
  Synthetic
acagtttttagggggagag

SEQ ID NO: 33907 - DNA, 18 bp, Artificial Sequence
  Synthetic
gtttctctgtggtcccag

SEQ ID NO: 33908 - DNA, 18 bp, Artificial Sequence
  Synthetic
aggttaacagcatcctgc

SEQ ID NO: 33909 - DNA, 25 bp, Artificial Sequence
  Synthetic
tagtagatgttacactaggatgttc

SEQ ID NO: 33910 - DNA, 20 bp, Artificial Sequence
  Synthetic
cgtttgtgacatcagtctct

SEQ ID NO: 33911 - DNA, 22 bp, Artificial Sequence
  Synthetic
tggaataataatttgggtggtg

SEQ ID NO: 33912 - DNA, 22 bp, Artificial Sequence
  Synthetic
aggattttctgtatcttgcaaa

SEQ ID NO: 33913 - DNA, 23 bp, Artificial Sequence
  Synthetic
gaattttcctatactgttgtgtg

SEQ ID NO: 33914 - DNA, 22 bp, Artificial Sequence
  Synthetic
acacatagttgctaaagacttt

SEQ ID NO: 33915 - DNA, 24 bp, Artificial Sequence
  Synthetic
acttatataagagtaagggtggag

SEQ ID NO: 33916 - DNA, 18 bp, Artificial Sequence
  Synthetic
cgccttgctcattgatga

SEQ ID NO: 33917 - DNA, 19 bp, Artificial Sequence
  Synthetic
cttccccagtgaatgagaa

SEQ ID NO: 33918 - DNA, 21 bp, Artificial Sequence
  Synthetic
cttgatcgcatcatatagtgg

SEQ ID NO: 33919 - DNA, 22 bp, Artificial Sequence
  Synthetic
tcatattgcttcaaatcgctta

SEQ ID NO: 33920 - DNA, 21 bp, Artificial Sequence
  Synthetic
gcattaagcaaggcagtatta

SEQ ID NO: 33921 - DNA, 24 bp, Artificial Sequence
  Synthetic
cttagtagcatatctcctatctca

SEQ ID NO: 33922 - DNA, 22 bp, Artificial Sequence
  Synthetic
tattgaataccgacttggctaa

SEQ ID NO: 33923 - DNA, 18 bp, Artificial Sequence
  Synthetic
ctcactcgtcccctctcg

SEQ ID NO: 33924 - DNA, 16 bp, Artificial Sequence
  Synthetic
gcggaccctgcagagt

SEQ ID NO: 33925 - DNA, 18 bp, Artificial Sequence
  Synthetic
ttccactcgcaggtttgc

SEQ ID NO: 33926 - DNA, 20 bp, Artificial Sequence
  Synthetic
aggaagacgagagaagggaa

SEQ ID NO: 33927 - DNA, 20 bp, Artificial Sequence
  Synthetic
ggctgggaaacatcaaagga

SEQ ID NO: 33928 - DNA, 20 bp, Artificial Sequence
  Synthetic
ccattgtaaggtttccttgc

SEQ ID NO: 33929 - DNA, 19 bp, Artificial Sequence
  Synthetic
gtacacaaccctttccact

SEQ ID NO: 33930 - DNA, 21 bp, Artificial Sequence
  Synthetic
gcttcaattctgtaacacact

SEQ ID NO: 33931 - DNA, 25 bp, Artificial Sequence
  Synthetic
atcatctataaatcctattaggtcc

SEQ ID NO: 33932 - DNA, 22 bp, Artificial Sequence
  Synthetic
gcctgtgaattatttacttggt

SEQ ID NO: 33933 - DNA, 25 bp, Artificial Sequence
  Synthetic
cagttaatttattactgtccagttc

SEQ ID NO: 33934 - DNA, 19 bp, Artificial Sequence
  Synthetic
tgttaccgttgttccttct

SEQ ID NO: 33935 - DNA, 20 bp, Artificial Sequence
  Synthetic
ttcaggacaacagattacct

SEQ ID NO: 33936 - DNA, 18 bp, Artificial Sequence
  Synthetic
tactcgtgtcccttcccg

SEQ ID NO: 33937 - DNA, 22 bp, Artificial Sequence
  Synthetic
acttgttacatgtacagtacca

SEQ ID NO: 33938 - DNA, 21 bp, Artificial Sequence
  Synthetic
atgtactgtagctccaatttg

SEQ ID NO: 33939 - DNA, 18 bp, Artificial Sequence
  Synthetic
gaggtggataaaggcaca

SEQ ID NO: 33940 - DNA, 21 bp, Artificial Sequence
  Synthetic
cgagttacatattcatccgtg

SEQ ID NO: 33941 - DNA, 19 bp, Artificial Sequence
  Synthetic
taatggctgtcctctacca

SEQ ID NO: 33942 - DNA, 22 bp, Artificial Sequence
  Synthetic
agtaaaatccatagctccaaag

SEQ ID NO: 33943 - DNA, 18 bp, Artificial Sequence
  Synthetic
gccactaggtgtagcaga

SEQ ID NO: 33944 - DNA, 22 bp, Artificial Sequence
  Synthetic
caagtatgcatacaaacaggaa

SEQ ID NO: 33945 - DNA, 18 bp, Artificial Sequence
  Synthetic
acccatgaacgcccatca

SEQ ID NO: 33946 - DNA, 18 bp, Artificial Sequence
  Synthetic
tgttcttgcgcgttctgg

SEQ ID NO: 33947 - DNA, 20 bp, Artificial Sequence
  Synthetic
tttgtgtctgggtcagtgac

SEQ ID NO: 33948 - DNA, 18 bp, Artificial Sequence
  Synthetic
caccaatgtcaagggcgt

SEQ ID NO: 33949 - DNA, 18 bp, Artificial Sequence
  Synthetic
cgttccacactgcatcag

SEQ ID NO: 33950 - DNA, 23 bp, Artificial Sequence
  Synthetic
taagacctgataatttttccagg

SEQ ID NO: 33951 - DNA, 19 bp, Artificial Sequence
  Synthetic
agcacagcgaggtaacaag

SEQ ID NO: 33952 - DNA, 23 bp, Artificial Sequence
  Synthetic
aagtgcttatagaaaaacacacc

SEQ ID NO: 33953 - DNA, 17 bp, Artificial Sequence
  Synthetic
ctgccatcgctgacagc

SEQ ID NO: 33954 - DNA, 20 bp, Artificial Sequence
  Synthetic
gcacacacaccaataagggt

SEQ ID NO: 33955 - DNA, 23 bp, Artificial Sequence
  Synthetic
gtacatttgccattaaaatagca

SEQ ID NO: 33956 - DNA, 21 bp, Artificial Sequence
  Synthetic
gttttttggtagcctcaaaga

SEQ ID NO: 33957 - DNA, 23 bp, Artificial Sequence
  Synthetic
aacaaaacataattgtcagcagt

SEQ ID NO: 33958 - DNA, 19 bp, Artificial Sequence
  Synthetic
aaacacgcatgatgcaaag

SEQ ID NO: 33959 - DNA, 19 bp, Artificial Sequence
  Synthetic
ctgttgggccagtgatctg

SEQ ID NO: 33960 - DNA, 21 bp, Artificial Sequence
  Synthetic
acagacatttggagaggatac

SEQ ID NO: 33961 - DNA, 18 bp, Artificial Sequence
  Synthetic
tccgcctgtttcggtcat

SEQ ID NO: 33962 - DNA, 25 bp, Artificial Sequence
  Synthetic
gaggttgtctattaatagtgacttt

SEQ ID NO: 33963 - DNA, 18 bp, Artificial Sequence
  Synthetic
ttctggggggtcttcacg

SEQ ID NO: 33964 - DNA, 19 bp, Artificial Sequence
  Synthetic
cggccatcataagcgatca

SEQ ID NO: 33965 - DNA, 19 bp, Artificial Sequence
  Synthetic
tttgggttgaggcacacaa

SEQ ID NO: 33966 - DNA, 19 bp, Artificial Sequence
  Synthetic
gggcatggtcatgtctgtt

SEQ ID NO: 33967 - DNA, 21 bp, Artificial Sequence
  Synthetic
caaaaacaatgacagccaaat

SEQ ID NO: 33968 - DNA, 18 bp, Artificial Sequence
  Synthetic
gcttcccacacagccagg

SEQ ID NO: 33969 - DNA, 18 bp, Artificial Sequence
  Synthetic
ctatggtggtgttggtca

SEQ ID NO: 33970 - DNA, 20 bp, Artificial Sequence
  Synthetic
tcatttgaatgcacgttgtt

SEQ ID NO: 33971 - DNA, 22 bp, Artificial Sequence
  Synthetic
ggatttttttggaccatgaaac

SEQ ID NO: 33972 - DNA, 23 bp, Artificial Sequence
  Synthetic
tggaaacaatgctataatccttt

SEQ ID NO: 33973 - DNA, 22 bp, Artificial Sequence
  Synthetic
tgcctatttatctgcaatttgg

SEQ ID NO: 33974 - DNA, 22 bp, Artificial Sequence
  Synthetic
ttgaggcaatactaattcttgt

SEQ ID NO: 33975 - DNA, 22 bp, Artificial Sequence
  Synthetic
agtttcaaattgttcagtacct

SEQ ID NO: 33976 - DNA, 23 bp, Artificial Sequence
  Synthetic
gggcttttaatatactttcgttt

SEQ ID NO: 33977 - DNA, 23 bp, Artificial Sequence
  Synthetic
gaaaagctcacaccatataattc

SEQ ID NO: 33978 - DNA, 19 bp, Artificial Sequence
  Synthetic
acaggttgcctatgcttta

SEQ ID NO: 33979 - DNA, 18 bp, Artificial Sequence
  Synthetic
aggttagacgctggggac

SEQ ID NO: 33980 - DNA, 23 bp, Artificial Sequence
  Synthetic
tgtttatttctatttctccagca

SEQ ID NO: 33981 - DNA, 18 bp, Artificial Sequence
  Synthetic
taggtctgcttggtctgc

SEQ ID NO: 33982 - DNA, 21 bp, Artificial Sequence
  Synthetic
tggtactaatctttcctctgg

SEQ ID NO: 33983 - DNA, 18 bp, Artificial Sequence
  Synthetic
ccatagctggttcgcaac

SEQ ID NO: 33984 - DNA, 22 bp, Artificial Sequence
  Synthetic
caaaataatgtctggcataggc

SEQ ID NO: 33985 - DNA, 19 bp, Artificial Sequence
  Synthetic
taccactcccggtacaaag

SEQ ID NO: 33986 - DNA, 22 bp, Artificial Sequence
  Synthetic
tggattctttggtaggaactag

SEQ ID NO: 33987 - DNA, 18 bp, Artificial Sequence
  Synthetic
gttgtcacgcttgttgtt

SEQ ID NO: 33988 - DNA, 19 bp, Artificial Sequence
  Synthetic
ccacctttttcagtctgac

SEQ ID NO: 33989 - DNA, 25 bp, Artificial Sequence
  Synthetic
gactatattattcaccttggatgtt

SEQ ID NO: 33990 - DNA, 23 bp, Artificial Sequence
  Synthetic
actgatcatcacatttatggtat

SEQ ID NO: 33991 - DNA, 17 bp, Artificial Sequence
  Synthetic
ggcctttcgcgacccaa

SEQ ID NO: 33992 - DNA, 17 bp, Artificial Sequence
  Synthetic
tgggaataggctggcgc

SEQ ID NO: 33993 - DNA, 16 bp, Artificial Sequence
  Synthetic
ccacacgcgtctccga

SEQ ID NO: 33994 - DNA, 18 bp, Artificial Sequence
  Synthetic
gccagctcccgttggtat

SEQ ID NO: 33995 - DNA, 20 bp, Artificial Sequence
  Synthetic
tgggctaggtgtgaaacagt

SEQ ID NO: 33996 - DNA, 18 bp, Artificial Sequence
  Synthetic
tagtgcaccaaacaccgg

SEQ ID NO: 33997 - DNA, 18 bp, Artificial Sequence
  Synthetic
gacgatgctggagctcag

SEQ ID NO: 33998 - DNA, 17 bp, Artificial Sequence
  Synthetic
ttgagtccagggccagg

SEQ ID NO: 33999 - DNA, 19 bp, Artificial Sequence
  Synthetic
gttgcagcaggtacaaggg

SEQ ID NO: 34000 - DNA, 18 bp, Artificial Sequence
  Synthetic
aggaaaatttcgcggccc

SEQ ID NO: 34001 - DNA, 18 bp, Artificial Sequence
  Synthetic
gagcgaaccctttccagg

SEQ ID NO: 34002 - DNA, 18 bp, Artificial Sequence
  Synthetic
aacacaggtgagcgcatc

SEQ ID NO: 34003 - DNA, 16 bp, Artificial Sequence
  Synthetic
acgtcatacgcgccgc

SEQ ID NO: 34004 - DNA, 18 bp, Artificial Sequence
  Synthetic
aagtcgccggtaaaaccc

SEQ ID NO: 34005 - DNA, 18 bp, Artificial Sequence
  Synthetic
cataccatgcacacccgg

SEQ ID NO: 34006 - DNA, 20 bp, Artificial Sequence
  Synthetic
gtgctggtaatgacctccaa

SEQ ID NO: 34007 - DNA, 18 bp, Artificial Sequence
  Synthetic
ccgatgttaccgactgcg

SEQ ID NO: 34008 - DNA, 16 bp, Artificial Sequence
  Synthetic
ccgtctcgggcacgta

SEQ ID NO: 34009 - DNA, 20 bp, Artificial Sequence
  Synthetic
ggttccgttcttcacgtgac

SEQ ID NO: 34010 - DNA, 18 bp, Artificial Sequence
  Synthetic
ccacgtaggagtgcaacc

SEQ ID NO: 34011 - DNA, 19 bp, Artificial Sequence
  Synthetic
ctcgcgtgatattgcctcc

SEQ ID NO: 34012 - DNA, 16 bp, Artificial Sequence
  Synthetic
tgaacctggcgtccgc

SEQ ID NO: 34013 - DNA, 20 bp, Artificial Sequence
  Synthetic
cgagaggaggtggagtacac

SEQ ID NO: 34014 - DNA, 19 bp, Artificial Sequence
  Synthetic
gctccactgcgaacacttc

SEQ ID NO: 34015 - DNA, 19 bp, Artificial Sequence
  Synthetic
gtcataagctggaaccggg

SEQ ID NO: 34016 - DNA, 19 bp, Artificial Sequence
  Synthetic
gcgctaagtccatggagtc

SEQ ID NO: 34017 - DNA, 16 bp, Artificial Sequence
  Synthetic
aatgtcccccccgcca

SEQ ID NO: 34018 - DNA, 19 bp, Artificial Sequence
  Synthetic
ggacgaaacctaggtatgc

SEQ ID NO: 34019 - DNA, 19 bp, Artificial Sequence
  Synthetic
accagctcaacgaccttgt

SEQ ID NO: 34020 - DNA, 21 bp, Artificial Sequence
  Synthetic
tgcatattgttacactcctgt

SEQ ID NO: 34021 - DNA, 22 bp, Artificial Sequence
  Synthetic
ttcaaatgaaaatcgccaacaa

SEQ ID NO: 34022 - DNA, 20 bp, Artificial Sequence
  Synthetic
gcaaatcaggaattgagtgg

SEQ ID NO: 34023 - DNA, 20 bp, Artificial Sequence
  Synthetic
cgcctcaatccattcaaaga

SEQ ID NO: 34024 - DNA, 21 bp, Artificial Sequence
  Synthetic
gttacttcttttggtgcctta

SEQ ID NO: 34025 - DNA, 19 bp, Artificial Sequence
  Synthetic
ccttgaacttcccaaacag

SEQ ID NO: 34026 - DNA, 19 bp, Artificial Sequence
  Synthetic
cgaactgtttcagctgagg

SEQ ID NO: 34027 - DNA, 25 bp, Artificial Sequence
  Synthetic
ccatttagcttaatgtaatcatcac

SEQ ID NO: 34028 - DNA, 22 bp, Artificial Sequence
  Synthetic
ggcttcaggttatcaagataat

SEQ ID NO: 34029 - DNA, 20 bp, Artificial Sequence
  Synthetic
gcactttcttcaaagctctt

SEQ ID NO: 34030 - DNA, 19 bp, Artificial Sequence
  Synthetic
aaagaagaatcggacacca

SEQ ID NO: 34031 - DNA, 19 bp, Artificial Sequence
  Synthetic
cctaactctgtacgctgtc

SEQ ID NO: 34032 - DNA, 21 bp, Artificial Sequence
  Synthetic
tcagcccatttaattgaagtt

SEQ ID NO: 34033 - DNA, 18 bp, Artificial Sequence
  Synthetic
tgtgtagcatcacgacca

SEQ ID NO: 34034 - DNA, 25 bp, Artificial Sequence
  Synthetic
ctctgtatagtaagcattatccttt

SEQ ID NO: 34035 - DNA, 19 bp, Artificial Sequence
  Synthetic
gttgtcttggttgtagcct

SEQ ID NO: 34036 - DNA, 21 bp, Artificial Sequence
  Synthetic
gctagtgaaagctcattaggt

SEQ ID NO: 34037 - DNA, 23 bp, Artificial Sequence
  Synthetic
cctaaaattgtcaagtctagctt

SEQ ID NO: 34038 - DNA, 18 bp, Artificial Sequence
  Synthetic
ttgtacactcaacgcgtg

SEQ ID NO: 34039 - DNA, 20 bp, Artificial Sequence
  Synthetic
aattgacaaaatgggagagc

SEQ ID NO: 34040 - DNA, 18 bp, Artificial Sequence
  Synthetic
caacaacaccttgtcggg

SEQ ID NO: 34041 - DNA, 22 bp, Artificial Sequence
  Synthetic
agtagttatgacattgacaacc

SEQ ID NO: 34042 - DNA, 22 bp, Artificial Sequence
  Synthetic
ctatgaaaccaatctctcttgt

SEQ ID NO: 34043 - DNA, 20 bp, Artificial Sequence
  Synthetic
actcagcatcaaaagttgtt

SEQ ID NO: 34044 - DNA, 18 bp, Artificial Sequence
  Synthetic
agcagcaacaacatggtt

SEQ ID NO: 34045 - DNA, 20 bp, Artificial Sequence
  Synthetic
agctggtagtatctaaggct

SEQ ID NO: 34046 - DNA, 21 bp, Artificial Sequence
  Synthetic
ccacaatccattaagagttgt

SEQ ID NO: 34047 - DNA, 21 bp, Artificial Sequence
  Synthetic
ggtatgattaggtctcatggc

SEQ ID NO: 34048 - DNA, 18 bp, Artificial Sequence
  Synthetic
taccattctgcagcagct

SEQ ID NO: 34049 - DNA, 20 bp, Artificial Sequence
  Synthetic
gaatgcgtgcttatgcttaa

SEQ ID NO: 34050 - DNA, 24 bp, Artificial Sequence
  Synthetic
cctaagaaacaataaacaagcatg

SEQ ID NO: 34051 - DNA, 18 bp, Artificial Sequence
  Synthetic
ttgaagaaccgagagcag

SEQ ID NO: 34052 - DNA, 18 bp, Artificial Sequence
  Synthetic
ctacagcctgctcatagg

SEQ ID NO: 34053 - DNA, 18 bp, Artificial Sequence
  Synthetic
tggaacacaaccatcacg

SEQ ID NO: 34054 - DNA, 19 bp, Artificial Sequence
  Synthetic
cacaaacctacctcccttc

SEQ ID NO: 34055 - DNA, 19 bp, Artificial Sequence
  Synthetic
attggttgtcctccacttg

SEQ ID NO: 34056 - DNA, 21 bp, Artificial Sequence
  Synthetic
ttaaaaacgttgatgcatccg

SEQ ID NO: 34057 - DNA, 20 bp, Artificial Sequence
  Synthetic
gcaattgtatgtgacgagta

SEQ ID NO: 34058 - DNA, 23 bp, Artificial Sequence
  Synthetic
cagcaatgagtaatatgaatcca

SEQ ID NO: 34059 - DNA, 21 bp, Artificial Sequence
  Synthetic
cgaaaatggtatccagttgaa

SEQ ID NO: 34060 - DNA, 18 bp, Artificial Sequence
  Synthetic
tgccatcctgagcaaaga

SEQ ID NO: 34061 - DNA, 24 bp, Artificial Sequence
  Synthetic
gtttttaacatattatgccagcca

SEQ ID NO: 34062 - DNA, 18 bp, Artificial Sequence
  Synthetic
cagttgtagcatcaccgg

SEQ ID NO: 34063 - DNA, 20 bp, Artificial Sequence
  Synthetic
gcctcagacatgaacacatt

SEQ ID NO: 34064 - DNA, 18 bp, Artificial Sequence
  Synthetic
ctcaggttcccagtaccg

SEQ ID NO: 34065 - DNA, 19 bp, Artificial Sequence
  Synthetic
tgggaggcttatgtgactt

SEQ ID NO: 34066 - DNA, 20 bp, Artificial Sequence
  Synthetic
aatggtggtctaggttttcc

SEQ ID NO: 34067 - DNA, 18 bp, Artificial Sequence
  Synthetic
tccgatggcaaaatgact

SEQ ID NO: 34068 - DNA, 24 bp, Artificial Sequence
  Synthetic
gcacactgaattaaaatattctgg

SEQ ID NO: 34069 - DNA, 21 bp, Artificial Sequence
  Synthetic
gcgttctgtgaattataaggt

SEQ ID NO: 34070 - DNA, 18 bp, Artificial Sequence
  Synthetic
gtgtaggtgcctgtgtag

SEQ ID NO: 34071 - DNA, 20 bp, Artificial Sequence
  Synthetic
cagtcggtacagctactaag

SEQ ID NO: 34072 - DNA, 20 bp, Artificial Sequence
  Synthetic
cagcaggcataagtatctga

SEQ ID NO: 34073 - DNA, 19 bp, Artificial Sequence
  Synthetic
tgagcatcgtagaacttcc

SEQ ID NO: 34074 - DNA, 21 bp, Artificial Sequence
  Synthetic
gactcacaaggactatcagaa

SEQ ID NO: 34075 - DNA, 21 bp, Artificial Sequence
  Synthetic
atctccacatcaataccatct

SEQ ID NO: 34076 - DNA, 20 bp, Artificial Sequence
  Synthetic
agacctttgactgaaccttc

SEQ ID NO: 34077 - DNA, 18 bp, Artificial Sequence
  Synthetic
aatcttgtgagcgcttgg

SEQ ID NO: 34078 - DNA, 22 bp, Artificial Sequence
  Synthetic
cacacttttcaagaagcattct

SEQ ID NO: 34079 - DNA, 21 bp, Artificial Sequence
  Synthetic
tcttttgtcacatgtttggtc

SEQ ID NO: 34080 - DNA, 20 bp, Artificial Sequence
  Synthetic
gctcatgtcaaagagtgaat

SEQ ID NO: 34081 - DNA, 25 bp, Artificial Sequence
  Synthetic
ccttataaacatagagaaacccatc

SEQ ID NO: 34082 - DNA, 21 bp, Artificial Sequence
  Synthetic
tttgtcaatctcaaagctctt

SEQ ID NO: 34083 - DNA, 21 bp, Artificial Sequence
  Synthetic
ccatgaaatcatctggcaatt

SEQ ID NO: 34084 - DNA, 21 bp, Artificial Sequence
  Synthetic
gtggataattttggtccacaa

SEQ ID NO: 34085 - DNA, 22 bp, Artificial Sequence
  Synthetic
tgagtctggaatacattgtttc

SEQ ID NO: 34086 - DNA, 21 bp, Artificial Sequence
  Synthetic
agaagcaaattagcacattca

SEQ ID NO: 34087 - DNA, 18 bp, Artificial Sequence
  Synthetic
cagtgtaggcagcaatca

SEQ ID NO: 34088 - DNA, 23 bp, Artificial Sequence
  Synthetic
acttgaaattgcaccaaaattag

SEQ ID NO: 34089 - DNA, 22 bp, Artificial Sequence
  Synthetic
taataaaccaagaagtgccatt

SEQ ID NO: 34090 - DNA, 23 bp, Artificial Sequence
  Synthetic
ttaaatttttagcgacctcattg

SEQ ID NO: 34091 - DNA, 23 bp, Artificial Sequence
  Synthetic
atccataagttcgtttatgtgta

SEQ ID NO: 34092 - DNA, 19 bp, Artificial Sequence
  Synthetic
attctacatgcgttgatgc

SEQ ID NO: 34093 - DNA, 22 bp, Artificial Sequence
  Synthetic
acaagcttgttaaagatgaaga

SEQ ID NO: 34094 - DNA, 18 bp, Artificial Sequence
  Synthetic
gcgagtagacgtaaaccg

SEQ ID NO: 34095 - DNA, 19 bp, Artificial Sequence
  Synthetic
atacaagccattgcaatcg

SEQ ID NO: 34096 - DNA, 19 bp, Artificial Sequence
  Synthetic
acggtagcggttgtatgca

SEQ ID NO: 34097 - DNA, 19 bp, Artificial Sequence
  Synthetic
aagagggtgaaatggtgaa

SEQ ID NO: 34098 - DNA, 21 bp, Artificial Sequence
  Synthetic
gtgccatctatgaaaaggtaa

SEQ ID NO: 34099 - DNA, 18 bp, Artificial Sequence
  Synthetic
ttgattggaacgccctgg

SEQ ID NO: 34100 - DNA, 19 bp, Artificial Sequence
  Synthetic
cgagaagaggcttgactgc

SEQ ID NO: 34101 - DNA, 21 bp, Artificial Sequence
  Synthetic
aatttccttgggtttgttctg

SEQ ID NO: 34102 - DNA, 18 bp, Artificial Sequence
  Synthetic
tttgtctctgcggcaaag

SEQ ID NO: 34103 - DNA, 21 bp, Artificial Sequence
  Synthetic
tctccctagcattattcactg

SEQ ID NO: 34104 - DNA, 19 bp, Artificial Sequence
  Synthetic
aggtttttgccttgggtaa

SEQ ID NO: 34105 - DNA, 19 bp, Artificial Sequence
  Synthetic
ggattatgggcaacggctg

SEQ ID NO: 34106 - DNA, 20 bp, Artificial Sequence
  Synthetic
atctagaagcaccacttgaa

SEQ ID NO: 34107 - DNA, 19 bp, Artificial Sequence
  Synthetic
agtcaagtatgatggccac

SEQ ID NO: 34108 - DNA, 18 bp, Artificial Sequence
  Synthetic
ttgatgttctgggatggc

SEQ ID NO: 34109 - DNA, 22 bp, Artificial Sequence
  Synthetic
cattggtacagcattgacataa

SEQ ID NO: 34110 - DNA, 20 bp, Artificial Sequence
  Synthetic
aatatttccttggtcgggtg

SEQ ID NO: 34111 - DNA, 21 bp, Artificial Sequence
  Synthetic
agaaccacaaaacataaagct

SEQ ID NO: 34112 - DNA, 21 bp, Artificial Sequence
  Synthetic
ataaccagctgaggaatatgt

SEQ ID NO: 34113 - DNA, 18 bp, Artificial Sequence
  Synthetic
gaacagagctggtgtgtc

SEQ ID NO: 34114 - DNA, 21 bp, Artificial Sequence
  Synthetic
catgtaataggctgatgcaat

SEQ ID NO: 34115 - DNA, 22 bp, Artificial Sequence
  Synthetic
gtaaaaacatcaggtctggttt

SEQ ID NO: 34116 - DNA, 25 bp, Artificial Sequence
  Synthetic
ggtaatattctgattcttgaatctc

SEQ ID NO: 34117 - DNA, 19 bp, Artificial Sequence
  Synthetic
ctgttgtttgatgctgtct

SEQ ID NO: 34118 - DNA, 18 bp, Artificial Sequence
  Synthetic
aatccactctagcccacg

SEQ ID NO: 34119 - DNA, 19 bp, Artificial Sequence
  Synthetic
tggcaaaacaaagtcatgt

SEQ ID NO: 34120 - DNA, 18 bp, Artificial Sequence
  Synthetic
tggtcgaaagctttttgc

SEQ ID NO: 34121 - DNA, 19 bp, Artificial Sequence
  Synthetic
tgtttgagtagtgagcgac

SEQ ID NO: 34122 - DNA, 19 bp, Artificial Sequence
  Synthetic
catcttcacgtgagggtaa

SEQ ID NO: 34123 - DNA, 20 bp, Artificial Sequence
  Synthetic
ttagtgattaaaccctgggt

SEQ ID NO: 34124 - DNA, 20 bp, Artificial Sequence
  Synthetic
aggctaccatcatagtttga

SEQ ID NO: 34125 - DNA, 19 bp, Artificial Sequence
  Synthetic
cgtgttcctgcatacatga

SEQ ID NO: 34126 - DNA, 20 bp, Artificial Sequence
  Synthetic
ctcgaagactgaatctggaa

SEQ ID NO: 34127 - DNA, 19 bp, Artificial Sequence
  Synthetic
acagtaaggtggctctaac

SEQ ID NO: 34128 - DNA, 23 bp, Artificial Sequence
  Synthetic
gtaagcctactgtgtaaatacat

SEQ ID NO: 34129 - DNA, 18 bp, Artificial Sequence
  Synthetic
gctctgagactgctgtag

SEQ ID NO: 34130 - DNA, 18 bp, Artificial Sequence
  Synthetic
tccttctagggctttccg

SEQ ID NO: 34131 - DNA, 20 bp, Artificial Sequence
  Synthetic
cagagtcacttcagttcctt

SEQ ID NO: 34132 - DNA, 22 bp, Artificial Sequence
  Synthetic
atatccctagtaggatcggata

SEQ ID NO: 34133 - DNA, 20 bp, Artificial Sequence
  Synthetic
cgtcatgctcaaatgctaaa

SEQ ID NO: 34134 - DNA, 24 bp, Artificial Sequence
  Synthetic
agaatctgtgattataagagaagg

SEQ ID NO: 34135 - DNA, 23 bp, Artificial Sequence
  Synthetic
tgtttcctactttgttccataat

SEQ ID NO: 34136 - DNA, 23 bp, Artificial Sequence
  Synthetic
tggtgaaatacaaataagatcct

SEQ ID NO: 34137 - DNA, 18 bp, Artificial Sequence
  Synthetic
ctggtgtatccgttggtg

SEQ ID NO: 34138 - DNA, 18 bp, Artificial Sequence
  Synthetic
gcacaagaggtcaggaag

SEQ ID NO: 34139 - DNA, 19 bp, Artificial Sequence
  Synthetic
gccacaataggtgtcaacc

SEQ ID NO: 34140 - DNA, 20 bp, Artificial Sequence
  Synthetic
tgaaacaacagaaccacttg

SEQ ID NO: 34141 - DNA, 19 bp, Artificial Sequence
  Synthetic
atttgcagcttcatcttcc

SEQ ID NO: 34142 - DNA, 25 bp, Artificial Sequence
  Synthetic
cctcgaatagtacattaaaacattg

SEQ ID NO: 34143 - DNA, 18 bp, Artificial Sequence
  Synthetic
tctggaagaagtgccttc

SEQ ID NO: 34144 - DNA, 20 bp, Artificial Sequence
  Synthetic
agtcttccaagtcgtcccaa

SEQ ID NO: 34145 - DNA, 25 bp, Artificial Sequence
  Synthetic
ttgtagttacttcaacttcagctat

SEQ ID NO: 34146 - DNA, 20 bp, Artificial Sequence
  Synthetic
ggtctagtacatcctgctga

SEQ ID NO: 34147 - DNA, 23 bp, Artificial Sequence
  Synthetic
aattcctgactcagatactttcg

SEQ ID NO: 34148 - DNA, 23 bp, Artificial Sequence
  Synthetic
ttgtatatcagttaggcaccttt

SEQ ID NO: 34149 - DNA, 22 bp, Artificial Sequence
  Synthetic
ttcctagttttacttgcattga

SEQ ID NO: 34150 - DNA, 21 bp, Artificial Sequence
  Synthetic
tttgacttgctcctagagatc

SEQ ID NO: 34151 - DNA, 23 bp, Artificial Sequence
  Synthetic
tgcacatctgtatataaaacctc

SEQ ID NO: 34152 - DNA, 22 bp, Artificial Sequence
  Synthetic
catcatttagattggaatgcca

SEQ ID NO: 34153 - DNA, 20 bp, Artificial Sequence
  Synthetic
cgaccagagagtacccttct

SEQ ID NO: 34154 - DNA, 18 bp, Artificial Sequence
  Synthetic
gttcaagagtgctggagt

SEQ ID NO: 34155 - DNA, 21 bp, Artificial Sequence
  Synthetic
tgattttggtctgattttgct

SEQ ID NO: 34156 - DNA, 25 bp, Artificial Sequence
  Synthetic
ctcattaataaagttttcagctgtg

SEQ ID NO: 34157 - DNA, 22 bp, Artificial Sequence
  Synthetic
ttgtgttcgtttagtagcttta

SEQ ID NO: 34158 - DNA, 18 bp, Artificial Sequence
  Synthetic
agaaggcacgttccatag

SEQ ID NO: 34159 - DNA, 23 bp, Artificial Sequence
  Synthetic
tattggttgcaaatatagctaga

SEQ ID NO: 34160 - DNA, 18 bp, Artificial Sequence
  Synthetic
aggttgtcggaactgttt

SEQ ID NO: 34161 - DNA, 25 bp, Artificial Sequence
  Synthetic
gacattagctacatataaaacaggt

SEQ ID NO: 34162 - DNA, 19 bp, Artificial Sequence
  Synthetic
cacgaacctctttttcacc

SEQ ID NO: 34163 - DNA, 23 bp, Artificial Sequence
  Synthetic
aaaagtagtaggtttcacaaagt

SEQ ID NO: 34164 - DNA, 20 bp, Artificial Sequence
  Synthetic
aaacttgacagcattgacaa

SEQ ID NO: 34165 - DNA, 23 bp, Artificial Sequence
  Synthetic
ttgaatgattccaaaaataccag

SEQ ID NO: 34166 - DNA, 23 bp, Artificial Sequence
  Synthetic
ggaatagtataagccacaatttg

SEQ ID NO: 34167 - DNA, 24 bp, Artificial Sequence
  Synthetic
gacctattactcattttgctcata

SEQ ID NO: 34168 - DNA, 23 bp, Artificial Sequence
  Synthetic
tttctaaaagaagtcgattttgc

SEQ ID NO: 34169 - DNA, 20 bp, Artificial Sequence
  Synthetic
cgttttattccagcgtcaaa

SEQ ID NO: 34170 - DNA, 19 bp, Artificial Sequence
  Synthetic
aacattttgacccagacct

SEQ ID NO: 34171 - DNA, 20 bp, Artificial Sequence
  Synthetic
agtccatactgttgcacaat

SEQ ID NO: 34172 - DNA, 22 bp, Artificial Sequence
  Synthetic
tcagctttttctttactcatca

SEQ ID NO: 34173 - DNA, 18 bp, Artificial Sequence
  Synthetic
tctcacatcacgcttagc

SEQ ID NO: 34174 - DNA, 21 bp, Artificial Sequence
  Synthetic
tgaattgatgattagccacca

SEQ ID NO: 34175 - DNA, 23 bp, Artificial Sequence
  Synthetic
tcggaaattgaccaaaagaatta

SEQ ID NO: 34176 - DNA, 20 bp, Artificial Sequence
  Synthetic
tgtcaaacttgtagcccaaa

SEQ ID NO: 34177 - DNA, 20 bp, Artificial Sequence
  Synthetic
ccactatttttgctggacaa

SEQ ID NO: 34178 - DNA, 21 bp, Artificial Sequence
  Synthetic
agaacttttaagtgcgttagt

SEQ ID NO: 34179 - DNA, 21 bp, Artificial Sequence
  Synthetic
cgattaatttccctagtggtc

SEQ ID NO: 34180 - DNA, 18 bp, Artificial Sequence
  Synthetic
tcacatcagtcgttccac

SEQ ID NO: 34181 - DNA, 19 bp, Artificial Sequence
  Synthetic
ttatcgtcaagggctttga

SEQ ID NO: 34182 - DNA, 18 bp, Artificial Sequence
  Synthetic
tgggtaaagtcgtgcaac

SEQ ID NO: 34183 - DNA, 20 bp, Artificial Sequence
  Synthetic
agcatgttacgtaaggcttt

SEQ ID NO: 34184 - DNA, 21 bp, Artificial Sequence
  Synthetic
tctttaccaagagatgcttca

SEQ ID NO: 34185 - DNA, 22 bp, Artificial Sequence
  Synthetic
caaaatcattggtatgctttgg

SEQ ID NO: 34186 - DNA, 18 bp, Artificial Sequence
  Synthetic
aatccccattgcttcagc

SEQ ID NO: 34187 - DNA, 19 bp, Artificial Sequence
  Synthetic
tgcagatgcgaatggtgtc

SEQ ID NO: 34188 - DNA, 22 bp, Artificial Sequence
  Synthetic
ataaaatcaatggccaaacctt

SEQ ID NO: 34189 - DNA, 21 bp, Artificial Sequence
  Synthetic
gcttactctgtcagaattgtc

SEQ ID NO: 34190 - DNA, 18 bp, Artificial Sequence
  Synthetic
gatgaatgcgttccccag

SEQ ID NO: 34191 - DNA, 23 bp, Artificial Sequence
  Synthetic
tctgtcttcatgattaaatggat

SEQ ID NO: 34192 - DNA, 20 bp, Artificial Sequence
  Synthetic
cctttttaccagctgtttgc

SEQ ID NO: 34193 - DNA, 23 bp, Artificial Sequence
  Synthetic
acgttctatataaggctcgatag

SEQ ID NO: 34194 - DNA, 22 bp, Artificial Sequence
  Synthetic
tgatatagtcctgactcgctaa

SEQ ID NO: 34195 - DNA, 23 bp, Artificial Sequence
  Synthetic
aaggttgttttccaatataagct

SEQ ID NO: 34196 - DNA, 18 bp, Artificial Sequence
  Synthetic
caacacctgtcccacaac

SEQ ID NO: 34197 - DNA, 19 bp, Artificial Sequence
  Synthetic
cttggtcgatgtctttgac

SEQ ID NO: 34198 - DNA, 21 bp, Artificial Sequence
  Synthetic
aaaaactgatgaaaagcgtga

SEQ ID NO: 34199 - DNA, 24 bp, Artificial Sequence
  Synthetic
acaaatatcccttttcttagcttc

SEQ ID NO: 34200 - DNA, 18 bp, Artificial Sequence
  Synthetic
catctccacttccaaccc

SEQ ID NO: 34201 - DNA, 20 bp, Artificial Sequence
  Synthetic
tcaattgtcttaatgccacc

SEQ ID NO: 34202 - DNA, 20 bp, Artificial Sequence
  Synthetic
tgattgcccgaataaaggat

SEQ ID NO: 34203 - DNA, 18 bp, Artificial Sequence
  Synthetic
acaaaacatcctgacgct

SEQ ID NO: 34204 - DNA, 23 bp, Artificial Sequence
  Synthetic
tgttattggtctgtagaaagtcc

SEQ ID NO: 34205 - DNA, 21 bp, Artificial Sequence
  Synthetic
tgaaatagcaagatcagcttt

SEQ ID NO: 34206 - DNA, 18 bp, Artificial Sequence
  Synthetic
gctaaaaaaccagcagct

SEQ ID NO: 34207 - DNA, 18 bp, Artificial Sequence
  Synthetic
cccttgcttcttctggat

SEQ ID NO: 34208 - DNA, 23 bp, Artificial Sequence
  Synthetic
tattttaaacccagctttgaaag

SEQ ID NO: 34209 - DNA, 21 bp, Artificial Sequence
  Synthetic
tcttttccttatgaaatgggc

SEQ ID NO: 34210 - DNA, 22 bp, Artificial Sequence
  Synthetic
aaactgcatggtaaaatttagc

SEQ ID NO: 34211 - DNA, 18 bp, Artificial Sequence
  Synthetic
tttccatatcagctgccg

SEQ ID NO: 34212 - DNA, 24 bp, Artificial Sequence
  Synthetic
cattttattggggattctgacaat

SEQ ID NO: 34213 - DNA, 18 bp, Artificial Sequence
  Synthetic
ttggcattggtaaggtca

SEQ ID NO: 34214 - DNA, 23 bp, Artificial Sequence
  Synthetic
caacttgaacgttaaaagttgtt

SEQ ID NO: 34215 - DNA, 21 bp, Artificial Sequence
  Synthetic
tgtctagctcttttagaaggt

SEQ ID NO: 34216 - DNA, 23 bp, Artificial Sequence
  Synthetic
ccataggtttttgctaaatcaat

SEQ ID NO: 34217 - DNA, 20 bp, Artificial Sequence
  Synthetic
tggtcattttggtaagcaaa

SEQ ID NO: 34218 - DNA, 24 bp, Artificial Sequence
  Synthetic
caatctattctttctattgggtga

SEQ ID NO: 34219 - DNA, 22 bp, Artificial Sequence
  Synthetic
gtaagttttaatgccaattggt

SEQ ID NO: 34220 - DNA, 19 bp, Artificial Sequence
  Synthetic
tcttccaactcaacgtctt

SEQ ID NO: 34221 - DNA, 24 bp, Artificial Sequence
  Synthetic
ttgtgccattaaataatcacttcc

SEQ ID NO: 34222 - DNA, 22 bp, Artificial Sequence
  Synthetic
agccagcattattaatcaagac

SEQ ID NO: 34223 - DNA, 22 bp, Artificial Sequence
  Synthetic
agtaaatttaccaacgctttcc

SEQ ID NO: 34224 - DNA, 19 bp, Artificial Sequence
  Synthetic
gccctcttcaatagcttga

SEQ ID NO: 34225 - DNA, 23 bp, Artificial Sequence
  Synthetic
cctcatgttgttctttaaagaca

SEQ ID NO: 34226 - DNA, 24 bp, Artificial Sequence
  Synthetic
ttagagaaataacttcttgcctct

SEQ ID NO: 34227 - DNA, 18 bp, Artificial Sequence
  Synthetic
ttgatcacaggaaccacc

SEQ ID NO: 34228 - DNA, 21 bp, Artificial Sequence
  Synthetic
tgttgaacagatttggcaaat

SEQ ID NO: 34229 - DNA, 25 bp, Artificial Sequence
  Synthetic
aatcgactgacaattctaaatcaac

SEQ ID NO: 34230 - DNA, 19 bp, Artificial Sequence
  Synthetic
accaactgccttatagtgg

SEQ ID NO: 34231 - DNA, 21 bp, Artificial Sequence
  Synthetic
cctttgtgtcataaacctctt

SEQ ID NO: 34232 - DNA, 18 bp, Artificial Sequence
  Synthetic
gagattgctggcatttcc

SEQ ID NO: 34233 - DNA, 19 bp, Artificial Sequence
  Synthetic
cagagtgacggtaaccaaa

SEQ ID NO: 34234 - DNA, 21 bp, Artificial Sequence
  Synthetic
tcataatctttagctgtgcca

SEQ ID NO: 34235 - DNA, 22 bp, Artificial Sequence
  Synthetic
tgaatatgccaaaaaaggacct

SEQ ID NO: 34236 - DNA, 18 bp, Artificial Sequence
  Synthetic
ttcactaacgacaccagc

SEQ ID NO: 34237 - DNA, 20 bp, Artificial Sequence
  Synthetic
ggcacaggttttggaatcct

SEQ ID NO: 34238 - DNA, 18 bp, Artificial Sequence
  Synthetic
ttggaaaggagtggcaac

SEQ ID NO: 34239 - DNA, 22 bp, Artificial Sequence
  Synthetic
gttttcagatgaagtacaacag

SEQ ID NO: 34240 - DNA, 18 bp, Artificial Sequence
  Synthetic
aaaggggtcaacgctaaa

SEQ ID NO: 34241 - DNA, 21 bp, Artificial Sequence
  Synthetic
gcaagactgtcaatgttcaag

SEQ ID NO: 34242 - DNA, 18 bp, Artificial Sequence
  Synthetic
cctgatgaggtccgatca

SEQ ID NO: 34243 - DNA, 18 bp, Artificial Sequence
  Synthetic
aaggggaagggcaatttg

SEQ ID NO: 34244 - DNA, 20 bp, Artificial Sequence
  Synthetic
ctatcgtctttgatggacca

SEQ ID NO: 34245 - DNA, 22 bp, Artificial Sequence
  Synthetic
ttaaaccgtatgacgaaacaga

SEQ ID NO: 34246 - DNA, 18 bp, Artificial Sequence
  Synthetic
tgcagaccttggacatct

SEQ ID NO: 34247 - DNA, 19 bp, Artificial Sequence
  Synthetic
gggaaaaatggagttgagc

SEQ ID NO: 34248 - DNA, 21 bp, Artificial Sequence
  Synthetic
aatgaaaaatggggttgttcc

SEQ ID NO: 34249 - DNA, 18 bp, Artificial Sequence
  Synthetic
gctcgcacagataccatt

SEQ ID NO: 34250 - DNA, 24 bp, Artificial Sequence
  Synthetic
cgatatatcctaaagaagacagat

SEQ ID NO: 34251 - DNA, 23 bp, Artificial Sequence
  Synthetic
tggatgctattattgaagctaaa

SEQ ID NO: 34252 - DNA, 19 bp, Artificial Sequence
  Synthetic
ggcatgattatcaaaggcc

SEQ ID NO: 34253 - DNA, 20 bp, Artificial Sequence
  Synthetic
gggattcttgaagtggttga

SEQ ID NO: 34254 - DNA, 22 bp, Artificial Sequence
  Synthetic
acatataccttgcctatctctt

SEQ ID NO: 34255 - DNA, 18 bp, Artificial Sequence
  Synthetic
gtggcagaaaccttctcg

SEQ ID NO: 34256 - DNA, 23 bp, Artificial Sequence
  Synthetic
acaattgtctttaatcagttggt

SEQ ID NO: 34257 - DNA, 22 bp, Artificial Sequence
  Synthetic
cttaattacatctgtggctgtt

SEQ ID NO: 34258 - DNA, 22 bp, Artificial Sequence
  Synthetic
ctgatttgttccaagaaaatgg

SEQ ID NO: 34259 - DNA, 20 bp, Artificial Sequence
  Synthetic
ggtgatcttttattggcaca

SEQ ID NO: 34260 - DNA, 20 bp, Artificial Sequence
  Synthetic
ctagccataaaggagctgat

SEQ ID NO: 34261 - DNA, 21 bp, Artificial Sequence
  Synthetic
gttacatctatcgtggtgcta

SEQ ID NO: 34262 - DNA, 19 bp, Artificial Sequence
  Synthetic
tccatgtctggctttcaag

SEQ ID NO: 34263 - DNA, 20 bp, Artificial Sequence
  Synthetic
gctctgaactaaggtggtac

SEQ ID NO: 34264 - DNA, 18 bp, Artificial Sequence
  Synthetic
aagaattgcaacgtcgtg

SEQ ID NO: 34265 - DNA, 22 bp, Artificial Sequence
  Synthetic
cccacaatatcttctgtcagat

SEQ ID NO: 34266 - DNA, 18 bp, Artificial Sequence
  Synthetic
tcaggtggttagagtgca

SEQ ID NO: 34267 - DNA, 24 bp, Artificial Sequence
  Synthetic
ttacggattcttgttagactatag

SEQ ID NO: 34268 - DNA, 19 bp, Artificial Sequence
  Synthetic
gctgttcgcccattaaagc

SEQ ID NO: 34269 - DNA, 20 bp, Artificial Sequence
  Synthetic
ctaaagagtaacggaggcgc

SEQ ID NO: 34270 - DNA, 19 bp, Artificial Sequence
  Synthetic
caggtagtcgaggcgagta

SEQ ID NO: 34271 - DNA, 20 bp, Artificial Sequence
  Synthetic
acctaaggagagaccgaaag

SEQ ID NO: 34272 - DNA, 25 bp, Artificial Sequence
  Synthetic
caaaataactgttaagtggaaaagg

SEQ ID NO: 34273 - DNA, 20 bp, Artificial Sequence
  Synthetic
acacgtgaaatctcgttgga

SEQ ID NO: 34274 - DNA, 19 bp, Artificial Sequence
  Synthetic
acctattaggagccagccg

SEQ ID NO: 34275 - DNA, 22 bp, Artificial Sequence
  Synthetic
acacatcgttatcaaatcaaac

SEQ ID NO: 34276 - DNA, 18 bp, Artificial Sequence
  Synthetic
aaacaatgggtggtgtct

SEQ ID NO: 34277 - DNA, 21 bp, Artificial Sequence
  Synthetic
atgagcttatctcgtgctaaa

SEQ ID NO: 34278 - DNA, 19 bp, Artificial Sequence
  Synthetic
ccgcacttgcttatggtat

SEQ ID NO: 34279 - DNA, 22 bp, Artificial Sequence
  Synthetic
tggtattgacttaggtacaaca

SEQ ID NO: 34280 - DNA, 18 bp, Artificial Sequence
  Synthetic
cagttcagaccctcccag

SEQ ID NO: 34281 - DNA, 18 bp, Artificial Sequence
  Synthetic
acgtgctgatgagtttga

SEQ ID NO: 34282 - DNA, 18 bp, Artificial Sequence
  Synthetic
tagtcaagaagccgcact

SEQ ID NO: 34283 - DNA, 21 bp, Artificial Sequence
  Synthetic
cgtttaacagggtttgatgtt

SEQ ID NO: 34284 - DNA, 23 bp, Artificial Sequence
  Synthetic
ttaatcgttgagctatttacaca

SEQ ID NO: 34285 - DNA, 22 bp, Artificial Sequence
  Synthetic
ctttttgacttggttaaaagct

SEQ ID NO: 34286 - DNA, 18 bp, Artificial Sequence
  Synthetic
gaacctgttgtgtgccag

SEQ ID NO: 34287 - DNA, 21 bp, Artificial Sequence
  Synthetic
acgctcttttagtttcttgaa

SEQ ID NO: 34288 - DNA, 20 bp, Artificial Sequence
  Synthetic
gcatatcaggaatggttgtc

SEQ ID NO: 34289 - DNA, 19 bp, Artificial Sequence
  Synthetic
agtgccaaagaggtgatta

SEQ ID NO: 34290 - DNA, 19 bp, Artificial Sequence
  Synthetic
ttggaaagtcacaacctga

SEQ ID NO: 34291 - DNA, 25 bp, Artificial Sequence
  Synthetic
gtgcctttataagtatcaatcactt

SEQ ID NO: 34292 - DNA, 21 bp, Artificial Sequence
  Synthetic
tcataaacaatgcttttccct

SEQ ID NO: 34293 - DNA, 18 bp, Artificial Sequence
  Synthetic
tttcttcccactcccctt

SEQ ID NO: 34294 - DNA, 19 bp, Artificial Sequence
  Synthetic
cctgaggaaggtttgcttt

SEQ ID NO: 34295 - DNA, 25 bp, Artificial Sequence
  Synthetic
cctttattgaaagaaatgatatccc

SEQ ID NO: 34296 - DNA, 24 bp, Artificial Sequence
  Synthetic
aaaagaccttgataagcttgaaag

SEQ ID NO: 34297 - DNA, 18 bp, Artificial Sequence
  Synthetic
ttaacatctgctcaggcg

SEQ ID NO: 34298 - DNA, 21 bp, Artificial Sequence
  Synthetic
ttttggtgtctgagctgatta

SEQ ID NO: 34299 - DNA, 23 bp, Artificial Sequence
  Synthetic
gcttagcacattaaaaatagcaa

SEQ ID NO: 34300 - DNA, 19 bp, Artificial Sequence
  Synthetic
aaccaacacgtctagaagt

SEQ ID NO: 34301 - DNA, 22 bp, Artificial Sequence
  Synthetic
gccaatttcatgtagataatgc

SEQ ID NO: 34302 - DNA, 21 bp, Artificial Sequence
  Synthetic
aggtaccttttcaaatggaac

SEQ ID NO: 34303 - DNA, 23 bp, Artificial Sequence
  Synthetic
ctacattgaacgatatcggaatc

SEQ ID NO: 34304 - DNA, 22 bp, Artificial Sequence
  Synthetic
aactatttcctgtttcagctta

SEQ ID NO: 34305 - DNA, 20 bp, Artificial Sequence
  Synthetic
cgggttcaaagacaagctgc

SEQ ID NO: 34306 - DNA, 15 bp, Artificial Sequence
  Synthetic
acagcgcgatgccga

SEQ ID NO: 34307 - DNA, 18 bp, Artificial Sequence
  Synthetic
tagccggccgatgtatcc

SEQ ID NO: 34308 - DNA, 17 bp, Artificial Sequence
  Synthetic
attaatgggggggggcc

SEQ ID NO: 34309 - DNA, 18 bp, Artificial Sequence
  Synthetic
ggcgcttgatccccatag

SEQ ID NO: 34310 - DNA, 18 bp, Artificial Sequence
  Synthetic
tttcaacttacgggcggc

SEQ ID NO: 34311 - DNA, 17 bp, Artificial Sequence
  Synthetic
acccaatctccggccac

SEQ ID NO: 34312 - DNA, 18 bp, Artificial Sequence
  Synthetic
ggaagcgggagacgactc

SEQ ID NO: 34313 - DNA, 16 bp, Artificial Sequence
  Synthetic
ggccaccgacccgtta

SEQ ID NO: 34314 - DNA, 18 bp, Artificial Sequence
  Synthetic
atccaaccaggcctgcat

SEQ ID NO: 34315 - DNA, 16 bp, Artificial Sequence
  Synthetic
acggtgggggcctcat

SEQ ID NO: 34316 - DNA, 20 bp, Artificial Sequence
  Synthetic
ccagggatctaactacggga

SEQ ID NO: 34317 - DNA, 19 bp, Artificial Sequence
  Synthetic
cggccggacatgttgaaag

SEQ ID NO: 34318 - DNA, 20 bp, Artificial Sequence
  Synthetic
tgcatgccttatcggtgaaa

SEQ ID NO: 34319 - DNA, 20 bp, Artificial Sequence
  Synthetic
actgccatgttccagactgt

SEQ ID NO: 34320 - DNA, 16 bp, Artificial Sequence
  Synthetic
ccgggccccagttctt

SEQ ID NO: 34321 - DNA, 19 bp, Artificial Sequence
  Synthetic
ttcttcccctccaactgga

SEQ ID NO: 34322 - DNA, 18 bp, Artificial Sequence
  Synthetic
gctgtcattggcgactgc

SEQ ID NO: 34323 - DNA, 17 bp, Artificial Sequence
  Synthetic
taatgcagccgctcccg

SEQ ID NO: 34324 - DNA, 18 bp, Artificial Sequence
  Synthetic
tgcagtagccacctgagc

SEQ ID NO: 34325 - DNA, 18 bp, Artificial Sequence
  Synthetic
gttgaccagtggcaacgt

SEQ ID NO: 34326 - DNA, 19 bp, Artificial Sequence
  Synthetic
tgatattaacaggcccagc

SEQ ID NO: 34327 - DNA, 20 bp, Artificial Sequence
  Synthetic
cttccacaataagcagtgac

SEQ ID NO: 34328 - DNA, 18 bp, Artificial Sequence
  Synthetic
aaaatgagccaacctcgc

SEQ ID NO: 34329 - DNA, 20 bp, Artificial Sequence
  Synthetic
gacattaccaggaacaacac

SEQ ID NO: 34330 - DNA, 18 bp, Artificial Sequence
  Synthetic
ccagaagctttgcgtaca

SEQ ID NO: 34331 - DNA, 21 bp, Artificial Sequence
  Synthetic
ccatcaagcttaaaaccacta

SEQ ID NO: 34332 - DNA, 20 bp, Artificial Sequence
  Synthetic
tgcttgaacaatagcacatt

SEQ ID NO: 34333 - DNA, 22 bp, Artificial Sequence
  Synthetic
ctctacgaattacacgacttac

SEQ ID NO: 34334 - DNA, 20 bp, Artificial Sequence
  Synthetic
gcttcaacaacacaaccatt

SEQ ID NO: 34335 - DNA, 21 bp, Artificial Sequence
  Synthetic
aacatataggtttcacaggga

SEQ ID NO: 34336 - DNA, 22 bp, Artificial Sequence
  Synthetic
gataatgactgaagttgacctt

SEQ ID NO: 34337 - DNA, 24 bp, Artificial Sequence
  Synthetic
ccataacattactctctacaacaa

SEQ ID NO: 34338 - DNA, 23 bp, Artificial Sequence
  Synthetic
accaacaaaatcattagggtaac

SEQ ID NO: 34339 - DNA, 24 bp, Artificial Sequence
  Synthetic
gaaattataggttcaccaacattg

SEQ ID NO: 34340 - DNA, 18 bp, Artificial Sequence
  Synthetic
ttccaaaagcagcctgta

SEQ ID NO: 34341 - DNA, 19 bp, Artificial Sequence
  Synthetic
acatagccacaacgctaaa

SEQ ID NO: 34342 - DNA, 18 bp, Artificial Sequence
  Synthetic
ataacagacgcgaaccac

SEQ ID NO: 34343 - DNA, 24 bp, Artificial Sequence
  Synthetic
ggtgtatgtacattagattgtgaa

SEQ ID NO: 34344 - DNA, 20 bp, Artificial Sequence
  Synthetic
cacctacaaccattcaacaa

SEQ ID NO: 34345 - DNA, 25 bp, Artificial Sequence
  Synthetic
ggacagttgaaatttttatacaacg

SEQ ID NO: 34346 - DNA, 20 bp, Artificial Sequence
  Synthetic
gagcgtgcttctttatacat

SEQ ID NO: 34347 - DNA, 20 bp, Artificial Sequence
  Synthetic
ccctcagctttcataggttt

SEQ ID NO: 34348 - DNA, 25 bp, Artificial Sequence
  Synthetic
cagcaccattagataacatcttaat

SEQ ID NO: 34349 - DNA, 18 bp, Artificial Sequence
  Synthetic
tcgagctgcactagaacc

SEQ ID NO: 34350 - DNA, 21 bp, Artificial Sequence
  Synthetic
tgttcatcaaagttacgcata

SEQ ID NO: 34351 - DNA, 23 bp, Artificial Sequence
  Synthetic
caccaaaatcataaaagttacca

SEQ ID NO: 34352 - DNA, 21 bp, Artificial Sequence
  Synthetic
aacagaaaaacaaatagtgcg

SEQ ID NO: 34353 - DNA, 22 bp, Artificial Sequence
  Synthetic
tgcgtgtattaacaatggattt

SEQ ID NO: 34354 - DNA, 19 bp, Artificial Sequence
  Synthetic
gtactagcgtcaccagaag

SEQ ID NO: 34355 - DNA, 22 bp, Artificial Sequence
  Synthetic
gttctaacaaaacaacagcatc

SEQ ID NO: 34356 - DNA, 21 bp, Artificial Sequence
  Synthetic
aaataaacttgtggtcggtac

SEQ ID NO: 34357 - DNA, 20 bp, Artificial Sequence
  Synthetic
aatgtgacttaccactacca

SEQ ID NO: 34358 - DNA, 25 bp, Artificial Sequence
  Synthetic
ggtttaataacatcaccaaaattgg

SEQ ID NO: 34359 - DNA, 18 bp, Artificial Sequence
  Synthetic
tactgccaaacaacgtgt

SEQ ID NO: 34360 - DNA, 19 bp, Artificial Sequence
  Synthetic
gtacgtgtgtcaaaacgac

SEQ ID NO: 34361 - DNA, 22 bp, Artificial Sequence
  Synthetic
ctttcagcttcataatcccata

SEQ ID NO: 34362 - DNA, 21 bp, Artificial Sequence
  Synthetic
aaacacatacgttgaagctta

SEQ ID NO: 34363 - DNA, 22 bp, Artificial Sequence
  Synthetic
cacaatcacctgtaatgctaaa

SEQ ID NO: 34364 - DNA, 19 bp, Artificial Sequence
  Synthetic
gcaaaagcactacggtgat

SEQ ID NO: 34365 - DNA, 23 bp, Artificial Sequence
  Synthetic
ccattacaatcatcacaaacagt

SEQ ID NO: 34366 - DNA, 23 bp, Artificial Sequence
  Synthetic
ttacaattaacatcagaaccagt

SEQ ID NO: 34367 - DNA, 22 bp, Artificial Sequence
  Synthetic
tctatgaaacccaaatcgaaat

SEQ ID NO: 34368 - DNA, 23 bp, Artificial Sequence
  Synthetic
tggtttacaaacataacaagaac

SEQ ID NO: 34369 - DNA, 20 bp, Artificial Sequence
  Synthetic
gtgcaattgttaccaccatt

SEQ ID NO: 34370 - DNA, 18 bp, Artificial Sequence
  Synthetic
cacaagcaaggtcagcaa

SEQ ID NO: 34371 - DNA, 18 bp, Artificial Sequence
  Synthetic
tgaaccacgaacttcagt

SEQ ID NO: 34372 - DNA, 23 bp, Artificial Sequence
  Synthetic
acacgagatatgttaacaaaagt

SEQ ID NO: 34373 - DNA, 25 bp, Artificial Sequence
  Synthetic
ccttttcaaattcgtaataaggaag

SEQ ID NO: 34374 - DNA, 23 bp, Artificial Sequence
  Synthetic
tgctatacttataatgcccatac

SEQ ID NO: 34375 - DNA, 23 bp, Artificial Sequence
  Synthetic
agcaactattacatatttaggca

SEQ ID NO: 34376 - DNA, 20 bp, Artificial Sequence
  Synthetic
ttacccttaccaatagggac

SEQ ID NO: 34377 - DNA, 18 bp, Artificial Sequence
  Synthetic
gctagcacgagatgagtt

SEQ ID NO: 34378 - DNA, 20 bp, Artificial Sequence
  Synthetic
gtttcttcaactgagaaggc

SEQ ID NO: 34379 - DNA, 21 bp, Artificial Sequence
  Synthetic
aatctgctcaatgaacttagg

SEQ ID NO: 34380 - DNA, 18 bp, Artificial Sequence
  Synthetic
cgtttgacacaacctcca

SEQ ID NO: 34381 - DNA, 18 bp, Artificial Sequence
  Synthetic
ttcctgttcgctttccag

SEQ ID NO: 34382 - DNA, 22 bp, Artificial Sequence
  Synthetic
tgaatatacacacaatgggttt

SEQ ID NO: 34383 - DNA, 22 bp, Artificial Sequence
  Synthetic
gaaccattttacaaagctcaaa

SEQ ID NO: 34384 - DNA, 22 bp, Artificial Sequence
  Synthetic
gtaacaccatttcaatagctgt

SEQ ID NO: 34385 - DNA, 21 bp, Artificial Sequence
  Synthetic
ccactggatacttttctccat

SEQ ID NO: 34386 - DNA, 18 bp, Artificial Sequence
  Synthetic
gccgtctgcgtacaggtg

SEQ ID NO: 34387 - DNA, 18 bp, Artificial Sequence
  Synthetic
tacacacgtccaagcaaa

SEQ ID NO: 34388 - DNA, 18 bp, Artificial Sequence
  Synthetic
ccgaggggagtataacca

SEQ ID NO: 34389 - DNA, 22 bp, Artificial Sequence
  Synthetic
ctcgtaacacatctaatatggc

SEQ ID NO: 34390 - DNA, 23 bp, Artificial Sequence
  Synthetic
attatagaatcttgagggcctaa

SEQ ID NO: 34391 - DNA, 18 bp, Artificial Sequence
  Synthetic
ccaattgctgtgcccagg

SEQ ID NO: 34392 - DNA, 23 bp, Artificial Sequence
  Synthetic
gtctaaaagctcttcttctgaat

SEQ ID NO: 34393 - DNA, 21 bp, Artificial Sequence
  Synthetic
aactctaaatgcatttggtga

SEQ ID NO: 34394 - DNA, 18 bp, Artificial Sequence
  Synthetic
ggcaacgactacttgtcc

SEQ ID NO: 34395 - DNA, 20 bp, Artificial Sequence
  Synthetic
cgagtaaaaaagtgcctggt

SEQ ID NO: 34396 - DNA, 23 bp, Artificial Sequence
  Synthetic
cttgcattgtttttcatactgat

SEQ ID NO: 34397 - DNA, 20 bp, Artificial Sequence
  Synthetic
ccataagggattagccacaa

SEQ ID NO: 34398 - DNA, 23 bp, Artificial Sequence
  Synthetic
aattcttgaaaagagtacacacc

SEQ ID NO: 34399 - DNA, 21 bp, Artificial Sequence
  Synthetic
atctagtaaccaaccaccata

SEQ ID NO: 34400 - DNA, 22 bp, Artificial Sequence
  Synthetic
cggtttcatcaaagttacttct

SEQ ID NO: 34401 - DNA, 20 bp, Artificial Sequence
  Synthetic
aagtagctttggcattcttg

SEQ ID NO: 34402 - DNA, 19 bp, Artificial Sequence
  Synthetic
aggggcagctatagcatag

SEQ ID NO: 34403 - DNA, 22 bp, Artificial Sequence
  Synthetic
ttgggagctctatgttttaaat

SEQ ID NO: 34404 - DNA, 18 bp, Artificial Sequence
  Synthetic
tagcttgtttggctctgg

SEQ ID NO: 34405 - DNA, 18 bp, Artificial Sequence
  Synthetic
gcctcacaggaacagaag

SEQ ID NO: 34406 - DNA, 23 bp, Artificial Sequence
  Synthetic
tgtattgtgatctgctaacagtt

SEQ ID NO: 34407 - DNA, 23 bp, Artificial Sequence
  Synthetic
tctctttgttcaaaataccttct

SEQ ID NO: 34408 - DNA, 19 bp, Artificial Sequence
  Synthetic
tccagtgttctccttttgg

SEQ ID NO: 34409 - DNA, 24 bp, Artificial Sequence
  Synthetic
ccctactaaaaatatgtctggtat

SEQ ID NO: 34410 - DNA, 19 bp, Artificial Sequence
  Synthetic
ttctccatgctacaccatt

SEQ ID NO: 34411 - DNA, 19 bp, Artificial Sequence
  Synthetic
acggtgccaaacaaatttg

SEQ ID NO: 34412 - DNA, 23 bp, Artificial Sequence
  Synthetic
tgttgtgagtctttattcttgat

SEQ ID NO: 34413 - DNA, 23 bp, Artificial Sequence
  Synthetic
cttcttctatgtcatcaaggtac

SEQ ID NO: 34414 - DNA, 21 bp, Artificial Sequence
  Synthetic
gatcatcagtagcaacaagtt

SEQ ID NO: 34415 - DNA, 23 bp, Artificial Sequence
  Synthetic
gctattactgttttgtggaacaa

SEQ ID NO: 34416 - DNA, 25 bp, Artificial Sequence
  Synthetic
tgagtgttcttatagagaaacagat

SEQ ID NO: 34417 - DNA, 23 bp, Artificial Sequence
  Synthetic
tttttgtcttaacaactcaccaa

SEQ ID NO: 34418 - DNA, 19 bp, Artificial Sequence
  Synthetic
ggttctcaaaggttcaacc

SEQ ID NO: 34419 - DNA, 21 bp, Artificial Sequence
  Synthetic
gctatagaaccatagctctgg

SEQ ID NO: 34420 - DNA, 23 bp, Artificial Sequence
  Synthetic
ttgtgtagaaagaggagttaatc

SEQ ID NO: 34421 - DNA, 24 bp, Artificial Sequence
  Synthetic
gaaaaaatatgggtcaactggaat

SEQ ID NO: 34422 - DNA, 21 bp, Artificial Sequence
  Synthetic
acacgaaatctcaaagttgac

SEQ ID NO: 34423 - DNA, 22 bp, Artificial Sequence
  Synthetic
tgtagtaacatccatagcatga

SEQ ID NO: 34424 - DNA, 23 bp, Artificial Sequence
  Synthetic
aacttgtagatggacatatgatc

SEQ ID NO: 34425 - DNA, 18 bp, Artificial Sequence
  Synthetic
aggagtatcaacggcaag

SEQ ID NO: 34426 - DNA, 19 bp, Artificial Sequence
  Synthetic
acagtcccttcattttcct

SEQ ID NO: 34427 - DNA, 22 bp, Artificial Sequence
  Synthetic
catttctgtccatttctcatca

SEQ ID NO: 34428 - DNA, 25 bp, Artificial Sequence
  Synthetic
gaagttgctattataaaaggagaag

SEQ ID NO: 34429 - DNA, 18 bp, Artificial Sequence
  Synthetic
gggattggttcctcctct

SEQ ID NO: 34430 - DNA, 22 bp, Artificial Sequence
  Synthetic
caaatttataagcatgggaagg

SEQ ID NO: 34431 - DNA, 24 bp, Artificial Sequence
  Synthetic
cactttcataattctctgactttc

SEQ ID NO: 34432 - DNA, 21 bp, Artificial Sequence
  Synthetic
cctgtaatggccatatcaaga

SEQ ID NO: 34433 - DNA, 20 bp, Artificial Sequence
  Synthetic
tcatcttttggacaggttgt

SEQ ID NO: 34434 - DNA, 23 bp, Artificial Sequence
  Synthetic
agagaaatctaaatcaagaccaa

SEQ ID NO: 34435 - DNA, 21 bp, Artificial Sequence
  Synthetic
tgaaccagttcagtagcatta

SEQ ID NO: 34436 - DNA, 19 bp, Artificial Sequence
  Synthetic
ttttgagtgactccagtcc

SEQ ID NO: 34437 - DNA, 20 bp, Artificial Sequence
  Synthetic
tttgttggcttcttttggta

SEQ ID NO: 34438 - DNA, 21 bp, Artificial Sequence
  Synthetic
cccatatgtgatcctgtttac

SEQ ID NO: 34439 - DNA, 19 bp, Artificial Sequence
  Synthetic
tgcttttgagatctgctgc

SEQ ID NO: 34440 - DNA, 21 bp, Artificial Sequence
  Synthetic
tgcttctttgttctttcaaac

SEQ ID NO: 34441 - DNA, 20 bp, Artificial Sequence
  Synthetic
acctaatgttgcctttttgg

SEQ ID NO: 34442 - DNA, 22 bp, Artificial Sequence
  Synthetic
agctcctcaaaggttaaaaatt

SEQ ID NO: 34443 - DNA, 22 bp, Artificial Sequence
  Synthetic
aagttttcttgatacccacaaa

SEQ ID NO: 34444 - DNA, 23 bp, Artificial Sequence
  Synthetic
tacaatcttgtacagagttctct

SEQ ID NO: 34445 - DNA, 23 bp, Artificial Sequence
  Synthetic
ccccatcatcaattaaatcagat

SEQ ID NO: 34446 - DNA, 22 bp, Artificial Sequence
  Synthetic
agtatcttcacactcatgagtt

SEQ ID NO: 34447 - DNA, 24 bp, Artificial Sequence
  Synthetic
gccatatataaccacaatgttctt

SEQ ID NO: 34448 - DNA, 25 bp, Artificial Sequence
  Synthetic
cccttaggtaatttcataacattga

SEQ ID NO: 34449 - DNA, 18 bp, Artificial Sequence
  Synthetic
aaccagtactgcctccag

SEQ ID NO: 34450 - DNA, 21 bp, Artificial Sequence
  Synthetic
tgttacatctgacacaggatg

SEQ ID NO: 34451 - DNA, 18 bp, Artificial Sequence
  Synthetic
ctactgggccttgaacaa

SEQ ID NO: 34452 - DNA, 24 bp, Artificial Sequence
  Synthetic
cggtcagtattagcatgataatag

SEQ ID NO: 34453 - DNA, 20 bp, Artificial Sequence
  Synthetic
cgaccaatttccattcctct

SEQ ID NO: 34454 - DNA, 19 bp, Artificial Sequence
  Synthetic
ttccaaaccctatgtctcc

SEQ ID NO: 34455 - DNA, 22 bp, Artificial Sequence
  Synthetic
gtatctctgttttgatcactgg

SEQ ID NO: 34456 - DNA, 24 bp, Artificial Sequence
  Synthetic
aatacactatctctgttatgttcc

SEQ ID NO: 34457 - DNA, 23 bp, Artificial Sequence
  Synthetic
atttgaatgtttgttgtctagtg

SEQ ID NO: 34458 - DNA, 22 bp, Artificial Sequence
  Synthetic
tgaggatattttgagaccatga

SEQ ID NO: 34459 - DNA, 24 bp, Artificial Sequence
  Synthetic
ggaatcaatgctataatcttccat

SEQ ID NO: 34460 - DNA, 21 bp, Artificial Sequence
  Synthetic
gaccaattattgctgtcaact

SEQ ID NO: 34461 - DNA, 18 bp, Artificial Sequence
  Synthetic
gaacagagaccccccctg

SEQ ID NO: 34462 - DNA, 16 bp, Artificial Sequence
  Synthetic
aagtgttccgcgacgc

SEQ ID NO: 34463 - DNA, 16 bp, Artificial Sequence
  Synthetic
agctccaggtcgtccg

SEQ ID NO: 34464 - DNA, 16 bp, Artificial Sequence
  Synthetic
acagggggtgtgacgg

SEQ ID NO: 34465 - DNA, 19 bp, Artificial Sequence
  Synthetic
cgttcgttccgcacatacg

SEQ ID NO: 34466 - DNA, 16 bp, Artificial Sequence
  Synthetic
tctctacgcgcgtccg

SEQ ID NO: 34467 - DNA, 17 bp, Artificial Sequence
  Synthetic
ggcggcatgagtggagt

SEQ ID NO: 34468 - DNA, 17 bp, Artificial Sequence
  Synthetic
agaagtttccgcgctgg

SEQ ID NO: 34469 - DNA, 20 bp, Artificial Sequence
  Synthetic
aataaacgctgtctcggata

SEQ ID NO: 34470 - DNA, 22 bp, Artificial Sequence
  Synthetic
ccatgattacgagtctaaatgt

SEQ ID NO: 34471 - DNA, 19 bp, Artificial Sequence
  Synthetic
ccgaggaaatgaaggtgtt

SEQ ID NO: 34472 - DNA, 21 bp, Artificial Sequence
  Synthetic
tcgacatacgtagaacagaag

SEQ ID NO: 34473 - DNA, 21 bp, Artificial Sequence
  Synthetic
tgagtatgtgttttttgtcgt

SEQ ID NO: 34474 - DNA, 22 bp, Artificial Sequence
  Synthetic
tgtatgaggctattctgtttac

SEQ ID NO: 34475 - DNA, 19 bp, Artificial Sequence
  Synthetic
tcaacaaactcaacatggc

SEQ ID NO: 34476 - DNA, 20 bp, Artificial Sequence
  Synthetic
gcctcataagacttaccctc

SEQ ID NO: 34477 - DNA, 18 bp, Artificial Sequence
  Synthetic
gttgactccctgttacgg

SEQ ID NO: 34478 - DNA, 18 bp, Artificial Sequence
  Synthetic
tctgcaatcttagcagcc

SEQ ID NO: 34479 - DNA, 19 bp, Artificial Sequence
  Synthetic
ttctcacagtctttttgcg

SEQ ID NO: 34480 - DNA, 21 bp, Artificial Sequence
  Synthetic
actgcaacaaaatagaatgga

SEQ ID NO: 34481 - DNA, 20 bp, Artificial Sequence
  Synthetic
ggacatgtagactgttttcg

SEQ ID NO: 34482 - DNA, 18 bp, Artificial Sequence
  Synthetic
tcagcattaacgccgaag

SEQ ID NO: 34483 - DNA, 21 bp, Artificial Sequence
  Synthetic
tctctagctccagtttccatt

SEQ ID NO: 34484 - DNA, 22 bp, Artificial Sequence
  Synthetic
ggatttcccttgtaatcaatca

SEQ ID NO: 34485 - DNA, 18 bp, Artificial Sequence
  Synthetic
cgtagtctccgatacacc

SEQ ID NO: 34486 - DNA, 21 bp, Artificial Sequence
  Synthetic
atgtattcacaaagctgaact

SEQ ID NO: 34487 - DNA, 21 bp, Artificial Sequence
  Synthetic
cggagcagataatgactttta

SEQ ID NO: 34488 - DNA, 17 bp, Artificial Sequence
  Synthetic
agatggcctcgcagtgg

SEQ ID NO: 34489 - DNA, 18 bp, Artificial Sequence
  Synthetic
gccagacgtgcggagatg

SEQ ID NO: 34490 - DNA, 16 bp, Artificial Sequence
  Synthetic
aggacactccggcgtg

SEQ ID NO: 34491 - DNA, 20 bp, Artificial Sequence
  Synthetic
ggaaaacgagtttgccagac

SEQ ID NO: 34492 - DNA, 19 bp, Artificial Sequence
  Synthetic
catcagtaacacggagcgt

SEQ ID NO: 34493 - DNA, 22 bp, Artificial Sequence
  Synthetic
gtagtcttgattgtagctgaat

SEQ ID NO: 34494 - DNA, 21 bp, Artificial Sequence
  Synthetic
ctattgctcctttagggtcta

SEQ ID NO: 34495 - DNA, 23 bp, Artificial Sequence
  Synthetic
tttctagacattccttagctaag

SEQ ID NO: 34496 - DNA, 18 bp, Artificial Sequence
  Synthetic
tctctgcctgaacccaag

SEQ ID NO: 34497 - DNA, 18 bp, Artificial Sequence
  Synthetic
agcttccattccccattt

SEQ ID NO: 34498 - DNA, 21 bp, Artificial Sequence
  Synthetic
tccaattgagcatttccaaat

SEQ ID NO: 34499 - DNA, 18 bp, Artificial Sequence
  Synthetic
gatttcccaggatccagc

SEQ ID NO: 34500 - DNA, 18 bp, Artificial Sequence
  Synthetic
gggccatgaacttgtctt

SEQ ID NO: 34501 - DNA, 23 bp, Artificial Sequence
  Synthetic
agtaatagttcattctcccttct

SEQ ID NO: 34502 - DNA, 21 bp, Artificial Sequence
  Synthetic
acattttccaattgtgatcgg

SEQ ID NO: 34503 - DNA, 21 bp, Artificial Sequence
  Synthetic
tgctgtgaactgtgtattcat

SEQ ID NO: 34504 - DNA, 20 bp, Artificial Sequence
  Synthetic
gcccgtctttagaaagagcg

SEQ ID NO: 34505 - DNA, 16 bp, Artificial Sequence
  Synthetic
tcttttccccccgccg

SEQ ID NO: 34506 - DNA, 16 bp, Artificial Sequence
  Synthetic
aggaagccggagccct

SEQ ID NO: 34507 - DNA, 16 bp, Artificial Sequence
  Synthetic
tatcggggcggatcgg

SEQ ID NO: 34508 - DNA, 16 bp, Artificial Sequence
  Synthetic
ggagcgttgccgtgga

SEQ ID NO: 34509 - DNA, 16 bp, Artificial Sequence
  Synthetic
tcgtgttcgtcggcgg

SEQ ID NO: 34510 - DNA, 16 bp, Artificial Sequence
  Synthetic
acaacggtcccgccac

SEQ ID NO: 34511 - DNA, 20 bp, Artificial Sequence
  Synthetic
tttcgccgtgtctttcgata

SEQ ID NO: 34512 - DNA, 20 bp, Artificial Sequence
  Synthetic
gagtgcggggagatatacgc

SEQ ID NO: 34513 - DNA, 16 bp, Artificial Sequence
  Synthetic
ttggcgctctcgtggc

SEQ ID NO: 34514 - DNA, 23 bp, Artificial Sequence
  Synthetic
gtgtgtgataattttgagcaatt

SEQ ID NO: 34515 - DNA, 21 bp, Artificial Sequence
  Synthetic
tgttgcgattatagctagcat

SEQ ID NO: 34516 - DNA, 23 bp, Artificial Sequence
  Synthetic
agcatttattaagttggaaaacg

SEQ ID NO: 34517 - DNA, 19 bp, Artificial Sequence
  Synthetic
aaatgatttcagcgtctgc

SEQ ID NO: 34518 - DNA, 19 bp, Artificial Sequence
  Synthetic
gggagaagacgaacgattc

SEQ ID NO: 34519 - DNA, 22 bp, Artificial Sequence
  Synthetic
tgtcagttttgtaatgtgtctt

SEQ ID NO: 34520 - DNA, 19 bp, Artificial Sequence
  Synthetic
ggttgttttcggagactct

SEQ ID NO: 34521 - DNA, 20 bp, Artificial Sequence
  Synthetic
ttcgtgaaggttatgtacgt

SEQ ID NO: 34522 - DNA, 21 bp, Artificial Sequence
  Synthetic
tttgtcgttttcagcagtttg

SEQ ID NO: 34523 - DNA, 19 bp, Artificial Sequence
  Synthetic
tcctcacgaataccgaaat

SEQ ID NO: 34524 - DNA, 21 bp, Artificial Sequence
  Synthetic
gcaatttaacctggatcactc

SEQ ID NO: 34525 - DNA, 18 bp, Artificial Sequence
  Synthetic
ctttctttgcagtgcgtc

SEQ ID NO: 34526 - DNA, 18 bp, Artificial Sequence
  Synthetic
caacttcacccagcatct

SEQ ID NO: 34527 - DNA, 23 bp, Artificial Sequence
  Synthetic
gcatttacatccagatttcgata

SEQ ID NO: 34528 - DNA, 20 bp, Artificial Sequence
  Synthetic
attccggaaaccattcaact

SEQ ID NO: 34529 - DNA, 18 bp, Artificial Sequence
  Synthetic
agaactgcgactcaatcc

SEQ ID NO: 34530 - DNA, 18 bp, Artificial Sequence
  Synthetic
tatccctcgcacgacatt

SEQ ID NO: 34531 - DNA, 20 bp, Artificial Sequence
  Synthetic
accaaatgttcgaaaggaaa

SEQ ID NO: 34532 - DNA, 21 bp, Artificial Sequence
  Synthetic
accccctctataatagaccaa

SEQ ID NO: 34533 - DNA, 20 bp, Artificial Sequence
  Synthetic
aaatccaaacaagcaaatgc

SEQ ID NO: 34534 - DNA, 17 bp, Artificial Sequence
  Synthetic
cggagtgcgacaggaga

SEQ ID NO: 34535 - DNA, 18 bp, Artificial Sequence
  Synthetic
cgttccatgtgtctccgg

SEQ ID NO: 34536 - DNA, 16 bp, Artificial Sequence
  Synthetic
gcggatctggccctca

SEQ ID NO: 34537 - DNA, 16 bp, Artificial Sequence
  Synthetic
actaccgcgtggctga

SEQ ID NO: 34538 - DNA, 20 bp, Artificial Sequence
  Synthetic
gtcgaacagatgtctgacgt

SEQ ID NO: 34539 - DNA, 20 bp, Artificial Sequence
  Synthetic
tcctgttgtatatgaggccc

SEQ ID NO: 34540 - DNA, 18 bp, Artificial Sequence
  Synthetic
gcactctgctgttccttt

SEQ ID NO: 34541 - DNA, 20 bp, Artificial Sequence
  Synthetic
tgtctcgctggattcctctt

SEQ ID NO: 34542 - DNA, 21 bp, Artificial Sequence
  Synthetic
aatggtgaaatttctccaact

SEQ ID NO: 34543 - DNA, 24 bp, Artificial Sequence
  Synthetic
tcaattaaccaccttatttcctca

SEQ ID NO: 34544 - DNA, 18 bp, Artificial Sequence
  Synthetic
tgcaacgtaggcaatgtt

SEQ ID NO: 34545 - DNA, 19 bp, Artificial Sequence
  Synthetic
tccacgaatcttgcagttt

SEQ ID NO: 34546 - DNA, 18 bp, Artificial Sequence
  Synthetic
tggactactaggcgaact

SEQ ID NO: 34547 - DNA, 24 bp, Artificial Sequence
  Synthetic
atctaccatatcatatccactgtc

SEQ ID NO: 34548 - DNA, 22 bp, Artificial Sequence
  Synthetic
aaactgtctaaccaaatcgtga

SEQ ID NO: 34549 - DNA, 18 bp, Artificial Sequence
  Synthetic
caaaataaagccgctgca

SEQ ID NO: 34550 - DNA, 23 bp, Artificial Sequence
  Synthetic
cctataatgcttacacatagctg

SEQ ID NO: 34551 - DNA, 18 bp, Artificial Sequence
  Synthetic
taaacttggcaccacctg

SEQ ID NO: 34552 - DNA, 23 bp, Artificial Sequence
  Synthetic
gcattatgttcattacagtcaaa

SEQ ID NO: 34553 - DNA, 25 bp, Artificial Sequence
  Synthetic
ctttgttagcctatatctaaaacac

SEQ ID NO: 34554 - DNA, 18 bp, Artificial Sequence
  Synthetic
agaggaatgcgacacaat

SEQ ID NO: 34555 - DNA, 18 bp, Artificial Sequence
  Synthetic
gctaatatgcgctttcgg

SEQ ID NO: 34556 - DNA, 18 bp, Artificial Sequence
  Synthetic
cctcaacaccaacacagg

SEQ ID NO: 34557 - DNA, 18 bp, Artificial Sequence
  Synthetic
atcaaccatgtcgccatc

SEQ ID NO: 34558 - DNA, 23 bp, Artificial Sequence
  Synthetic
acattctcacacataaacaacat

SEQ ID NO: 34559 - DNA, 22 bp, Artificial Sequence
  Synthetic
ttaaccatagtgttatgtggtg

SEQ ID NO: 34560 - DNA, 19 bp, Artificial Sequence
  Synthetic
ctgtcaatgccttcttgca

SEQ ID NO: 34561 - DNA, 18 bp, Artificial Sequence
  Synthetic
gacccggtccacatatgt

SEQ ID NO: 34562 - DNA, 23 bp, Artificial Sequence
  Synthetic
gtgtttcaattaggtaacaagga

SEQ ID NO: 34563 - DNA, 18 bp, Artificial Sequence
  Synthetic
tattgccatacccgctgt

SEQ ID NO: 34564 - DNA, 20 bp, Artificial Sequence
  Synthetic
aactctgaaaatggtatgcc

SEQ ID NO: 34565 - DNA, 23 bp, Artificial Sequence
  Synthetic
gtcttttacatattttgcttgca

SEQ ID NO: 34566 - DNA, 18 bp, Artificial Sequence
  Synthetic
tacccgtgtttggaggac

SEQ ID NO: 34567 - DNA, 22 bp, Artificial Sequence
  Synthetic
gctatctctttcaaaacagtct

SEQ ID NO: 34568 - DNA, 22 bp, Artificial Sequence
  Synthetic
gtcgggacaataaatactttgt

SEQ ID NO: 34569 - DNA, 20 bp, Artificial Sequence
  Synthetic
gggaggtgttttctggtgtt

SEQ ID NO: 34570 - DNA, 23 bp, Artificial Sequence
  Synthetic
acattacatatcaacacatgtca

SEQ ID NO: 34571 - DNA, 23 bp, Artificial Sequence
  Synthetic
ccacaacaaaccaaaataaaagt

SEQ ID NO: 34572 - DNA, 23 bp, Artificial Sequence
  Synthetic
ataggagtactactgataggttc

SEQ ID NO: 34573 - DNA, 18 bp, Artificial Sequence
  Synthetic
atagtggcctttgtgcca

SEQ ID NO: 34574 - DNA, 20 bp, Artificial Sequence
  Synthetic
tttacataggcatccgttgt

SEQ ID NO: 34575 - DNA, 21 bp, Artificial Sequence
  Synthetic
gcaaattgacctcccaaaatt

SEQ ID NO: 34576 - DNA, 21 bp, Artificial Sequence
  Synthetic
actagacagatacttggctag

SEQ ID NO: 34577 - DNA, 20 bp, Artificial Sequence
  Synthetic
atctgttgtttttgccctgt

SEQ ID NO: 34578 - DNA, 18 bp, Artificial Sequence
  Synthetic
ggttagccgcattcaggg

SEQ ID NO: 34579 - DNA, 19 bp, Artificial Sequence
  Synthetic
ttaagtaatgcggccagac

SEQ ID NO: 34580 - DNA, 25 bp, Artificial Sequence
  Synthetic
cggaatagatatttctttagtagga

SEQ ID NO: 34581 - DNA, 18 bp, Artificial Sequence
  Synthetic
tgtttgcagtcccacaaa

SEQ ID NO: 34582 - DNA, 21 bp, Artificial Sequence
  Synthetic
ccaacatgtgatataaccagc

SEQ ID NO: 34583 - DNA, 18 bp, Artificial Sequence
  Synthetic
agcaatacaaggcaccaa

SEQ ID NO: 34584 - DNA, 20 bp, Artificial Sequence
  Synthetic
acgctaccatacttggaaga

SEQ ID NO: 34585 - DNA, 25 bp, Artificial Sequence
  Synthetic
ccttcttactaatgttattgattgg

SEQ ID NO: 34586 - DNA, 21 bp, Artificial Sequence
  Synthetic
cagcattacacatttcagtga

SEQ ID NO: 34587 - DNA, 24 bp, Artificial Sequence
  Synthetic
tgttctaactgattgtaacagatc

SEQ ID NO: 34588 - DNA, 23 bp, Artificial Sequence
  Synthetic
ttgtatatggcaatgatagttgg

SEQ ID NO: 34589 - DNA, 18 bp, Artificial Sequence
  Synthetic
tacaagttctacacggcc

SEQ ID NO: 34590 - DNA, 21 bp, Artificial Sequence
  Synthetic
catgaatagctctatcgcatt

SEQ ID NO: 34591 - DNA, 22 bp, Artificial Sequence
  Synthetic
tgtacattcattagtgtgcaaa

SEQ ID NO: 34592 - DNA, 19 bp, Artificial Sequence
  Synthetic
gtgcaatcggtttccaatc

SEQ ID NO: 34593 - DNA, 19 bp, Artificial Sequence
  Synthetic
aggttcaccatcatcagtt

SEQ ID NO: 34594 - DNA, 20 bp, Artificial Sequence
  Synthetic
ccacttcataaggttgcttt

SEQ ID NO: 34595 - DNA, 18 bp, Artificial Sequence
  Synthetic
ttcctctggagaaggcgc

SEQ ID NO: 34596 - DNA, 22 bp, Artificial Sequence
  Synthetic
aaaccatttaagaagtcgatca

SEQ ID NO: 34597 - DNA, 21 bp, Artificial Sequence
  Synthetic
tgttaaatgtgtacctgaagg

SEQ ID NO: 34598 - DNA, 18 bp, Artificial Sequence
  Synthetic
tagaccgcttctggttgt

SEQ ID NO: 34599 - DNA, 18 bp, Artificial Sequence
  Synthetic
ttgccgttgtctcgtaac

SEQ ID NO: 34600 - DNA, 19 bp, Artificial Sequence
  Synthetic
ccagtattctccccatgga

SEQ ID NO: 34601 - DNA, 19 bp, Artificial Sequence
  Synthetic
cattgtttgtaccctgagc

SEQ ID NO: 34602 - DNA, 20 bp, Artificial Sequence
  Synthetic
gcactctttttctggacaaa

SEQ ID NO: 34603 - DNA, 20 bp, Artificial Sequence
  Synthetic
cggaaggattctacgtggag

SEQ ID NO: 34604 - DNA, 21 bp, Artificial Sequence
  Synthetic
atacttaatcacggatccacc

SEQ ID NO: 34605 - DNA, 18 bp, Artificial Sequence
  Synthetic
aagtatttgggccactcc

SEQ ID NO: 34606 - DNA, 22 bp, Artificial Sequence
  Synthetic
gccactattagacaaccactat

SEQ ID NO: 34607 - DNA, 18 bp, Artificial Sequence
  Synthetic
cctgagcatgttgtccat

SEQ ID NO: 34608 - DNA, 21 bp, Artificial Sequence
  Synthetic
tatgtttgtgatcctaccagg

SEQ ID NO: 34609 - DNA, 22 bp, Artificial Sequence
  Synthetic
ggtgtgtatgctagcaaaaatt

SEQ ID NO: 34610 - DNA, 25 bp, Artificial Sequence
  Synthetic
atttgagttgattacatacctagtc

SEQ ID NO: 34611 - DNA, 21 bp, Artificial Sequence
  Synthetic
tcaatactatctggtgcatct

SEQ ID NO: 34612 - DNA, 21 bp, Artificial Sequence
  Synthetic
actctaatgctgtgttcattg

SEQ ID NO: 34613 - DNA, 20 bp, Artificial Sequence
  Synthetic
gttttgtcattcaagctggt

SEQ ID NO: 34614 - DNA, 18 bp, Artificial Sequence
  Synthetic
taacttccctccgcagtc

SEQ ID NO: 34615 - DNA, 20 bp, Artificial Sequence
  Synthetic
gtgcactgatgatacgtact

SEQ ID NO: 34616 - DNA, 23 bp, Artificial Sequence
  Synthetic
gcagtctatttttaagccattct

SEQ ID NO: 34617 - DNA, 20 bp, Artificial Sequence
  Synthetic
gggggaatgaaattagtggt

SEQ ID NO: 34618 - DNA, 21 bp, Artificial Sequence
  Synthetic
gcaaaggacaacattgtttgt

SEQ ID NO: 34619 - DNA, 20 bp, Artificial Sequence
  Synthetic
tgacataagcaaaatctcgc

SEQ ID NO: 34620 - DNA, 23 bp, Artificial Sequence
  Synthetic
ggttaaattctcctttgtcagtg

SEQ ID NO: 34621 - DNA, 19 bp, Artificial Sequence
  Synthetic
aaatgatggcaccttgttc

SEQ ID NO: 34622 - DNA, 19 bp, Artificial Sequence
  Synthetic
gcttgttccatggtgattg

SEQ ID NO: 34623 - DNA, 18 bp, Artificial Sequence
  Synthetic
tcattgacactagcagcc

SEQ ID NO: 34624 - DNA, 21 bp, Artificial Sequence
  Synthetic
ctgatctaacactttcccaag

SEQ ID NO: 34625 - DNA, 18 bp, Artificial Sequence
  Synthetic
cttctccattgtgccagg

SEQ ID NO: 34626 - DNA, 21 bp, Artificial Sequence
  Synthetic
cctttcaggaatcatctccat

SEQ ID NO: 34627 - DNA, 23 bp, Artificial Sequence
  Synthetic
cgtattttaacttggtttcggaa

SEQ ID NO: 34628 - DNA, 18 bp, Artificial Sequence
  Synthetic
tacacactgcttgttccg

SEQ ID NO: 34629 - DNA, 22 bp, Artificial Sequence
  Synthetic
gattgattgttcatctcttcca

SEQ ID NO: 34630 - DNA, 22 bp, Artificial Sequence
  Synthetic
tcatgtcaggtaatattccgat

SEQ ID NO: 34631 - DNA, 22 bp, Artificial Sequence
  Synthetic
taagtgttaacaagcactgact

SEQ ID NO: 34632 - DNA, 19 bp, Artificial Sequence
  Synthetic
gcgccaccatgtcctaatt

SEQ ID NO: 34633 - DNA, 21 bp, Artificial Sequence
  Synthetic
taaactttgggagcacagttt

SEQ ID NO: 34634 - DNA, 20 bp, Artificial Sequence
  Synthetic
agcttatcctcctcttccaa

SEQ ID NO: 34635 - DNA, 22 bp, Artificial Sequence
  Synthetic
tagcctctcttacatttactcc

SEQ ID NO: 34636 - DNA, 20 bp, Artificial Sequence
  Synthetic
cgcccatgagtcataaacca

SEQ ID NO: 34637 - DNA, 24 bp, Artificial Sequence
  Synthetic
aaaatttaaagaatctagcaggcc

SEQ ID NO: 34638 - DNA, 18 bp, Artificial Sequence
  Synthetic
cctcgggttctcgtccat

SEQ ID NO: 34639 - DNA, 19 bp, Artificial Sequence
  Synthetic
cccatcatgcaacacctga

SEQ ID NO: 34640 - DNA, 20 bp, Artificial Sequence
  Synthetic
tgttgtacatgcgctcatcc

SEQ ID NO: 34641 - DNA, 18 bp, Artificial Sequence
  Synthetic
tcacatccagggccactg

SEQ ID NO: 34642 - DNA, 16 bp, Artificial Sequence
  Synthetic
aggccagtctcgtcgc

SEQ ID NO: 34643 - DNA, 18 bp, Artificial Sequence
  Synthetic
catcatccagcaccacgc

SEQ ID NO: 34644 - DNA, 20 bp, Artificial Sequence
  Synthetic
ggcgtctccaaattcttcca

SEQ ID NO: 34645 - DNA, 18 bp, Artificial Sequence
  Synthetic
aaccaggtagcccccctc

SEQ ID NO: 34646 - DNA, 18 bp, Artificial Sequence
  Synthetic
ggaccctgagaccctgga

SEQ ID NO: 34647 - DNA, 18 bp, Artificial Sequence
  Synthetic
gctcacctggcttgtcga

SEQ ID NO: 34648 - DNA, 19 bp, Artificial Sequence
  Synthetic
gcacacggtggaaaaggtg

SEQ ID NO: 34649 - DNA, 18 bp, Artificial Sequence
  Synthetic
tccaacgccctctatggc

SEQ ID NO: 34650 - DNA, 17 bp, Artificial Sequence
  Synthetic
acctttttgctcgcgca

SEQ ID NO: 34651 - DNA, 19 bp, Artificial Sequence
  Synthetic
ccatctttcgccagatcgt

SEQ ID NO: 34652 - DNA, 20 bp, Artificial Sequence
  Synthetic
ccgattttgagctctgggag

SEQ ID NO: 34653 - DNA, 18 bp, Artificial Sequence
  Synthetic
tgcaagccaacccacatc

SEQ ID NO: 34654 - DNA, 18 bp, Artificial Sequence
  Synthetic
cggctctcatcctcgcac

SEQ ID NO: 34655 - DNA, 16 bp, Artificial Sequence
  Synthetic
ttggacctggctcccg

SEQ ID NO: 34656 - DNA, 20 bp, Artificial Sequence
  Synthetic
cagttcatgtccgagatcgc

SEQ ID NO: 34657 - DNA, 18 bp, Artificial Sequence
  Synthetic
gcgacatcagcgaaatgc

SEQ ID NO: 34658 - DNA, 16 bp, Artificial Sequence
  Synthetic
tcgcgaacagggtcgc

SEQ ID NO: 34659 - DNA, 19 bp, Artificial Sequence
  Synthetic
cgcctcaaaaacgcctact

SEQ ID NO: 34660 - DNA, 16 bp, Artificial Sequence
  Synthetic
gggcctaccaccgctt

SEQ ID NO: 34661 - DNA, 17 bp, Artificial Sequence
  Synthetic
cctaccgctgcgcaaca

SEQ ID NO: 34662 - DNA, 20 bp, Artificial Sequence
  Synthetic
gcaaaaaaggctcttcaccg

SEQ ID NO: 34663 - DNA, 20 bp, Artificial Sequence
  Synthetic
ccaagtccatctctgtctgc

SEQ ID NO: 34664 - DNA, 17 bp, Artificial Sequence
  Synthetic
gcttgctgtccgggttt

SEQ ID NO: 34665 - DNA, 16 bp, Artificial Sequence
  Synthetic
tcgcggtcgctcagct

SEQ ID NO: 34666 - DNA, 19 bp, Artificial Sequence
  Synthetic
gtcgtcagggccataatgc

SEQ ID NO: 34667 - DNA, 16 bp, Artificial Sequence
  Synthetic
cccaggccctcgttct

SEQ ID NO: 34668 - DNA, 16 bp, Artificial Sequence
  Synthetic
tacgctgccgctgtcg

SEQ ID NO: 34669 - DNA, 16 bp, Artificial Sequence
  Synthetic
cgcggtcatgtccagc

SEQ ID NO: 34670 - DNA, 16 bp, Artificial Sequence
  Synthetic
gcgctgtccacgtcgt

SEQ ID NO: 34671 - DNA, 16 bp, Artificial Sequence
  Synthetic
tgcgcgaacgggttgg

SEQ ID NO: 34672 - DNA, 18 bp, Artificial Sequence
  Synthetic
tggtgtcgtactgcggag

SEQ ID NO: 34673 - DNA, 18 bp, Artificial Sequence
  Synthetic
atgcccaggaggttgctc

SEQ ID NO: 34674 - DNA, 21 bp, Artificial Sequence
  Synthetic
taacttctgttgctgtcatcc

SEQ ID NO: 34675 - DNA, 20 bp, Artificial Sequence
  Synthetic
cggatgagctgggagtagac

SEQ ID NO: 34676 - DNA, 17 bp, Artificial Sequence
  Synthetic
agtaagaccccagccgg

SEQ ID NO: 34677 - DNA, 16 bp, Artificial Sequence
  Synthetic
ggctcttgcgtctggc

SEQ ID NO: 34678 - DNA, 20 bp, Artificial Sequence
  Synthetic
gggggaggacacaagcatta

SEQ ID NO: 34679 - DNA, 17 bp, Artificial Sequence
  Synthetic
tcgccgtacacctcgtc

SEQ ID NO: 34680 - DNA, 19 bp, Artificial Sequence
  Synthetic
gtcggtggggatctgaatg

SEQ ID NO: 34681 - DNA, 16 bp, Artificial Sequence
  Synthetic
aataccgggtgccgcg

SEQ ID NO: 34682 - DNA, 17 bp, Artificial Sequence
  Synthetic
tggggataagcgcaggc

SEQ ID NO: 34683 - DNA, 18 bp, Artificial Sequence
  Synthetic
ttccaggccttgttccca

SEQ ID NO: 34684 - DNA, 16 bp, Artificial Sequence
  Synthetic
tgtggtgggcatgccg

SEQ ID NO: 34685 - DNA, 20 bp, Artificial Sequence
  Synthetic
agctctccctttagtgtcct

SEQ ID NO: 34686 - DNA, 18 bp, Artificial Sequence
  Synthetic
agtacgtggtgtcctcgc

SEQ ID NO: 34687 - DNA, 18 bp, Artificial Sequence
  Synthetic
cttgaggttctggctgat

SEQ ID NO: 34688 - DNA, 22 bp, Artificial Sequence
  Synthetic
aagcaatagtttggaagttcat

SEQ ID NO: 34689 - DNA, 18 bp, Artificial Sequence
  Synthetic
tccatggggtccagtgac

SEQ ID NO: 34690 - DNA, 16 bp, Artificial Sequence
  Synthetic
agggtggaggcggtgt

SEQ ID NO: 34691 - DNA, 19 bp, Artificial Sequence
  Synthetic
ggtccttgtagccctcagg

SEQ ID NO: 34692 - DNA, 19 bp, Artificial Sequence
  Synthetic
ccctgtcgcagaggaactt

SEQ ID NO: 34693 - DNA, 16 bp, Artificial Sequence
  Synthetic
aagtagggcccgcagc

SEQ ID NO: 34694 - DNA, 16 bp, Artificial Sequence
  Synthetic
gcacggtctgggtgga

SEQ ID NO: 34695 - DNA, 15 bp, Artificial Sequence
  Synthetic
ttcaatggcggcgcg

SEQ ID NO: 34696 - DNA, 17 bp, Artificial Sequence
  Synthetic
cgtgtaccgcaactcgc

SEQ ID NO: 34697 - DNA, 18 bp, Artificial Sequence
  Synthetic
gggtgcgggaataaccag

SEQ ID NO: 34698 - DNA, 16 bp, Artificial Sequence
  Synthetic
cgggatcgcgcacaaa

SEQ ID NO: 34699 - DNA, 18 bp, Artificial Sequence
  Synthetic
aaacgcattgtccagccc

SEQ ID NO: 34700 - DNA, 16 bp, Artificial Sequence
  Synthetic
tatccgccggagcagg

SEQ ID NO: 34701 - DNA, 18 bp, Artificial Sequence
  Synthetic
ctggcgctgcaagtgttt

SEQ ID NO: 34702 - DNA, 18 bp, Artificial Sequence
  Synthetic
tgtggggcatgatgagct

SEQ ID NO: 34703 - DNA, 16 bp, Artificial Sequence
  Synthetic
cgtgcctcgcccttga

SEQ ID NO: 34704 - DNA, 20 bp, Artificial Sequence
  Synthetic
gcggtagttttgcaacatgc

SEQ ID NO: 34705 - DNA, 17 bp, Artificial Sequence
  Synthetic
gacctgggtctcgctca

SEQ ID NO: 34706 - DNA, 18 bp, Artificial Sequence
  Synthetic
taagcacttcgcccgtct

SEQ ID NO: 34707 - DNA, 19 bp, Artificial Sequence
  Synthetic
caggcaataatcgcggctt

SEQ ID NO: 34708 - DNA, 18 bp, Artificial Sequence
  Synthetic
cggcgtcttcaagagtgc

SEQ ID NO: 34709 - DNA, 20 bp, Artificial Sequence
  Synthetic
gagctcaccaactcgttgtt

SEQ ID NO: 34710 - DNA, 19 bp, Artificial Sequence
  Synthetic
gccgagtcaccataggaca

SEQ ID NO: 34711 - DNA, 18 bp, Artificial Sequence
  Synthetic
ttcttgtggggtttgcag

SEQ ID NO: 34712 - DNA, 22 bp, Artificial Sequence
  Synthetic
aaatgtaatgttgagagggcat

SEQ ID NO: 34713 - DNA, 24 bp, Artificial Sequence
  Synthetic
ggttaaagtattcatggtactgta

SEQ ID NO: 34714 - DNA, 21 bp, Artificial Sequence
  Synthetic
ggtggtatgactgtaacctta

SEQ ID NO: 34715 - DNA, 20 bp, Artificial Sequence
  Synthetic
agttcgccatcataccaaat

SEQ ID NO: 34716 - DNA, 18 bp, Artificial Sequence
  Synthetic
tagagttacaaagcccgc

SEQ ID NO: 34717 - DNA, 18 bp, Artificial Sequence
  Synthetic
tagacccccttccacttg

SEQ ID NO: 34718 - DNA, 20 bp, Artificial Sequence
  Synthetic
tttggctacgttcttgtccc

SEQ ID NO: 34719 - DNA, 22 bp, Artificial Sequence
  Synthetic
tcttctaagtactgaatcaggg

SEQ ID NO: 34720 - DNA, 18 bp, Artificial Sequence
  Synthetic
taggaggtcgcgaagtcc

SEQ ID NO: 34721 - DNA, 23 bp, Artificial Sequence
  Synthetic
cgtctaaagcaatacctaatttg

SEQ ID NO: 34722 - DNA, 21 bp, Artificial Sequence
  Synthetic
ccaaagttagcttagagtcct

SEQ ID NO: 34723 - DNA, 25 bp, Artificial Sequence
  Synthetic
gcccaactaaaatcaaatgtaatag

SEQ ID NO: 34724 - DNA, 20 bp, Artificial Sequence
  Synthetic
tcaaaggacggcttcatctc

SEQ ID NO: 34725 - DNA, 21 bp, Artificial Sequence
  Synthetic
attgtgaacagaaatatgccc

SEQ ID NO: 34726 - DNA, 20 bp, Artificial Sequence
  Synthetic
tttgactgaacaacaccctc

SEQ ID NO: 34727 - DNA, 18 bp, Artificial Sequence
  Synthetic
tttcaccaacacagcggc

SEQ ID NO: 34728 - DNA, 19 bp, Artificial Sequence
  Synthetic
gttttaaacacgctgcagg

SEQ ID NO: 34729 - DNA, 22 bp, Artificial Sequence
  Synthetic
ctttgtgtttttcagactttca

SEQ ID NO: 34730 - DNA, 24 bp, Artificial Sequence
  Synthetic
ggtattggtttacctaaaagtcag

SEQ ID NO: 34731 - DNA, 23 bp, Artificial Sequence
  Synthetic
ttaagtcacaaaatcgatacgag

SEQ ID NO: 34732 - DNA, 19 bp, Artificial Sequence
  Synthetic
tgcatcatctgtcacactc

SEQ ID NO: 34733 - DNA, 19 bp, Artificial Sequence
  Synthetic
ggttccatcctgtctgaat

SEQ ID NO: 34734 - DNA, 21 bp, Artificial Sequence
  Synthetic
atcagcatctttagctacagc

SEQ ID NO: 34735 - DNA, 22 bp, Artificial Sequence
  Synthetic
atcatttgtctcttcttcaagt

SEQ ID NO: 34736 - DNA, 23 bp, Artificial Sequence
  Synthetic
cattcaccctaagtttttcttac

SEQ ID NO: 34737 - DNA, 21 bp, Artificial Sequence
  Synthetic
ttgagattgctctgtctttgt

SEQ ID NO: 34738 - DNA, 20 bp, Artificial Sequence
  Synthetic
cgattctggtgtttctttca

SEQ ID NO: 34739 - DNA, 21 bp, Artificial Sequence
  Synthetic
gttctctctgatcttgtttgg

SEQ ID NO: 34740 - DNA, 19 bp, Artificial Sequence
  Synthetic
ttcctcttcatttgcggtt

SEQ ID NO: 34741 - DNA, 21 bp, Artificial Sequence
  Synthetic
tgatgtcatctctcagttcat

SEQ ID NO: 34742 - DNA, 21 bp, Artificial Sequence
  Synthetic
caagatacctgactccatgtt

SEQ ID NO: 34743 - DNA, 18 bp, Artificial Sequence
  Synthetic
ctgggagacattgaggtg

SEQ ID NO: 34744 - DNA, 21 bp, Artificial Sequence
  Synthetic
tcttttctccatcatcgtcta

SEQ ID NO: 34745 - DNA, 19 bp, Artificial Sequence
  Synthetic
attctttcggaattgcagg

SEQ ID NO: 34746 - DNA, 22 bp, Artificial Sequence
  Synthetic
tcttcccttttttgttcttgtt

SEQ ID NO: 34747 - DNA, 18 bp, Artificial Sequence
  Synthetic
tgtccttcctggcttctc

SEQ ID NO: 34748 - DNA, 21 bp, Artificial Sequence
  Synthetic
gaagctctgtatatcaacacg

SEQ ID NO: 34749 - DNA, 18 bp, Artificial Sequence
  Synthetic
cccaagtagtgtctcgtc

SEQ ID NO: 34750 - DNA, 20 bp, Artificial Sequence
  Synthetic
gaattgtcatttcgggttgt

SEQ ID NO: 34751 - DNA, 23 bp, Artificial Sequence
  Synthetic
gtgattaagtttgatgaatacgc

SEQ ID NO: 34752 - DNA, 23 bp, Artificial Sequence
  Synthetic
cccttgagatctaatatgtcaaa

SEQ ID NO: 34753 - DNA, 24 bp, Artificial Sequence
  Synthetic
caagttatcttaagagcatcattg

SEQ ID NO: 34754 - DNA, 18 bp, Artificial Sequence
  Synthetic
tcttggtttcctggtcga

SEQ ID NO: 34755 - DNA, 18 bp, Artificial Sequence
  Synthetic
agtagcccttcccgaaat

SEQ ID NO: 34756 - DNA, 23 bp, Artificial Sequence
  Synthetic
gaaatccagatgatagttctctt

SEQ ID NO: 34757 - DNA, 22 bp, Artificial Sequence
  Synthetic
gtcatccaactgtattaaagca

SEQ ID NO: 34758 - DNA, 23 bp, Artificial Sequence
  Synthetic
gggattattgtaaactgagttgg

SEQ ID NO: 34759 - DNA, 18 bp, Artificial Sequence
  Synthetic
ctctcaaggcaccgaaat

SEQ ID NO: 34760 - DNA, 23 bp, Artificial Sequence
  Synthetic
atcacacgatataatacctgttt

SEQ ID NO: 34761 - DNA, 23 bp, Artificial Sequence
  Synthetic
agaaccaagtatacatagggtta

SEQ ID NO: 34762 - DNA, 22 bp, Artificial Sequence
  Synthetic
agcacttgaaaatttcatctgt

SEQ ID NO: 34763 - DNA, 19 bp, Artificial Sequence
  Synthetic
gctctacaactcctgcatc

SEQ ID NO: 34764 - DNA, 18 bp, Artificial Sequence
  Synthetic
aagtcgcagaacttgtga

SEQ ID NO: 34765 - DNA, 22 bp, Artificial Sequence
  Synthetic
tcacaagaattaacacctgaat

SEQ ID NO: 34766 - DNA, 20 bp, Artificial Sequence
  Synthetic
ccacttccccttttctgaat

SEQ ID NO: 34767 - DNA, 20 bp, Artificial Sequence
  Synthetic
attagctgtcagtccattcg

SEQ ID NO: 34768 - DNA, 19 bp, Artificial Sequence
  Synthetic
gtgttcaatgtcagtgctc

SEQ ID NO: 34769 - DNA, 20 bp, Artificial Sequence
  Synthetic
ccagaaacactcgaggattt

SEQ ID NO: 34770 - DNA, 21 bp, Artificial Sequence
  Synthetic
ggagaggccttattttctcaa

SEQ ID NO: 34771 - DNA, 22 bp, Artificial Sequence
  Synthetic
ggttctgtagaatctattcacc

SEQ ID NO: 34772 - DNA, 23 bp, Artificial Sequence
  Synthetic
cgtgtatctgtagtctttgatga

SEQ ID NO: 34773 - DNA, 18 bp, Artificial Sequence
  Synthetic
attccatgctcttggctg

SEQ ID NO: 34774 - DNA, 21 bp, Artificial Sequence
  Synthetic
tttcttaatccgtccagactc

SEQ ID NO: 34775 - DNA, 18 bp, Artificial Sequence
  Synthetic
tcctttagtgcaaacgcc

SEQ ID NO: 34776 - DNA, 19 bp, Artificial Sequence
  Synthetic
ccgtccactgtccagctat

SEQ ID NO: 34777 - DNA, 18 bp, Artificial Sequence
  Synthetic
ttcaggtctgcgtctccg

SEQ ID NO: 34778 - DNA, 25 bp, Artificial Sequence
  Synthetic
cacacatataggttgtattaaggtt

SEQ ID NO: 34779 - DNA, 22 bp, Artificial Sequence
  Synthetic
ttgtcttactatccattcaggt

SEQ ID NO: 34780 - DNA, 18 bp, Artificial Sequence
  Synthetic
catttttgcctgctctgc

SEQ ID NO: 34781 - DNA, 22 bp, Artificial Sequence
  Synthetic
tcccactttagtatctgctaaa

SEQ ID NO: 34782 - DNA, 18 bp, Artificial Sequence
  Synthetic
tgcttgtcgtgccttaaa

SEQ ID NO: 34783 - DNA, 18 bp, Artificial Sequence
  Synthetic
cactgctttgtggtcctc

SEQ ID NO: 34784 - DNA, 20 bp, Artificial Sequence
  Synthetic
acagacacaaggaacactat

SEQ ID NO: 34785 - DNA, 20 bp, Artificial Sequence
  Synthetic
cgctggattcctctacaagg

SEQ ID NO: 34786 - DNA, 20 bp, Artificial Sequence
  Synthetic
accctcagaggtagcaaagg

SEQ ID NO: 34787 - DNA, 18 bp, Artificial Sequence
  Synthetic
tgcagcagagagggaagg

SEQ ID NO: 34788 - DNA, 22 bp, Artificial Sequence
  Synthetic
tgataactttagacacaggagt

SEQ ID NO: 34789 - DNA, 18 bp, Artificial Sequence
  Synthetic
ccatcaggcaaagcaaat

SEQ ID NO: 34790 - DNA, 18 bp, Artificial Sequence
  Synthetic
ttgtcattcgcaccctta

SEQ ID NO: 34791 - DNA, 23 bp, Artificial Sequence
  Synthetic
gtggctttatattcagatacagg

SEQ ID NO: 34792 - DNA, 19 bp, Artificial Sequence
  Synthetic
aataaaaacttgcgcccca

SEQ ID NO: 34793 - DNA, 22 bp, Artificial Sequence
  Synthetic
acaatacacaaccatagcaaat

SEQ ID NO: 34794 - DNA, 18 bp, Artificial Sequence
  Synthetic
acaaccaaaaaggcgggc

SEQ ID NO: 34795 - DNA, 18 bp, Artificial Sequence
  Synthetic
atgcccaaagttgcaaga

SEQ ID NO: 34796 - DNA, 23 bp, Artificial Sequence
  Synthetic
cctttccattttgtatttcacct

SEQ ID NO: 34797 - DNA, 19 bp, Artificial Sequence
  Synthetic
tgttggcaggattttaggt

SEQ ID NO: 34798 - DNA, 16 bp, Artificial Sequence
  Synthetic
ggctggcagaggtggt

SEQ ID NO: 34799 - DNA, 20 bp, Artificial Sequence
  Synthetic
cagcttgggagttctaggga

SEQ ID NO: 34800 - DNA, 22 bp, Artificial Sequence
  Synthetic
cctcattaaaaacaagtagctg

SEQ ID NO: 34801 - DNA, 20 bp, Artificial Sequence
  Synthetic
ttcttagaaaccctcacacc

SEQ ID NO: 34802 - DNA, 16 bp, Artificial Sequence
  Synthetic
cggtagttggcgcacc

SEQ ID NO: 34803 - DNA, 16 bp, Artificial Sequence
  Synthetic
actacaggccccacgc

SEQ ID NO: 34804 - DNA, 16 bp, Artificial Sequence
  Synthetic
gccaggcccctcaaga

SEQ ID NO: 34805 - DNA, 17 bp, Artificial Sequence
  Synthetic
accgagtccgctccaaa

SEQ ID NO: 34806 - DNA, 18 bp, Artificial Sequence
  Synthetic
tccacgggctttgagact

SEQ ID NO: 34807 - DNA, 20 bp, Artificial Sequence
  Synthetic
gccactagcgcatattttgc

SEQ ID NO: 34808 - DNA, 19 bp, Artificial Sequence
  Synthetic
gcacccggaactatcgttg

SEQ ID NO: 34809 - DNA, 18 bp, Artificial Sequence
  Synthetic
gcagatgacgctctccgg

SEQ ID NO: 34810 - DNA, 17 bp, Artificial Sequence
  Synthetic
gcggctggcgcaaaatt

SEQ ID NO: 34811 - DNA, 23 bp, Artificial Sequence
  Synthetic
tccatgttctgtcatataaacac

SEQ ID NO: 34812 - DNA, 15 bp, Artificial Sequence
  Synthetic
accggaagcgacgct

SEQ ID NO: 34813 - DNA, 19 bp, Artificial Sequence
  Synthetic
gtcctgtggaccaccctat

SEQ ID NO: 34814 - DNA, 20 bp, Artificial Sequence
  Synthetic
gcccagagttttgactctcc

SEQ ID NO: 34815 - DNA, 19 bp, Artificial Sequence
  Synthetic
catgcagcgacctgatctc

SEQ ID NO: 34816 - DNA, 16 bp, Artificial Sequence
  Synthetic
ttgtcgcctctgccgc

SEQ ID NO: 34817 - DNA, 18 bp, Artificial Sequence
  Synthetic
ctgacgtcgtcatcctgc

SEQ ID NO: 34818 - DNA, 18 bp, Artificial Sequence
  Synthetic
ggcatctacagaaggccg

SEQ ID NO: 34819 - DNA, 18 bp, Artificial Sequence
  Synthetic
agccagctgaatcctgct

SEQ ID NO: 34820 - DNA, 18 bp, Artificial Sequence
  Synthetic
gggtctaggctgccatct

SEQ ID NO: 34821 - DNA, 18 bp, Artificial Sequence
  Synthetic
tcgccctcggaaatcgaa

SEQ ID NO: 34822 - DNA, 18 bp, Artificial Sequence
  Synthetic
taccggactccaggaggc

SEQ ID NO: 34823 - DNA, 16 bp, Artificial Sequence
  Synthetic
atcggcgccttgtccg

SEQ ID NO: 34824 - DNA, 19 bp, Artificial Sequence
  Synthetic
acgactagtggcgtgtagg

SEQ ID NO: 34825 - DNA, 19 bp, Artificial Sequence
  Synthetic
gcacgagagttccacgttt

SEQ ID NO: 34826 - DNA, 15 bp, Artificial Sequence
  Synthetic
tcccgacggttgcgt

SEQ ID NO: 34827 - DNA, 18 bp, Artificial Sequence
  Synthetic
gggcagaggaatgtccgg

SEQ ID NO: 34828 - DNA, 17 bp, Artificial Sequence
  Synthetic
cggttccctgcggtaac

SEQ ID NO: 34829 - DNA, 19 bp, Artificial Sequence
  Synthetic
caaagtctgcacgacctcg

SEQ ID NO: 34830 - DNA, 17 bp, Artificial Sequence
  Synthetic
aggagcagcagcaggat

SEQ ID NO: 34831 - DNA, 19 bp, Artificial Sequence
  Synthetic
gctgccagcatttgtgtct

SEQ ID NO: 34832 - DNA, 16 bp, Artificial Sequence
  Synthetic
actacccgcccaccct

SEQ ID NO: 34833 - DNA, 20 bp, Artificial Sequence
  Synthetic
cacacaacagcaagaaacgg

SEQ ID NO: 34834 - DNA, 19 bp, Artificial Sequence
  Synthetic
caagctccaggacgtagtg

SEQ ID NO: 34835 - DNA, 16 bp, Artificial Sequence
  Synthetic
aacggcctcatcgccc

SEQ ID NO: 34836 - DNA, 18 bp, Artificial Sequence
  Synthetic
ggtgtgtctgggcaggtt

SEQ ID NO: 34837 - DNA, 22 bp, Artificial Sequence
  Synthetic
agttcttttattgcaaatgccc

SEQ ID NO: 34838 - DNA, 19 bp, Artificial Sequence
  Synthetic
ggcctccacatgaaaccac

SEQ ID NO: 34839 - DNA, 18 bp, Artificial Sequence
  Synthetic
aaggtcagcacgctaccc

SEQ ID NO: 34840 - DNA, 21 bp, Artificial Sequence
  Synthetic
atactcaaatgcaagcacact

SEQ ID NO: 34841 - DNA, 18 bp, Artificial Sequence
  Synthetic
tatgagataacagcgccg

SEQ ID NO: 34842 - DNA, 21 bp, Artificial Sequence
  Synthetic
gcattatttatcgggtacagg

SEQ ID NO: 34843 - DNA, 20 bp, Artificial Sequence
  Synthetic
cacatctccagacacgtgtc

SEQ ID NO: 34844 - DNA, 16 bp, Artificial Sequence
  Synthetic
actcgttggcgcctgg

SEQ ID NO: 34845 - DNA, 18 bp, Artificial Sequence
  Synthetic
aagtagtccagggctgtg

SEQ ID NO: 34846 - DNA, 19 bp, Artificial Sequence
  Synthetic
agacatggttgcacgttta

SEQ ID NO: 34847 - DNA, 18 bp, Artificial Sequence
  Synthetic
tgtttggggagcctccac

SEQ ID NO: 34848 - DNA, 19 bp, Artificial Sequence
  Synthetic
gtagtggacccccgtagtg

SEQ ID NO: 34849 - DNA, 23 bp, Artificial Sequence
  Synthetic
agccaccttattattactcttct

SEQ ID NO: 34850 - DNA, 22 bp, Artificial Sequence
  Synthetic
attgaaaaaatgacgagtgaac

SEQ ID NO: 34851 - DNA, 24 bp, Artificial Sequence
  Synthetic
ggactgcaaatatctataggtatc

SEQ ID NO: 34852 - DNA, 24 bp, Artificial Sequence
  Synthetic
taacactttaggatgagagcaatt

SEQ ID NO: 34853 - DNA, 22 bp, Artificial Sequence
  Synthetic
gtggggagatatactaacagat

SEQ ID NO: 34854 - DNA, 23 bp, Artificial Sequence
  Synthetic
ttgtaagttctgtaaatgacact

SEQ ID NO: 34855 - DNA, 25 bp, Artificial Sequence
  Synthetic
ggtaattttacttgcatagcattct

SEQ ID NO: 34856 - DNA, 21 bp, Artificial Sequence
  Synthetic
ctagtgtcctgtaatgtccat

SEQ ID NO: 34857 - DNA, 18 bp, Artificial Sequence
  Synthetic
gagatgctggcagtgtcg

SEQ ID NO: 34858 - DNA, 18 bp, Artificial Sequence
  Synthetic
taacagtacccccagcag

SEQ ID NO: 34859 - DNA, 20 bp, Artificial Sequence
  Synthetic
tcttggtgtagtagtggatg

SEQ ID NO: 34860 - DNA, 18 bp, Artificial Sequence
  Synthetic
gggttcgtattgtccctc

SEQ ID NO: 34861 - DNA, 20 bp, Artificial Sequence
  Synthetic
tctgtttaaactcgggtgta

SEQ ID NO: 34862 - DNA, 21 bp, Artificial Sequence
  Synthetic
tgaaactttaggaactgtgac

SEQ ID NO: 34863 - DNA, 18 bp, Artificial Sequence
  Synthetic
ccagtaggagggacacat

SEQ ID NO: 34864 - DNA, 22 bp, Artificial Sequence
  Synthetic
accataaacatcacttgtcatt

SEQ ID NO: 34865 - DNA, 18 bp, Artificial Sequence
  Synthetic
tttaacccctgagccctg

SEQ ID NO: 34866 - DNA, 20 bp, Artificial Sequence
  Synthetic
tgtaattcgtctgcgcttta

SEQ ID NO: 34867 - DNA, 18 bp, Artificial Sequence
  Synthetic
actatttagggggtggcc

SEQ ID NO: 34868 - DNA, 21 bp, Artificial Sequence
  Synthetic
aggctcaagatctagttcaat

SEQ ID NO: 34869 - DNA, 23 bp, Artificial Sequence
  Synthetic
ggacttttcacatactttcgttt

SEQ ID NO: 34870 - DNA, 20 bp, Artificial Sequence
  Synthetic
tgcacgtctgttattgctaa

SEQ ID NO: 34871 - DNA, 21 bp, Artificial Sequence
  Synthetic
catgcatagtgataggcaatt

SEQ ID NO: 34872 - DNA, 19 bp, Artificial Sequence
  Synthetic
tccctagcttctgcctgaa

SEQ ID NO: 34873 - DNA, 18 bp, Artificial Sequence
  Synthetic
atcttctactgcagcacg

SEQ ID NO: 34874 - DNA, 19 bp, Artificial Sequence
  Synthetic
gtttgtggtgcctctagat

SEQ ID NO: 34875 - DNA, 23 bp, Artificial Sequence
  Synthetic
gtttgtacatctaaaatagcagg

SEQ ID NO: 34876 - DNA, 19 bp, Artificial Sequence
  Synthetic
tgctagttttgggttcact

SEQ ID NO: 34877 - DNA, 19 bp, Artificial Sequence
  Synthetic
cctgtctgcagtttcagaa

SEQ ID NO: 34878 - DNA, 18 bp, Artificial Sequence
  Synthetic
tacccacacagccatctg

SEQ ID NO: 34879 - DNA, 20 bp, Artificial Sequence
  Synthetic
actggttaggatctggaaga

SEQ ID NO: 34880 - DNA, 20 bp, Artificial Sequence
  Synthetic
cagcaggtttacatcctact

SEQ ID NO: 34881 - DNA, 18 bp, Artificial Sequence
  Synthetic
gccccatgcaataccatt

SEQ ID NO: 34882 - DNA, 20 bp, Artificial Sequence
  Synthetic
ccaatcttcagcctttgtct

SEQ ID NO: 34883 - DNA, 19 bp, Artificial Sequence
  Synthetic
cattgttggtgcagttgtt

SEQ ID NO: 34884 - DNA, 18 bp, Artificial Sequence
  Synthetic
agctgcataatgggtcag

SEQ ID NO: 34885 - DNA, 22 bp, Artificial Sequence
  Synthetic
gcataggaatgatatgtgtcag

SEQ ID NO: 34886 - DNA, 21 bp, Artificial Sequence
  Synthetic
tctttttgctgtgtaactgtt

SEQ ID NO: 34887 - DNA, 24 bp, Artificial Sequence
  Synthetic
atactttacatacagttccatccc

SEQ ID NO: 34888 - DNA, 23 bp, Artificial Sequence
  Synthetic
accattcctctattataaagcca

SEQ ID NO: 34889 - DNA, 18 bp, Artificial Sequence
  Synthetic
aacaggtctagccatgtg

SEQ ID NO: 34890 - DNA, 19 bp, Artificial Sequence
  Synthetic
ccttggataagctcctcct

SEQ ID NO: 34891 - DNA, 21 bp, Artificial Sequence
  Synthetic
aaatcactacagtctgcttca

SEQ ID NO: 34892 - DNA, 23 bp, Artificial Sequence
  Synthetic
gagatattgacatagactgcaac

SEQ ID NO: 34893 - DNA, 24 bp, Artificial Sequence
  Synthetic
cctgattattatgtgctaaccaag

SEQ ID NO: 34894 - DNA, 23 bp, Artificial Sequence
  Synthetic
tgtccattaacatctcttgtagt

SEQ ID NO: 34895 - DNA, 21 bp, Artificial Sequence
  Synthetic
agtccacttttcttttccaaa

SEQ ID NO: 34896 - DNA, 19 bp, Artificial Sequence
  Synthetic
caggagcaaacacagtttc

SEQ ID NO: 34897 - DNA, 20 bp, Artificial Sequence
  Synthetic
ggatgagagttcaggtgctc

SEQ ID NO: 34898 - DNA, 16 bp, Artificial Sequence
  Synthetic
aggtgggggtgggtga

SEQ ID NO: 34899 - DNA, 24 bp, Artificial Sequence
  Synthetic
ccaggtggtactataatgttttac

SEQ ID NO: 34900 - DNA, 24 bp, Artificial Sequence
  Synthetic
tcgcctattatatagtgatcttct

SEQ ID NO: 34901 - DNA, 18 bp, Artificial Sequence
  Synthetic
tccctgtggtgtttcaga

SEQ ID NO: 34902 - DNA, 22 bp, Artificial Sequence
  Synthetic
tgggtctacttctattacttga

SEQ ID NO: 34903 - DNA, 19 bp, Artificial Sequence
  Synthetic
agaagtccccagaggtatc

SEQ ID NO: 34904 - DNA, 20 bp, Artificial Sequence
  Synthetic
gtctgctgtatctctcacat

SEQ ID NO: 34905 - DNA, 21 bp, Artificial Sequence
  Synthetic
ctgtttagggtcaaatgaagt

SEQ ID NO: 34906 - DNA, 19 bp, Artificial Sequence
  Synthetic
agataccaaagagccactg

SEQ ID NO: 34907 - DNA, 20 bp, Artificial Sequence
  Synthetic
tttagacactctagaagccc

SEQ ID NO: 34908 - DNA, 20 bp, Artificial Sequence
  Synthetic
tgagatttcgcctacaattg

SEQ ID NO: 34909 - DNA, 18 bp, Artificial Sequence
  Synthetic
gtccatttctgagggcac

SEQ ID NO: 34910 - DNA, 21 bp, Artificial Sequence
  Synthetic
cttcaagagccattaggattt

SEQ ID NO: 34911 - DNA, 20 bp, Artificial Sequence
  Synthetic
gcaaatatactgctccgtca

SEQ ID NO: 34912 - DNA, 18 bp, Artificial Sequence
  Synthetic
cctcctcgaaaagtctcc

SEQ ID NO: 34913 - DNA, 19 bp, Artificial Sequence
  Synthetic
aaccacacctcaacttcaa

SEQ ID NO: 34914 - DNA, 18 bp, Artificial Sequence
  Synthetic
gagggaggtggaaggttc

SEQ ID NO: 34915 - DNA, 25 bp, Artificial Sequence
  Synthetic
ggatcacctatattatatccatcaa

SEQ ID NO: 34916 - DNA, 19 bp, Artificial Sequence
  Synthetic
gctgacaaacgagggctac

SEQ ID NO: 34917 - DNA, 18 bp, Artificial Sequence
  Synthetic
tctacatctagtgcggca

SEQ ID NO: 34918 - DNA, 22 bp, Artificial Sequence
  Synthetic
ctaaaggagcatctgatctact

SEQ ID NO: 34919 - DNA, 22 bp, Artificial Sequence
  Synthetic
gcattggaaaatatgtgctatt

SEQ ID NO: 34920 - DNA, 22 bp, Artificial Sequence
  Synthetic
ttgatccaaatcagaactgaat

SEQ ID NO: 34921 - DNA, 22 bp, Artificial Sequence
  Synthetic
tgcaaaagtttcagtacctttg

SEQ ID NO: 34922 - DNA, 18 bp, Artificial Sequence
  Synthetic
atctgccaaactgcgttc

SEQ ID NO: 34923 - DNA, 19 bp, Artificial Sequence
  Synthetic
cccatacggtacaccaaat

SEQ ID NO: 34924 - DNA, 20 bp, Artificial Sequence
  Synthetic
cactggcattactatcttcg

SEQ ID NO: 34925 - DNA, 19 bp, Artificial Sequence
  Synthetic
ttttcgcatctataccgcc

SEQ ID NO: 34926 - DNA, 22 bp, Artificial Sequence
  Synthetic
acctaatggatcaattggtaca

SEQ ID NO: 34927 - DNA, 21 bp, Artificial Sequence
  Synthetic
attagttttttggatggtggt

SEQ ID NO: 34928 - DNA, 24 bp, Artificial Sequence
  Synthetic
cctattactaatccacttcttgtt

SEQ ID NO: 34929 - DNA, 18 bp, Artificial Sequence
  Synthetic
gtcccaatgttgaccaac

SEQ ID NO: 34930 - DNA, 22 bp, Artificial Sequence
  Synthetic
aaaatgacgagcatataattgc

SEQ ID NO: 34931 - DNA, 25 bp, Artificial Sequence
  Synthetic
ctatatttatcttctaaaccagctg

SEQ ID NO: 34932 - DNA, 18 bp, Artificial Sequence
  Synthetic
gatgtccagatgcttccc

SEQ ID NO: 34933 - DNA, 18 bp, Artificial Sequence
  Synthetic
cgaagattgttgccaaca

SEQ ID NO: 34934 - DNA, 23 bp, Artificial Sequence
  Synthetic
tctaagttaaggtcaatgtctct

SEQ ID NO: 34935 - DNA, 22 bp, Artificial Sequence
  Synthetic
tttccaacattttcagtacctt

SEQ ID NO: 34936 - DNA, 23 bp, Artificial Sequence
  Synthetic
caaaatgtcttttaaactttgcc

SEQ ID NO: 34937 - DNA, 20 bp, Artificial Sequence
  Synthetic
cttttaagaaatgctgctgc

SEQ ID NO: 34938 - DNA, 20 bp, Artificial Sequence
  Synthetic
ctcttcgtcgtctgcgagaa

SEQ ID NO: 34939 - DNA, 19 bp, Artificial Sequence
  Synthetic
agctgtgctcatagaaaca

SEQ ID NO: 34940 - DNA, 20 bp, Artificial Sequence
  Synthetic
gctggatcaatagcatcaat

SEQ ID NO: 34941 - DNA, 18 bp, Artificial Sequence
  Synthetic
tatgtcagcaccttcagg

SEQ ID NO: 34942 - DNA, 18 bp, Artificial Sequence
  Synthetic
cgggaaggcctacttaaa

SEQ ID NO: 34943 - DNA, 21 bp, Artificial Sequence
  Synthetic
gtactaattctattgcagggc

SEQ ID NO: 34944 - DNA, 18 bp, Artificial Sequence
  Synthetic
gtcacccattacacctgc

SEQ ID NO: 34945 - DNA, 18 bp, Artificial Sequence
  Synthetic
cattagttctgcggcgtt

SEQ ID NO: 34946 - DNA, 18 bp, Artificial Sequence
  Synthetic
gcagcaagttttggctac

SEQ ID NO: 34947 - DNA, 23 bp, Artificial Sequence
  Synthetic
aacaataatagttggcaaccatc

SEQ ID NO: 34948 - DNA, 23 bp, Artificial Sequence
  Synthetic
atgatcactgagtttaagttcag

SEQ ID NO: 34949 - DNA, 23 bp, Artificial Sequence
  Synthetic
ttttgaagtagtttgaaagggtc

SEQ ID NO: 34950 - DNA, 18 bp, Artificial Sequence
  Synthetic
agagtgctcgatcccata

SEQ ID NO: 34951 - DNA, 19 bp, Artificial Sequence
  Synthetic
ccggaatgacacttcttct

SEQ ID NO: 34952 - DNA, 18 bp, Artificial Sequence
  Synthetic
acacactgtagctgtagc

SEQ ID NO: 34953 - DNA, 23 bp, Artificial Sequence
  Synthetic
tgttaattaggtaacaaggatgt

SEQ ID NO: 34954 - DNA, 22 bp, Artificial Sequence
  Synthetic
cgtctgtatcaattatccttcg

SEQ ID NO: 34955 - DNA, 22 bp, Artificial Sequence
  Synthetic
ccaattctgaaaatggaattcc

SEQ ID NO: 34956 - DNA, 18 bp, Artificial Sequence
  Synthetic
tggcctgcatattgcttt

SEQ ID NO: 34957 - DNA, 25 bp, Artificial Sequence
  Synthetic
gaaaaaattgtataaggctcatagc

SEQ ID NO: 34958 - DNA, 20 bp, Artificial Sequence
  Synthetic
ataggtgttgtaggtgttgt

SEQ ID NO: 34959 - DNA, 18 bp, Artificial Sequence
  Synthetic
cgatgcaacaacaaacca

SEQ ID NO: 34960 - DNA, 18 bp, Artificial Sequence
  Synthetic
cagatggacatgtgccag

SEQ ID NO: 34961 - DNA, 19 bp, Artificial Sequence
  Synthetic
catgcacagcaaatgtttg

SEQ ID NO: 34962 - DNA, 18 bp, Artificial Sequence
  Synthetic
acttcttgtgcgcattgt

SEQ ID NO: 34963 - DNA, 22 bp, Artificial Sequence
  Synthetic
ttacatatgcatctgttggtac

SEQ ID NO: 34964 - DNA, 20 bp, Artificial Sequence
  Synthetic
attggtatcaggtaacccaa

SEQ ID NO: 34965 - DNA, 25 bp, Artificial Sequence
  Synthetic
tgtaattcatattcctctacatgtc

SEQ ID NO: 34966 - DNA, 21 bp, Artificial Sequence
  Synthetic
cctgtaagttaacatcccaaa

SEQ ID NO: 34967 - DNA, 24 bp, Artificial Sequence
  Synthetic
catacatacagtcatacagaaaca

SEQ ID NO: 34968 - DNA, 19 bp, Artificial Sequence
  Synthetic
ggtaaaatggagggcacaa

SEQ ID NO: 34969 - DNA, 20 bp, Artificial Sequence
  Synthetic
ggttttacacacctgcttta

SEQ ID NO: 34970 - DNA, 19 bp, Artificial Sequence
  Synthetic
gttgtcgttcgcaatacac

SEQ ID NO: 34971 - DNA, 18 bp, Artificial Sequence
  Synthetic
acatctgctgcaatcagt

SEQ ID NO: 34972 - DNA, 22 bp, Artificial Sequence
  Synthetic
atcataattttcatctgctggt

SEQ ID NO: 34973 - DNA, 21 bp, Artificial Sequence
  Synthetic
gctttttaaaaatgcagcagc

SEQ ID NO: 34974 - DNA, 22 bp, Artificial Sequence
  Synthetic
ggtatcatctgctttaggattt

SEQ ID NO: 34975 - DNA, 18 bp, Artificial Sequence
  Synthetic
tgacacgcacttaaacgt

SEQ ID NO: 34976 - DNA, 21 bp, Artificial Sequence
  Synthetic
tgtctgttgtaatgtccattc

SEQ ID NO: 34977 - DNA, 20 bp, Artificial Sequence
  Synthetic
gatggagtagttgtgggtaa

SEQ ID NO: 34978 - DNA, 21 bp, Artificial Sequence
  Synthetic
ggtcagtaaaagttggattgt

SEQ ID NO: 34979 - DNA, 20 bp, Artificial Sequence
  Synthetic
cctaccacctatacgtttgc

SEQ ID NO: 34980 - DNA, 20 bp, Artificial Sequence
  Synthetic
gcgtgtactacctgcataat

SEQ ID NO: 34981 - DNA, 22 bp, Artificial Sequence
  Synthetic
tcaatcatatcaccatcctgta

SEQ ID NO: 34982 - DNA, 19 bp, Artificial Sequence
  Synthetic
agacccactaggagtagga

SEQ ID NO: 34983 - DNA, 22 bp, Artificial Sequence
  Synthetic
tgttaatcctaagtgcttgagt

SEQ ID NO: 34984 - DNA, 19 bp, Artificial Sequence
  Synthetic
gagaggcttcactccattt

SEQ ID NO: 34985 - DNA, 21 bp, Artificial Sequence
  Synthetic
acttttggggatgatctgaat

SEQ ID NO: 34986 - DNA, 19 bp, Artificial Sequence
  Synthetic
ccaatctctggttcagtgt

SEQ ID NO: 34987 - DNA, 18 bp, Artificial Sequence
  Synthetic
ggggtgtatgttgtggaa

SEQ ID NO: 34988 - DNA, 23 bp, Artificial Sequence
  Synthetic
aaactgagtgttcattttgtcaa

SEQ ID NO: 34989 - DNA, 18 bp, Artificial Sequence
  Synthetic
aacaaccattacccagct

SEQ ID NO: 34990 - DNA, 18 bp, Artificial Sequence
  Synthetic
cgatccattggagcacat

SEQ ID NO: 34991 - DNA, 22 bp, Artificial Sequence
  Synthetic
atcactgagtttaagttctgtg

SEQ ID NO: 34992 - DNA, 18 bp, Artificial Sequence
  Synthetic
catgtgagtcagaccagc

SEQ ID NO: 34993 - DNA, 23 bp, Artificial Sequence
  Synthetic
tttgaaatttccctttgagaatg

SEQ ID NO: 34994 - DNA, 19 bp, Artificial Sequence
  Synthetic
tgcttctcagttcaagtgt

SEQ ID NO: 34995 - DNA, 23 bp, Artificial Sequence
  Synthetic
cgtagctagtacatgtaatgcta

SEQ ID NO: 34996 - DNA, 24 bp, Artificial Sequence
  Synthetic
gtaacagaatcttcagtttcattg

SEQ ID NO: 34997 - DNA, 24 bp, Artificial Sequence
  Synthetic
gattagttataatttgccattccc

SEQ ID NO: 34998 - DNA, 19 bp, Artificial Sequence
  Synthetic
tgacactgcatttccatcc

SEQ ID NO: 34999 - DNA, 20 bp, Artificial Sequence
  Synthetic
ttacaaggtcccaatgtact

SEQ ID NO: 35000 - DNA, 21 bp, Artificial Sequence
  Synthetic
agtctatatagtacaggccgt

SEQ ID NO: 35001 - DNA, 21 bp, Artificial Sequence
  Synthetic
actttcaaatagcgccctata

SEQ ID NO: 35002 - DNA, 24 bp, Artificial Sequence
  Synthetic
tcaatagaaaatgtagaagaccct

SEQ ID NO: 35003 - DNA, 18 bp, Artificial Sequence
  Synthetic
atacaagtcagcctcacc

SEQ ID NO: 35004 - DNA, 18 bp, Artificial Sequence
  Synthetic
tagccacaaaccagccat

SEQ ID NO: 35005 - DNA, 20 bp, Artificial Sequence
  Synthetic
ggacaccaactgtaaaggag

SEQ ID NO: 35006 - DNA, 21 bp, Artificial Sequence
  Synthetic
gtgggtattatcaaccaaagt

SEQ ID NO: 35007 - DNA, 18 bp, Artificial Sequence
  Synthetic
gcagaccctgtttgatgt

SEQ ID NO: 35008 - DNA, 22 bp, Artificial Sequence
  Synthetic
aacaacaataagagaaaaaggc

SEQ ID NO: 35009 - DNA, 24 bp, Artificial Sequence
  Synthetic
tgtatgctttctaatccagtcagg

SEQ ID NO: 35010 - DNA, 23 bp, Artificial Sequence
  Synthetic
aagattttgcaaccagaaatggc

SEQ ID NO: 35011 - DNA, 23 bp, Artificial Sequence
  Synthetic
acaagttgccaatgctcaatttg

SEQ ID NO: 35012 - DNA, 21 bp, Artificial Sequence
  Synthetic
tggaggagctgacagaccctt

SEQ ID NO: 35013 - DNA, 22 bp, Artificial Sequence
  Synthetic
ctggctcgtcgttgtctcttgt

SEQ ID NO: 35014 - DNA, 22 bp, Artificial Sequence
  Synthetic
tgttcccctaaagatgtgggat

SEQ ID NO: 35015 - DNA, 22 bp, Artificial Sequence
  Synthetic
acctcttgcaagtcttgttgaa

SEQ ID NO: 35016 - DNA, 20 bp, Artificial Sequence
  Synthetic
gcctggtgtgactaggtctt

SEQ ID NO: 35017 - DNA, 22 bp, Artificial Sequence
  Synthetic
atacaacgtttctggcacatga

SEQ ID NO: 35018 - DNA, 23 bp, Artificial Sequence
  Synthetic
caacgaccacgaactaaatgaca

SEQ ID NO: 35019 - DNA, 22 bp, Artificial Sequence
  Synthetic
cactctacagttgcctgtgcat

SEQ ID NO: 35020 - DNA, 21 bp, Artificial Sequence
  Synthetic
cgtaggaggtggagggcctat

SEQ ID NO: 35021 - DNA, 24 bp, Artificial Sequence
  Synthetic
gttctatgtctcgatcccacttct

SEQ ID NO: 35022 - DNA, 25 bp, Artificial Sequence
  Synthetic
gataatggattataccctgtagccc

SEQ ID NO: 35023 - DNA, 22 bp, Artificial Sequence
  Synthetic
cctctgctacatcctgctcaaa

SEQ ID NO: 35024 - DNA, 21 bp, Artificial Sequence
  Synthetic
cagttaacagtctgccagtgc

SEQ ID NO: 35025 - DNA, 22 bp, Artificial Sequence
  Synthetic
ccacccgggaacttaacgttct

SEQ ID NO: 35026 - DNA, 20 bp, Artificial Sequence
  Synthetic
cggcaaacccgcaggtcatg

SEQ ID NO: 35027 - DNA, 20 bp, Artificial Sequence
  Synthetic
ttaccctcgcgaacgcaagg

SEQ ID NO: 35028 - DNA, 21 bp, Artificial Sequence
  Synthetic
gcatcatgtcccacgccatcc

SEQ ID NO: 35029 - DNA, 22 bp, Artificial Sequence
  Synthetic
tgtgtgtagaagagggccgcta

SEQ ID NO: 35030 - DNA, 20 bp, Artificial Sequence
  Synthetic
ccgcaggtcttcgtgaaccc

SEQ ID NO: 35031 - DNA, 20 bp, Artificial Sequence
  Synthetic
ctccaggtcgcatcgctcac

SEQ ID NO: 35032 - DNA, 20 bp, Artificial Sequence
  Synthetic
ttctccagagcggcttcagc

SEQ ID NO: 35033 - DNA, 20 bp, Artificial Sequence
  Synthetic
ccaggggggcgagatggtta

SEQ ID NO: 35034 - DNA, 20 bp, Artificial Sequence
  Synthetic
taagggaggacacagggcgc

SEQ ID NO: 35035 - DNA, 20 bp, Artificial Sequence
  Synthetic
ggcaccaaacccaagggtgg

SEQ ID NO: 35036 - DNA, 20 bp, Artificial Sequence
  Synthetic
tccaaggaccacacggccaa

SEQ ID NO: 35037 - DNA, 21 bp, Artificial Sequence
  Synthetic
tgaaggccatcagtgaggcca

SEQ ID NO: 35038 - DNA, 20 bp, Artificial Sequence
  Synthetic
gtagagcgcacccagacacc

SEQ ID NO: 35039 - DNA, 21 bp, Artificial Sequence
  Synthetic
cagtgctctctagccctgcag

SEQ ID NO: 35040 - DNA, 22 bp, Artificial Sequence
  Synthetic
gatcttggtcctgacagcccag

SEQ ID NO: 35041 - DNA, 22 bp, Artificial Sequence
  Synthetic
tccatgagaataagggggaaca

SEQ ID NO: 35042 - DNA, 22 bp, Artificial Sequence
  Synthetic
tcctattgccatgtctgctgat

SEQ ID NO: 35043 - DNA, 25 bp, Artificial Sequence
  Synthetic
cctcaagaatcatgttcctctgatc

SEQ ID NO: 35044 - DNA, 23 bp, Artificial Sequence
  Synthetic
tgctgtgaacaggagtatgagat

SEQ ID NO: 35045 - DNA, 20 bp, Artificial Sequence
  Synthetic
aggaccattctggcacactt

SEQ ID NO: 35046 - DNA, 22 bp, Artificial Sequence
  Synthetic
tggcaaccggataatttgatcc

SEQ ID NO: 35047 - DNA, 22 bp, Artificial Sequence
  Synthetic
ggtgcaactagattaccagtgc

SEQ ID NO: 35048 - DNA, 20 bp, Artificial Sequence
  Synthetic
tgttgtgtccatggttgggt

SEQ ID NO: 35049 - DNA, 25 bp, Artificial Sequence
  Synthetic
ggacattattagccctcctaatcac

SEQ ID NO: 35050 - DNA, 24 bp, Artificial Sequence
  Synthetic
tgcctaatactacactggagaagt

SEQ ID NO: 35051 - DNA, 20 bp, Artificial Sequence
  Synthetic
ccgagcagatgtaggtcctg

SEQ ID NO: 35052 - DNA, 25 bp, Artificial Sequence
  Synthetic
ttgtgatggcatttttgaattcagt

SEQ ID NO: 35053 - DNA, 20 bp, Artificial Sequence
  Synthetic
ctgaggctccagatgggttt

SEQ ID NO: 35054 - DNA, 22 bp, Artificial Sequence
  Synthetic
ttttctagtgtcttggtggtgc

SEQ ID NO: 35055 - DNA, 21 bp, Artificial Sequence
  Synthetic
tgtttggtggtttgttttggc

SEQ ID NO: 35056 - DNA, 25 bp, Artificial Sequence
  Synthetic
ttgtttgtggatagtagagcacttt

SEQ ID NO: 35057 - DNA, 22 bp, Artificial Sequence
  Synthetic
ccatcctctgtcggttcttgtt

SEQ ID NO: 35058 - DNA, 20 bp, Artificial Sequence
  Synthetic
tgtgactggtgtgcttctgg

SEQ ID NO: 35059 - DNA, 25 bp, Artificial Sequence
  Synthetic
gagaatattttgtttggagctgtgc

SEQ ID NO: 35060 - DNA, 22 bp, Artificial Sequence
  Synthetic
gccatggctagacgctttctgc

SEQ ID NO: 35061 - DNA, 20 bp, Artificial Sequence
  Synthetic
acttgacgtcctgtgggcga

SEQ ID NO: 35062 - DNA, 19 bp, Artificial Sequence
  Synthetic
ccccatgaggtcggcgaag

SEQ ID NO: 35063 - DNA, 19 bp, Artificial Sequence
  Synthetic
gggacacaccccggagtgt

SEQ ID NO: 35064 - DNA, 20 bp, Artificial Sequence
  Synthetic
gagctaccaccaacgctgcc

SEQ ID NO: 35065 - DNA, 20 bp, Artificial Sequence
  Synthetic
accgaaccaattgcccagcg

SEQ ID NO: 35066 - DNA, 19 bp, Artificial Sequence
  Synthetic
ttcgccccgcgtccagttg

SEQ ID NO: 35067 - DNA, 19 bp, Artificial Sequence
  Synthetic
acggccagatctcgcaggc

SEQ ID NO: 35068 - DNA, 20 bp, Artificial Sequence
  Synthetic
ccccattgatgcacgttgcc

SEQ ID NO: 35069 - DNA, 21 bp, Artificial Sequence
  Synthetic
ggggctgccagtggtaattgt

SEQ ID NO: 35070 - DNA, 19 bp, Artificial Sequence
  Synthetic
gctcccccggtgccacaaa

SEQ ID NO: 35071 - DNA, 22 bp, Artificial Sequence
  Synthetic
catcccttgctcgatgtacggt

SEQ ID NO: 35072 - DNA, 20 bp, Artificial Sequence
  Synthetic
ggggaaacatggttcccccg

SEQ ID NO: 35073 - DNA, 20 bp, Artificial Sequence
  Synthetic
tacctcctcccgcagcaagg

SEQ ID NO: 35074 - DNA, 20 bp, Artificial Sequence
  Synthetic
gagggacttgatggccacgc

SEQ ID NO: 35075 - DNA, 20 bp, Artificial Sequence
  Synthetic
ctctttccagcgccgtcgtg

SEQ ID NO: 35076 - DNA, 23 bp, Artificial Sequence
  Synthetic
gcaagctcgacaatcattggatt

SEQ ID NO: 35077 - DNA, 23 bp, Artificial Sequence
  Synthetic
ggtgttgcagatactattcacca

SEQ ID NO: 35078 - DNA, 23 bp, Artificial Sequence
  Synthetic
tcaatatcttggagctctgccag

SEQ ID NO: 35079 - DNA, 24 bp, Artificial Sequence
  Synthetic
cgtcttcccctatttcatcaagtt

SEQ ID NO: 35080 - DNA, 24 bp, Artificial Sequence
  Synthetic
actcacaaagtttaccacatcggt

SEQ ID NO: 35081 - DNA, 23 bp, Artificial Sequence
  Synthetic
cctcaatcatgctctcaatctgt

SEQ ID NO: 35082 - DNA, 21 bp, Artificial Sequence
  Synthetic
ttgggcattagcatgaaccag

SEQ ID NO: 35083 - DNA, 25 bp, Artificial Sequence
  Synthetic
ccccaaataactgttttctacaacc

SEQ ID NO: 35084 - DNA, 20 bp, Artificial Sequence
  Synthetic
cagtcccctcctcctctgta

SEQ ID NO: 35085 - DNA, 22 bp, Artificial Sequence
  Synthetic
acagggttcgctgtttgcaaca

SEQ ID NO: 35086 - DNA, 21 bp, Artificial Sequence
  Synthetic
tcctcctcgttatcgttgtcg

SEQ ID NO: 35087 - DNA, 23 bp, Artificial Sequence
  Synthetic
gcaatgtctctaatgcaagttgc

SEQ ID NO: 35088 - DNA, 21 bp, Artificial Sequence
  Synthetic
tgtgacctgatgagggcctaa

SEQ ID NO: 35089 - DNA, 19 bp, Artificial Sequence
  Synthetic
tcaaccggcgtggatggcg

SEQ ID NO: 35090 - DNA, 19 bp, Artificial Sequence
  Synthetic
gaatgggctgtcgctggct

SEQ ID NO: 35091 - DNA, 21 bp, Artificial Sequence
  Synthetic
ggccggggtatccttttggga

SEQ ID NO: 35092 - DNA, 20 bp, Artificial Sequence
  Synthetic
ggtacaggacgccttggcat

SEQ ID NO: 35093 - DNA, 20 bp, Artificial Sequence
  Synthetic
tttcctggcccggtgtaggg

SEQ ID NO: 35094 - DNA, 22 bp, Artificial Sequence
  Synthetic
actgaatctcgccaagtagggc

SEQ ID NO: 35095 - DNA, 21 bp, Artificial Sequence
  Synthetic
acaagtggccactgctgcttg

SEQ ID NO: 35096 - DNA, 22 bp, Artificial Sequence
  Synthetic
gatagtaagcggggcaggaggg

SEQ ID NO: 35097 - DNA, 21 bp, Artificial Sequence
  Synthetic
cgccggcagcttcttgaagag

SEQ ID NO: 35098 - DNA, 21 bp, Artificial Sequence
  Synthetic
gcaccctaggtatgggcattt

SEQ ID NO: 35099 - DNA, 22 bp, Artificial Sequence
  Synthetic
acctgctggtggaggaattggt

SEQ ID NO: 35100 - DNA, 22 bp, Artificial Sequence
  Synthetic
cgataacgcgtccatcgatggg

SEQ ID NO: 35101 - DNA, 20 bp, Artificial Sequence
  Synthetic
cagggcccggaaatcatagg

SEQ ID NO: 35102 - DNA, 20 bp, Artificial Sequence
  Synthetic
tggtgctgagctgtcctccg

SEQ ID NO: 35103 - DNA, 19 bp, Artificial Sequence
  Synthetic
agatgcgagccccctcctg

SEQ ID NO: 35104 - DNA, 22 bp, Artificial Sequence
  Synthetic
tttgttagtatctcgcgagtgc

SEQ ID NO: 35105 - DNA, 21 bp, Artificial Sequence
  Synthetic
catgtcactgccaaaggtgat

SEQ ID NO: 35106 - DNA, 22 bp, Artificial Sequence
  Synthetic
cccgtaagcacttcttcctctc

SEQ ID NO: 35107 - DNA, 21 bp, Artificial Sequence
  Synthetic
gcatgggattcaatcgctgat

SEQ ID NO: 35108 - DNA, 21 bp, Artificial Sequence
  Synthetic
acatttcctcgttggtctcga

SEQ ID NO: 35109 - DNA, 22 bp, Artificial Sequence
  Synthetic
caaatccactgtattggcctct

SEQ ID NO: 35110 - DNA, 20 bp, Artificial Sequence
  Synthetic
tgggtatgagcatggaccat

SEQ ID NO: 35111 - DNA, 23 bp, Artificial Sequence
  Synthetic
tccaactgcatttttgacatcct

SEQ ID NO: 35112 - DNA, 23 bp, Artificial Sequence
  Synthetic
ccagtataagggaatgtggtgct

SEQ ID NO: 35113 - DNA, 20 bp, Artificial Sequence
  Synthetic
ttgcgtgaccatcttcttgg

SEQ ID NO: 35114 - DNA, 21 bp, Artificial Sequence
  Synthetic
cttttcattgccccctactgg

SEQ ID NO: 35115 - DNA, 24 bp, Artificial Sequence
  Synthetic
cgaacatgtaccctttccctagtc

SEQ ID NO: 35116 - DNA, 25 bp, Artificial Sequence
  Synthetic
tcactgttactccaatactcatgtc

SEQ ID NO: 35117 - DNA, 19 bp, Artificial Sequence
  Synthetic
ggcccatggttccgaagcg

SEQ ID NO: 35118 - DNA, 22 bp, Artificial Sequence
  Synthetic
tcgttctaactgtacacggcgg

SEQ ID NO: 35119 - DNA, 19 bp, Artificial Sequence
  Synthetic
cgcgatccctgggctggta

SEQ ID NO: 35120 - DNA, 21 bp, Artificial Sequence
  Synthetic
tggggaatttgtgtgggtact

SEQ ID NO: 35121 - DNA, 22 bp, Artificial Sequence
  Synthetic
cccacagcatgctcttggtctt

SEQ ID NO: 35122 - DNA, 19 bp, Artificial Sequence
  Synthetic
tctgcgtccgcgtctcgtg

SEQ ID NO: 35123 - DNA, 18 bp, Artificial Sequence
  Synthetic
tcctcgaaacgccagcgc

SEQ ID NO: 35124 - DNA, 20 bp, Artificial Sequence
  Synthetic
cgatccgaaagccaggtcgc

SEQ ID NO: 35125 - DNA, 20 bp, Artificial Sequence
  Synthetic
cgcgatgctctggctgatga

SEQ ID NO: 35126 - DNA, 19 bp, Artificial Sequence
  Synthetic
cgtcgcgatgggaggtagc

SEQ ID NO: 35127 - DNA, 22 bp, Artificial Sequence
  Synthetic
ctgcgtctatgcaacctcaggt

SEQ ID NO: 35128 - DNA, 19 bp, Artificial Sequence
  Synthetic
tgtacctgcgcctggacgg

SEQ ID NO: 35129 - DNA, 22 bp, Artificial Sequence
  Synthetic
gccttttatcgcaccctctcgg

SEQ ID NO: 35130 - DNA, 19 bp, Artificial Sequence
  Synthetic
aaccgccatggacgagcag

SEQ ID NO: 35131 - DNA, 18 bp, Artificial Sequence
  Synthetic
aaggcgcgcggcatgttg

SEQ ID NO: 35132 - DNA, 18 bp, Artificial Sequence
  Synthetic
atgtcggtgcgcgagacg

SEQ ID NO: 35133 - DNA, 20 bp, Artificial Sequence
  Synthetic
ggccgtgaaaaccagctggt

SEQ ID NO: 35134 - DNA, 20 bp, Artificial Sequence
  Synthetic
gccaaagttgagcagcccca

SEQ ID NO: 35135 - DNA, 18 bp, Artificial Sequence
  Synthetic
cagcacgtcgagctgcgt

SEQ ID NO: 35136 - DNA, 19 bp, Artificial Sequence
  Synthetic
gccctgtgtgacagcccag

SEQ ID NO: 35137 - DNA, 21 bp, Artificial Sequence
  Synthetic
gacgactactggaacgccgtt

SEQ ID NO: 35138 - DNA, 19 bp, Artificial Sequence
  Synthetic
actgcagcccaccgcccta

SEQ ID NO: 35139 - DNA, 19 bp, Artificial Sequence
  Synthetic
tgtccgcttcgagaccggc

SEQ ID NO: 35140 - DNA, 19 bp, Artificial Sequence
  Synthetic
ggcaaggcgacgcagtgtc

SEQ ID NO: 35141 - DNA, 18 bp, Artificial Sequence
  Synthetic
atctgtggggcgtgacgc

SEQ ID NO: 35142 - DNA, 20 bp, Artificial Sequence
  Synthetic
gcgctggaaaaactgcgtcc

SEQ ID NO: 35143 - DNA, 19 bp, Artificial Sequence
  Synthetic
tgtgtcgccaactgcacgg

SEQ ID NO: 35144 - DNA, 22 bp, Artificial Sequence
  Synthetic
ccagatccctctgtgtaccggg

SEQ ID NO: 35145 - DNA, 20 bp, Artificial Sequence
  Synthetic
ccagctcgcgcaactgttct

SEQ ID NO: 35146 - DNA, 17 bp, Artificial Sequence
  Synthetic
tcgcgcctgccgttgat

SEQ ID NO: 35147 - DNA, 20 bp, Artificial Sequence
  Synthetic
catgtagccgtccaggtcgc

SEQ ID NO: 35148 - DNA, 21 bp, Artificial Sequence
  Synthetic
gaccctcgcagtgatacacgg

SEQ ID NO: 35149 - DNA, 20 bp, Artificial Sequence
  Synthetic
cgcgtcggttcagatcgctg

SEQ ID NO: 35150 - DNA, 22 bp, Artificial Sequence
  Synthetic
ctagcgcttccagctgagctag

SEQ ID NO: 35151 - DNA, 21 bp, Artificial Sequence
  Synthetic
ccaagagcagctcgagtgtgg

SEQ ID NO: 35152 - DNA, 22 bp, Artificial Sequence
  Synthetic
cgtgaccagatcagtccacagg

SEQ ID NO: 35153 - DNA, 19 bp, Artificial Sequence
  Synthetic
cggtgatttgcgcaagggc

SEQ ID NO: 35154 - DNA, 19 bp, Artificial Sequence
  Synthetic
ggctgcgcgctggttaaac

SEQ ID NO: 35155 - DNA, 21 bp, Artificial Sequence
  Synthetic
gtacgagaatctgctgcgcga

SEQ ID NO: 35156 - DNA, 19 bp, Artificial Sequence
  Synthetic
agagggcgcggaaaccacc

SEQ ID NO: 35157 - DNA, 18 bp, Artificial Sequence
  Synthetic
ggtggtactgcggcggtt

SEQ ID NO: 35158 - DNA, 20 bp, Artificial Sequence
  Synthetic
cgggttctgtggcggctatg

SEQ ID NO: 35159 - DNA, 19 bp, Artificial Sequence
  Synthetic
ttggtggacgcgcgttccc

SEQ ID NO: 35160 - DNA, 19 bp, Artificial Sequence
  Synthetic
ccgtatcagctaccgccgc

SEQ ID NO: 35161 - DNA, 19 bp, Artificial Sequence
  Synthetic
tcgtggatggctgcgaggc

SEQ ID NO: 35162 - DNA, 19 bp, Artificial Sequence
  Synthetic
gacgaggccctgggtttcg

SEQ ID NO: 35163 - DNA, 20 bp, Artificial Sequence
  Synthetic
tggaggcctacacgcccgag

SEQ ID NO: 35164 - DNA, 20 bp, Artificial Sequence
  Synthetic
ttcggcgtctctgtgcgtac

SEQ ID NO: 35165 - DNA, 21 bp, Artificial Sequence
  Synthetic
ggaccctccccgtggattcac

SEQ ID NO: 35166 - DNA, 22 bp, Artificial Sequence
  Synthetic
gctcatgcacaccgactacctg

SEQ ID NO: 35167 - DNA, 20 bp, Artificial Sequence
  Synthetic
cgacctgctccgtcacgtac

SEQ ID NO: 35168 - DNA, 19 bp, Artificial Sequence
  Synthetic
gcagtgtacgcgcgaaccg

SEQ ID NO: 35169 - DNA, 20 bp, Artificial Sequence
  Synthetic
acgtgaggcaatctccgcag

SEQ ID NO: 35170 - DNA, 19 bp, Artificial Sequence
  Synthetic
aagagaaccccgccgtccc

SEQ ID NO: 35171 - DNA, 20 bp, Artificial Sequence
  Synthetic
ggcaacagcaattcggcctc

SEQ ID NO: 35172 - DNA, 20 bp, Artificial Sequence
  Synthetic
gagaaagcgacggcggtgat

SEQ ID NO: 35173 - DNA, 19 bp, Artificial Sequence
  Synthetic
tcgtaacgccgaccccacc

SEQ ID NO: 35174 - DNA, 19 bp, Artificial Sequence
  Synthetic
tgacggtgctgcttctgcg

SEQ ID NO: 35175 - DNA, 22 bp, Artificial Sequence
  Synthetic
ggacaaagacgtcgaagcggta

SEQ ID NO: 35176 - DNA, 20 bp, Artificial Sequence
  Synthetic
ggaacaccgacagccgctag

SEQ ID NO: 35177 - DNA, 22 bp, Artificial Sequence
  Synthetic
gccaggctcagaaaacaacacg

SEQ ID NO: 35178 - DNA, 19 bp, Artificial Sequence
  Synthetic
gtctcgggactggcctgga

SEQ ID NO: 35179 - DNA, 20 bp, Artificial Sequence
  Synthetic
ccccagccaagagcccatgt

SEQ ID NO: 35180 - DNA, 19 bp, Artificial Sequence
  Synthetic
tcgcgctggaggacctgct

SEQ ID NO: 35181 - DNA, 21 bp, Artificial Sequence
  Synthetic
cgctagaggacagctccatgc

SEQ ID NO: 35182 - DNA, 20 bp, Artificial Sequence
  Synthetic
gaggtaaaggctgccgtgca

SEQ ID NO: 35183 - DNA, 19 bp, Artificial Sequence
  Synthetic
aagagagcacaagcggcgt

SEQ ID NO: 35184 - DNA, 19 bp, Artificial Sequence
  Synthetic
gccccccttcgttacgcac

SEQ ID NO: 35185 - DNA, 22 bp, Artificial Sequence
  Synthetic
tgctcgagtgtcgttttcagca

SEQ ID NO: 35186 - DNA, 22 bp, Artificial Sequence
  Synthetic
cccactgactttctgacgcacg

SEQ ID NO: 35187 - DNA, 18 bp, Artificial Sequence
  Synthetic
acgctcgggttcggtcct

SEQ ID NO: 35188 - DNA, 20 bp, Artificial Sequence
  Synthetic
cgtgtccgttcgccgaaacc

SEQ ID NO: 35189 - DNA, 22 bp, Artificial Sequence
  Synthetic
ttcctcctcctcttctcccgtc

SEQ ID NO: 35190 - DNA, 19 bp, Artificial Sequence
  Synthetic
accacacgcccgaccagaa

SEQ ID NO: 35191 - DNA, 21 bp, Artificial Sequence
  Synthetic
tgcacaagcccaccttcatca

SEQ ID NO: 35192 - DNA, 20 bp, Artificial Sequence
  Synthetic
tgtcgttgacgcactccacc

SEQ ID NO: 35193 - DNA, 19 bp, Artificial Sequence
  Synthetic
cagtgcggcctcctcgatg

SEQ ID NO: 35194 - DNA, 20 bp, Artificial Sequence
  Synthetic
gcaacgaggccttcctgccg

SEQ ID NO: 35195 - DNA, 18 bp, Artificial Sequence
  Synthetic
gccgccatcatgttgcgc

SEQ ID NO: 35196 - DNA, 19 bp, Artificial Sequence
  Synthetic
cgccgaggaagacgacacc

SEQ ID NO: 35197 - DNA, 19 bp, Artificial Sequence
  Synthetic
tccgaagccgcgtcctctt

SEQ ID NO: 35198 - DNA, 19 bp, Artificial Sequence
  Synthetic
cggcatgggtcggaaagca

SEQ ID NO: 35199 - DNA, 20 bp, Artificial Sequence
  Synthetic
cgccggcgtgcttaaagagc

SEQ ID NO: 35200 - DNA, 19 bp, Artificial Sequence
  Synthetic
cgcgttcgacagcgctgtg

SEQ ID NO: 35201 - DNA, 19 bp, Artificial Sequence
  Synthetic
tgtgagtgccgacgcgaaa

SEQ ID NO: 35202 - DNA, 20 bp, Artificial Sequence
  Synthetic
ggcatcgtcaaggccgacaa

SEQ ID NO: 35203 - DNA, 19 bp, Artificial Sequence
  Synthetic
ctgtggctgcacacggagc

SEQ ID NO: 35204 - DNA, 22 bp, Artificial Sequence
  Synthetic
acgaagaggacctggagcagta

SEQ ID NO: 35205 - DNA, 22 bp, Artificial Sequence
  Synthetic
ccagtaggcgagcagatcgttg

SEQ ID NO: 35206 - DNA, 22 bp, Artificial Sequence
  Synthetic
ggccatgttccatccgttgaga

SEQ ID NO: 35207 - DNA, 22 bp, Artificial Sequence
  Synthetic
agtgtacatgtgcaccgtctcc

SEQ ID NO: 35208 - DNA, 20 bp, Artificial Sequence
  Synthetic
gccggcgacacatgcgaaag

SEQ ID NO: 35209 - DNA, 20 bp, Artificial Sequence
  Synthetic
cgactcgacgaagcgcgaga

SEQ ID NO: 35210 - DNA, 19 bp, Artificial Sequence
  Synthetic
aggctggcagacgctgagt

SEQ ID NO: 35211 - DNA, 19 bp, Artificial Sequence
  Synthetic
acagcgagtgcggcgatgg

SEQ ID NO: 35212 - DNA, 21 bp, Artificial Sequence
  Synthetic
gcccattgtttcctcagccgc

SEQ ID NO: 35213 - DNA, 22 bp, Artificial Sequence
  Synthetic
gcgctctacttcgtaccacgag

SEQ ID NO: 35214 - DNA, 22 bp, Artificial Sequence
  Synthetic
cgtagttgcgctcttgggcgac

SEQ ID NO: 35215 - DNA, 22 bp, Artificial Sequence
  Synthetic
tggcggtagggtatgtgtctga

SEQ ID NO: 35216 - DNA, 19 bp, Artificial Sequence
  Synthetic
gcgtcgacccttcaccgag

SEQ ID NO: 35217 - DNA, 22 bp, Artificial Sequence
  Synthetic
aatcggcaaaattttctaccgc

SEQ ID NO: 35218 - DNA, 21 bp, Artificial Sequence
  Synthetic
ccaacatcacaagcaacgaca

SEQ ID NO: 35219 - DNA, 19 bp, Artificial Sequence
  Synthetic
cagatctggtcgccgacgc

SEQ ID NO: 35220 - DNA, 21 bp, Artificial Sequence
  Synthetic
gtcatgacacactcctggccc

SEQ ID NO: 35221 - DNA, 21 bp, Artificial Sequence
  Synthetic
gctggcggggtaacatcatcc

SEQ ID NO: 35222 - DNA, 19 bp, Artificial Sequence
  Synthetic
atccgagactgccgcgcac

SEQ ID NO: 35223 - DNA, 20 bp, Artificial Sequence
  Synthetic
atgagagggaggatggccgt

SEQ ID NO: 35224 - DNA, 20 bp, Artificial Sequence
  Synthetic
gccgacttccaccatcaggc

SEQ ID NO: 35225 - DNA, 19 bp, Artificial Sequence
  Synthetic
acgacgtcgcgatcggcag

SEQ ID NO: 35226 - DNA, 19 bp, Artificial Sequence
  Synthetic
ggacgcgaaacccggactg

SEQ ID NO: 35227 - DNA, 22 bp, Artificial Sequence
  Synthetic
acatcccagagggcttccttga

SEQ ID NO: 35228 - DNA, 22 bp, Artificial Sequence
  Synthetic
gccaaccacagacgttcaagga

SEQ ID NO: 35229 - DNA, 19 bp, Artificial Sequence
  Synthetic
tgctcacaacacggcgctt

SEQ ID NO: 35230 - DNA, 22 bp, Artificial Sequence
  Synthetic
ccgaggacccaatgtgattcgt

SEQ ID NO: 35231 - DNA, 22 bp, Artificial Sequence
  Synthetic
ccttagtgacggcgatcagcag

SEQ ID NO: 35232 - DNA, 22 bp, Artificial Sequence
  Synthetic
tcgatatcgctccttcttcact

SEQ ID NO: 35233 - DNA, 20 bp, Artificial Sequence
  Synthetic
tgtgcgtggcaacttctccg

SEQ ID NO: 35234 - DNA, 22 bp, Artificial Sequence
  Synthetic
ctgctaccctaacactcgcctc

SEQ ID NO: 35235 - DNA, 22 bp, Artificial Sequence
  Synthetic
cagcctcatcctaacgtggacg

SEQ ID NO: 35236 - DNA, 21 bp, Artificial Sequence
  Synthetic
cgacgatccctcgccgctatt

SEQ ID NO: 35237 - DNA, 19 bp, Artificial Sequence
  Synthetic
aagagacccggctggcgac

SEQ ID NO: 35238 - DNA, 19 bp, Artificial Sequence
  Synthetic
cgtccgttccgacagctgg

SEQ ID NO: 35239 - DNA, 19 bp, Artificial Sequence
  Synthetic
tttcccaccgcgacccagc

SEQ ID NO: 35240 - DNA, 19 bp, Artificial Sequence
  Synthetic
ccgggcctgctcaccattt

SEQ ID NO: 35241 - DNA, 20 bp, Artificial Sequence
  Synthetic
cgtcccgctagaatggaccg

SEQ ID NO: 35242 - DNA, 20 bp, Artificial Sequence
  Synthetic
cgttcctcacgctcgctctg

SEQ ID NO: 35243 - DNA, 18 bp, Artificial Sequence
  Synthetic
aaagccatgcacgcccgc

SEQ ID NO: 35244 - DNA, 19 bp, Artificial Sequence
  Synthetic
agtgatgcgcgaacaggcc

SEQ ID NO: 35245 - DNA, 18 bp, Artificial Sequence
  Synthetic
acgcgcggcagtttcgct

SEQ ID NO: 35246 - DNA, 19 bp, Artificial Sequence
  Synthetic
ctgcgttggcgaacaccac

SEQ ID NO: 35247 - DNA, 19 bp, Artificial Sequence
  Synthetic
tggttcctgcaggtgcggc

SEQ ID NO: 35248 - DNA, 20 bp, Artificial Sequence
  Synthetic
gacgcgattcggggtccttc

SEQ ID NO: 35249 - DNA, 19 bp, Artificial Sequence
  Synthetic
tgagcgattccccgccacc

SEQ ID NO: 35250 - DNA, 23 bp, Artificial Sequence
  Synthetic
gcaagctcgacaatcattggatt

SEQ ID NO: 35251 - DNA, 21 bp, Artificial Sequence
  Synthetic
cgactcctgttgtgttgcaga

SEQ ID NO: 35252 - DNA, 22 bp, Artificial Sequence
  Synthetic
gaaaggaatcccatagacccct

SEQ ID NO: 35253 - DNA, 20 bp, Artificial Sequence
  Synthetic
tgccatattctccccgagtg

SEQ ID NO: 35254 - DNA, 21 bp, Artificial Sequence
  Synthetic
agtggatagctgtcctcttgg

SEQ ID NO: 35255 - DNA, 21 bp, Artificial Sequence
  Synthetic
gacaggaccaagggagtcatt

SEQ ID NO: 35256 - DNA, 24 bp, Artificial Sequence
  Synthetic
gctgaggcacaggttttattactc

SEQ ID NO: 35257 - DNA, 22 bp, Artificial Sequence
  Synthetic
gctctgaaaactttgcagcaca

SEQ ID NO: 35258 - DNA, 21 bp, Artificial Sequence
  Synthetic
cctcctcttcagccatgccct

SEQ ID NO: 35259 - DNA, 23 bp, Artificial Sequence
  Synthetic
tctgtagctacaatcaggacgta

SEQ ID NO: 35260 - DNA, 22 bp, Artificial Sequence
  Synthetic
gaatttgcaggtgccacaggtc

SEQ ID NO: 35261 - DNA, 24 bp, Artificial Sequence
  Synthetic
caccgtgttcttaatgatagggaa

SEQ ID NO: 35262 - DNA, 20 bp, Artificial Sequence
  Synthetic
tgctttctgcccagctggtt

SEQ ID NO: 35263 - DNA, 22 bp, Artificial Sequence
  Synthetic
aggaaaaatacgggctaaaggc

SEQ ID NO: 35264 - DNA, 21 bp, Artificial Sequence
  Synthetic
cgcggaataccactgaaggat

SEQ ID NO: 35265 - DNA, 20 bp, Artificial Sequence
  Synthetic
tgcctggcacgcgaatatgt

SEQ ID NO: 35266 - DNA, 21 bp, Artificial Sequence
  Synthetic
gtttcccctggaggagtactg

SEQ ID NO: 35267 - DNA, 21 bp, Artificial Sequence
  Synthetic
tgaaggtcggtcaacagtttc

SEQ ID NO: 35268 - DNA, 22 bp, Artificial Sequence
  Synthetic
ccctctccgttctcgctttcga

SEQ ID NO: 35269 - DNA, 22 bp, Artificial Sequence
  Synthetic
gccgattttaagcaggcgcatt

SEQ ID NO: 35270 - DNA, 25 bp, Artificial Sequence
  Synthetic
ctccaggaggaagaaattgatcaat

SEQ ID NO: 35271 - DNA, 20 bp, Artificial Sequence
  Synthetic
gtagacaggctgcccgttcg

SEQ ID NO: 35272 - DNA, 20 bp, Artificial Sequence
  Synthetic
tgcaaccacccttacccaaa

SEQ ID NO: 35273 - DNA, 22 bp, Artificial Sequence
  Synthetic
ggggttcctcgctatggtaccc

SEQ ID NO: 35274 - DNA, 19 bp, Artificial Sequence
  Synthetic
atgccacgcgactgtcccg

SEQ ID NO: 35275 - DNA, 24 bp, Artificial Sequence
  Synthetic
acactttctcgtgagtagggttag

SEQ ID NO: 35276 - DNA, 22 bp, Artificial Sequence
  Synthetic
cttcactttgaggcacttcagt

SEQ ID NO: 35277 - DNA, 22 bp, Artificial Sequence
  Synthetic
cgcggtgaaggtaatccatcaa

SEQ ID NO: 35278 - DNA, 22 bp, Artificial Sequence
  Synthetic
cctaggagggcgaactggtctt

SEQ ID NO: 35279 - DNA, 23 bp, Artificial Sequence
  Synthetic
accccatctagacctttcatcaa

SEQ ID NO: 35280 - DNA, 23 bp, Artificial Sequence
  Synthetic
acgaaagtttctggtgtcaaact

SEQ ID NO: 35281 - DNA, 20 bp, Artificial Sequence
  Synthetic
ctcctccatacatgcgggcg

SEQ ID NO: 35282 - DNA, 20 bp, Artificial Sequence
  Synthetic
cgcggcgacttcttcctctt

SEQ ID NO: 35283 - DNA, 22 bp, Artificial Sequence
  Synthetic
agttgcattgtaggctgcaatt

SEQ ID NO: 35284 - DNA, 18 bp, Artificial Sequence
  Synthetic
tgtggctcggcgctgaaa

SEQ ID NO: 35285 - DNA, 22 bp, Artificial Sequence
  Synthetic
gccatgtctaacacgcggttgt

SEQ ID NO: 35286 - DNA, 20 bp, Artificial Sequence
  Synthetic
agtaccgtgttctgtctccc

SEQ ID NO: 35287 - DNA, 21 bp, Artificial Sequence
  Synthetic
tcgtctggtaggtataagccc

SEQ ID NO: 35288 - DNA, 22 bp, Artificial Sequence
  Synthetic
gctcctgttcgcttgaacccat

SEQ ID NO: 35289 - DNA, 23 bp, Artificial Sequence
  Synthetic
agaaaacggtccttgtacagttt

SEQ ID NO: 35290 - DNA, 22 bp, Artificial Sequence
  Synthetic
ggcatcagcgtttgcagtacag

SEQ ID NO: 35291 - DNA, 20 bp, Artificial Sequence
  Synthetic
tcacatgcgacatgggcaaa

SEQ ID NO: 35292 - DNA, 21 bp, Artificial Sequence
  Synthetic
gcgaaggggagcttagatgcc

SEQ ID NO: 35293 - DNA, 20 bp, Artificial Sequence
  Synthetic
cagcccctagtttcagcttg

SEQ ID NO: 35294 - DNA, 21 bp, Artificial Sequence
  Synthetic
gcccaagttctgctcaaccgg

SEQ ID NO: 35295 - DNA, 25 bp, Artificial Sequence
  Synthetic
gaaaatatggtatgttgccagtgct

SEQ ID NO: 35296 - DNA, 22 bp, Artificial Sequence
  Synthetic
tcaatgggttgggctcgcttaa

SEQ ID NO: 35297 - DNA, 21 bp, Artificial Sequence
  Synthetic
catcccagtttgccaggtatg

SEQ ID NO: 35298 - DNA, 23 bp, Artificial Sequence
  Synthetic
gcatttcgaaggtaccaatgact

SEQ ID NO: 35299 - DNA, 22 bp, Artificial Sequence
  Synthetic
gcctgcttgcgattcttaccca

SEQ ID NO: 35300 - DNA, 20 bp, Artificial Sequence
  Synthetic
ccgggctcgtaccccattca

SEQ ID NO: 35301 - DNA, 25 bp, Artificial Sequence
  Synthetic
caaccttattggggtaatcagagtt

SEQ ID NO: 35302 - DNA, 23 bp, Artificial Sequence
  Synthetic
aactaaaattaaggcgcgcatac

SEQ ID NO: 35303 - DNA, 22 bp, Artificial Sequence
  Synthetic
tggggtctgcagtagcaacaga

SEQ ID NO: 35304 - DNA, 20 bp, Artificial Sequence
  Synthetic
agaagttctcattcccccgg

SEQ ID NO: 35305 - DNA, 24 bp, Artificial Sequence
  Synthetic
aaacactaaatgcactcctacagt

SEQ ID NO: 35306 - DNA, 25 bp, Artificial Sequence
  Synthetic
ggtaatgtaagaaaaggagcaggat

SEQ ID NO: 35307 - DNA, 20 bp, Artificial Sequence
  Synthetic
tggacctggttttggatggg

SEQ ID NO: 35308 - DNA, 21 bp, Artificial Sequence
  Synthetic
aaatccttgctgaccgtcttg

SEQ ID NO: 35309 - DNA, 20 bp, Artificial Sequence
  Synthetic
atgtcagctgcgagaccaag

SEQ ID NO: 35310 - DNA, 24 bp, Artificial Sequence
  Synthetic
gcttatgtgttattttctcctgcg

SEQ ID NO: 35311 - DNA, 21 bp, Artificial Sequence
  Synthetic
ctcacttttcgcctcgggtga

SEQ ID NO: 35312 - DNA, 22 bp, Artificial Sequence
  Synthetic
catcagccacgggttgagtgaa

SEQ ID NO: 35313 - DNA, 22 bp, Artificial Sequence
  Synthetic
gtggcgttgcattgagtgtgaa

SEQ ID NO: 35314 - DNA, 21 bp, Artificial Sequence
  Synthetic
gctaatccaggggacaacaag

SEQ ID NO: 35315 - DNA, 22 bp, Artificial Sequence
  Synthetic
gaaagttctccactgtagcctc

SEQ ID NO: 35316 - DNA, 20 bp, Artificial Sequence
  Synthetic
ggtggtcgaggaatccaagc

SEQ ID NO: 35317 - DNA, 20 bp, Artificial Sequence
  Synthetic
tttgccaccacaatctcccg

SEQ ID NO: 35318 - DNA, 23 bp, Artificial Sequence
  Synthetic
caacatcatccatgatcaccact

SEQ ID NO: 35319 - DNA, 21 bp, Artificial Sequence
  Synthetic
cagaccctggaatatggcagt

SEQ ID NO: 35320 - DNA, 24 bp, Artificial Sequence
  Synthetic
agaactttggtttcaacaccatca

SEQ ID NO: 35321 - DNA, 21 bp, Artificial Sequence
  Synthetic
ggggtacagcttagagtgctc

SEQ ID NO: 35322 - DNA, 20 bp, Artificial Sequence
  Synthetic
gtgctgggtcaagttcctct

SEQ ID NO: 35323 - DNA, 20 bp, Artificial Sequence
  Synthetic
cctcctcactcagcaggttt

SEQ ID NO: 35324 - DNA, 25 bp, Artificial Sequence
  Synthetic
tcccttctaagtcaaaattgtctgt

SEQ ID NO: 35325 - DNA, 20 bp, Artificial Sequence
  Synthetic
tcaattcagcgactgcctgc

SEQ ID NO: 35326 - DNA, 22 bp, Artificial Sequence
  Synthetic
tgctgtgggtacacttcgtaat

SEQ ID NO: 35327 - DNA, 20 bp, Artificial Sequence
  Synthetic
gaaacgtgcgactagggact

SEQ ID NO: 35328 - DNA, 22 bp, Artificial Sequence
  Synthetic
cgtcgtagtcgtactccctcgg

SEQ ID NO: 35329 - DNA, 23 bp, Artificial Sequence
  Synthetic
gggattatttctgagggtcccaa

SEQ ID NO: 35330 - DNA, 23 bp, Artificial Sequence
  Synthetic
gaggttctataggggacacatct

SEQ ID NO: 35331 - DNA, 20 bp, Artificial Sequence
  Synthetic
cgtgctcttcctattgcacg

SEQ ID NO: 35332 - DNA, 24 bp, Artificial Sequence
  Synthetic
tccaagcctgctaactctaatttg

SEQ ID NO: 35333 - DNA, 20 bp, Artificial Sequence
  Synthetic
gtctgacacagtccggccac

SEQ ID NO: 35334 - DNA, 23 bp, Artificial Sequence
  Synthetic
ggttactcagaacaacaattggc

SEQ ID NO: 35335 - DNA, 21 bp, Artificial Sequence
  Synthetic
tgaggaggacgcgtaacgagt

SEQ ID NO: 35336 - DNA, 20 bp, Artificial Sequence
  Synthetic
agcgatgtgacgtcgttgtt

SEQ ID NO: 35337 - DNA, 21 bp, Artificial Sequence
  Synthetic
tctccatcatctctgcaaggc

SEQ ID NO: 35338 - DNA, 23 bp, Artificial Sequence
  Synthetic
ctcattaccaccaacaggtagac

SEQ ID NO: 35339 - DNA, 20 bp, Artificial Sequence
  Synthetic
gcagtagtgaaagctggcaa

SEQ ID NO: 35340 - DNA, 23 bp, Artificial Sequence
  Synthetic
cttttctcttctgccatcattgc

SEQ ID NO: 35341 - DNA, 24 bp, Artificial Sequence
  Synthetic
gcatttgcactttccataatgcct

SEQ ID NO: 35342 - DNA, 20 bp, Artificial Sequence
  Synthetic
tgtacacccagacccctcat

SEQ ID NO: 35343 - DNA, 21 bp, Artificial Sequence
  Synthetic
gcttccgcctctgtatgttcc

SEQ ID NO: 35344 - DNA, 20 bp, Artificial Sequence
  Synthetic
cccactgcaccatttctgtt

SEQ ID NO: 35345 - DNA, 24 bp, Artificial Sequence
  Synthetic
tgcatttgcatttcaatggcatta

SEQ ID NO: 35346 - DNA, 25 bp, Artificial Sequence
  Synthetic
gcctttgttcctcactatcatatgt

SEQ ID NO: 35347 - DNA, 25 bp, Artificial Sequence
  Synthetic
gcagtgttagtactagcacagatgt

SEQ ID NO: 35348 - DNA, 22 bp, Artificial Sequence
  Synthetic
agtaccaggaacaggggtactg

SEQ ID NO: 35349 - DNA, 24 bp, Artificial Sequence
  Synthetic
acaggtcattaggaagtgacaatg

SEQ ID NO: 35350 - DNA, 21 bp, Artificial Sequence
  Synthetic
acataagcatccgtggcaaca

SEQ ID NO: 35351 - DNA, 20 bp, Artificial Sequence
  Synthetic
tagcaccaaagcctgtgtca

SEQ ID NO: 35352 - DNA, 25 bp, Artificial Sequence
  Synthetic
atggcttattaaacaattgtgcctc

SEQ ID NO: 35353 - DNA, 21 bp, Artificial Sequence
  Synthetic
gtggttggcaggatatgatgc

SEQ ID NO: 35354 - DNA, 20 bp, Artificial Sequence
  Synthetic
gccaacgatctggccaccac

SEQ ID NO: 35355 - DNA, 22 bp, Artificial Sequence
  Synthetic
gcgtgactgattcccctctctc

SEQ ID NO: 35356 - DNA, 18 bp, Artificial Sequence
  Synthetic
ttgcagcacgcgagccgt

SEQ ID NO: 35357 - DNA, 21 bp, Artificial Sequence
  Synthetic
gctccaagccacagacttccc

SEQ ID NO: 35358 - DNA, 18 bp, Artificial Sequence
  Synthetic
agcagcagctgggaaccg

SEQ ID NO: 35359 - DNA, 22 bp, Artificial Sequence
  Synthetic
cgcgcacgttgaaggatggaat

SEQ ID NO: 35360 - DNA, 21 bp, Artificial Sequence
  Synthetic
gcgccccagacgatgactttc

SEQ ID NO: 35361 - DNA, 18 bp, Artificial Sequence
  Synthetic
cgagtacacaccgccgca

SEQ ID NO: 35362 - DNA, 20 bp, Artificial Sequence
  Synthetic
tcgccttgccgtaaaagggt

SEQ ID NO: 35363 - DNA, 21 bp, Artificial Sequence
  Synthetic
cgacaccgtcgcttggtaagc

SEQ ID NO: 35364 - DNA, 20 bp, Artificial Sequence
  Synthetic
atgacagcaggttggcccga

SEQ ID NO: 35365 - DNA, 22 bp, Artificial Sequence
  Synthetic
gcataccacctccaccaccaat

SEQ ID NO: 35366 - DNA, 20 bp, Artificial Sequence
  Synthetic
gagctctggggccggaactt

SEQ ID NO: 35367 - DNA, 21 bp, Artificial Sequence
  Synthetic
cgaaagctgactcgccgagga

SEQ ID NO: 35368 - DNA, 18 bp, Artificial Sequence
  Synthetic
agagcgcaaccgtggacg

SEQ ID NO: 35369 - DNA, 20 bp, Artificial Sequence
  Synthetic
cgacgtcctccgatccgcta

SEQ ID NO: 35370 - DNA, 21 bp, Artificial Sequence
  Synthetic
ccccattgggtcgttcttcga

SEQ ID NO: 35371 - DNA, 20 bp, Artificial Sequence
  Synthetic
ccaaagtagtcggtcccgtc

SEQ ID NO: 35372 - DNA, 21 bp, Artificial Sequence
  Synthetic
gcaccagcctttagaacctgt

SEQ ID NO: 35373 - DNA, 21 bp, Artificial Sequence
  Synthetic
acctgctcattttgcctgttt

SEQ ID NO: 35374 - DNA, 22 bp, Artificial Sequence
  Synthetic
tgcagaccaatatcccagacaa

SEQ ID NO: 35375 - DNA, 20 bp, Artificial Sequence
  Synthetic
tcttttggatttcggggcac

SEQ ID NO: 35376 - DNA, 22 bp, Artificial Sequence
  Synthetic
tcttggaatccatgcttcaacg

SEQ ID NO: 35377 - DNA, 22 bp, Artificial Sequence
  Synthetic
gtgtggtattgtttctgcacca

SEQ ID NO: 35378 - DNA, 24 bp, Artificial Sequence
  Synthetic
actaccttcagctgttaacaatcc

SEQ ID NO: 35379 - DNA, 20 bp, Artificial Sequence
  Synthetic
gctagagtggccgtaacagt

SEQ ID NO: 35380 - DNA, 21 bp, Artificial Sequence
  Synthetic
tgatttaccagaaccgggtgt

SEQ ID NO: 35381 - DNA, 20 bp, Artificial Sequence
  Synthetic
ctgccattgttacagggcca

SEQ ID NO: 35382 - DNA, 25 bp, Artificial Sequence
  Synthetic
tgtaattttgacttagttgccgtgt

SEQ ID NO: 35383 - DNA, 23 bp, Artificial Sequence
  Synthetic
tcattcaaactggaggcttcaat

SEQ ID NO: 35384 - DNA, 21 bp, Artificial Sequence
  Synthetic
cgtctccgtccttgatcgcat

SEQ ID NO: 35385 - DNA, 21 bp, Artificial Sequence
  Synthetic
acattccgccaatggcatccg

SEQ ID NO: 35386 - DNA, 22 bp, Artificial Sequence
  Synthetic
acaaagtggtggatccaaccgg

SEQ ID NO: 35387 - DNA, 25 bp, Artificial Sequence
  Synthetic
tccaaatgaatatgctttctcggta

SEQ ID NO: 35388 - DNA, 21 bp, Artificial Sequence
  Synthetic
tgtctgtgtccccgagggttt

SEQ ID NO: 35389 - DNA, 22 bp, Artificial Sequence
  Synthetic
tggctacttccaacctcttcag

SEQ ID NO: 35390 - DNA, 22 bp, Artificial Sequence
  Synthetic
gaacagtgtcaataaaccggct

SEQ ID NO: 35391 - DNA, 22 bp, Artificial Sequence
  Synthetic
acattttgataggccgttggat

SEQ ID NO: 35392 - DNA, 20 bp, Artificial Sequence
  Synthetic
ctctagaggggcatcagcac

SEQ ID NO: 35393 - DNA, 22 bp, Artificial Sequence
  Synthetic
agcgatcctgcaaatcaatgtc

SEQ ID NO: 35394 - DNA, 22 bp, Artificial Sequence
  Synthetic
tctaacccaccgaaaacggtta

SEQ ID NO: 35395 - DNA, 20 bp, Artificial Sequence
  Synthetic
cacagcattcgcaagggcag

SEQ ID NO: 35396 - DNA, 18 bp, Artificial Sequence
  Synthetic
aacatcacgcccggcagg

SEQ ID NO: 35397 - DNA, 21 bp, Artificial Sequence
  Synthetic
gcgtaaagccgcgtcatacca

SEQ ID NO: 35398 - DNA, 21 bp, Artificial Sequence
  Synthetic
ggctgccgtgagtaagaggac

SEQ ID NO: 35399 - DNA, 20 bp, Artificial Sequence
  Synthetic
gatgaaagccggccgagagc

SEQ ID NO: 35400 - DNA, 19 bp, Artificial Sequence
  Synthetic
aagagcaggcggcgatgcc

SEQ ID NO: 35401 - DNA, 21 bp, Artificial Sequence
  Synthetic
caggagcgacggcgtgaatta

SEQ ID NO: 35402 - DNA, 19 bp, Artificial Sequence
  Synthetic
actctggcggcagtgtgcg

SEQ ID NO: 35403 - DNA, 21 bp, Artificial Sequence
  Synthetic
catagggtatgcgccacggat

SEQ ID NO: 35404 - DNA, 22 bp, Artificial Sequence
  Synthetic
ggcctggtgcgtcaatgatgac

SEQ ID NO: 35405 - DNA, 20 bp, Artificial Sequence
  Synthetic
cctggcccttctcgaccatg

SEQ ID NO: 35406 - DNA, 19 bp, Artificial Sequence
  Synthetic
taccgggggtgaggttgcg

SEQ ID NO: 35407 - DNA, 20 bp, Artificial Sequence
  Synthetic
ctggtcatactcggcagcgg

SEQ ID NO: 35408 - DNA, 20 bp, Artificial Sequence
  Synthetic
atagcaacccgatgcccagc

SEQ ID NO: 35409 - DNA, 21 bp, Artificial Sequence
  Synthetic
tctactgggggtatggatgct

SEQ ID NO: 35410 - DNA, 22 bp, Artificial Sequence
  Synthetic
cgttcctgttgctttttttgga

SEQ ID NO: 35411 - DNA, 21 bp, Artificial Sequence
  Synthetic
cgagatacgagacgcgcttaa

SEQ ID NO: 35412 - DNA, 20 bp, Artificial Sequence
  Synthetic
agttggaatgatccccgctg

SEQ ID NO: 35413 - DNA, 20 bp, Artificial Sequence
  Synthetic
tgaacacatttcgcgcgttt

SEQ ID NO: 35414 - DNA, 23 bp, Artificial Sequence
  Synthetic
cccgtttaaaatgccaactggat

SEQ ID NO: 35415 - DNA, 21 bp, Artificial Sequence
  Synthetic
ggagacggtgttggaggggag

SEQ ID NO: 35416 - DNA, 18 bp, Artificial Sequence
  Synthetic
ttgcaaggacctcgcgcg

SEQ ID NO: 35417 - DNA, 19 bp, Artificial Sequence
  Synthetic
acacctcgcgtccctggac

SEQ ID NO: 35418 - DNA, 20 bp, Artificial Sequence
  Synthetic
tttctttccccctggcctta

SEQ ID NO: 35419 - DNA, 22 bp, Artificial Sequence
  Synthetic
tggatgcactctatcccattct

SEQ ID NO: 35420 - DNA, 20 bp, Artificial Sequence
  Synthetic
tccctgtggaagcacattgt

SEQ ID NO: 35421 - DNA, 20 bp, Artificial Sequence
  Synthetic
ctggcagcactataggctgt

SEQ ID NO: 35422 - DNA, 23 bp, Artificial Sequence
  Synthetic
tctcatgttcatcttgggcctta

SEQ ID NO: 35423 - DNA, 21 bp, Artificial Sequence
  Synthetic
gctgtttcctgccctgtttct

SEQ ID NO: 35424 - DNA, 23 bp, Artificial Sequence
  Synthetic
tgagggctttcatagtgatgtct

SEQ ID NO: 35425 - DNA, 24 bp, Artificial Sequence
  Synthetic
tgtcctgcttgatattcacaccta

SEQ ID NO: 35426 - DNA, 20 bp, Artificial Sequence
  Synthetic
cctgcccaagtatccccata

SEQ ID NO: 35427 - DNA, 24 bp, Artificial Sequence
  Synthetic
gtgtacattgtactgtgctgacat

SEQ ID NO: 35428 - DNA, 21 bp, Artificial Sequence
  Synthetic
gtactccggatgcagctctcg

SEQ ID NO: 35429 - DNA, 19 bp, Artificial Sequence
  Synthetic
tcctccgagtcgctgctgg

SEQ ID NO: 35430 - DNA, 21 bp, Artificial Sequence
  Synthetic
ggtcgccatatgcttcacgcc

SEQ ID NO: 35431 - DNA, 20 bp, Artificial Sequence
  Synthetic
tgtcattttccggggctgcg

SEQ ID NO: 35432 - DNA, 22 bp, Artificial Sequence
  Synthetic
cagcagctggacgtgttctact

SEQ ID NO: 35433 - DNA, 20 bp, Artificial Sequence
  Synthetic
tcgtgaagacccagggggag

SEQ ID NO: 35434 - DNA, 19 bp, Artificial Sequence
  Synthetic
acaggcgctcgaggtcctg

SEQ ID NO: 35435 - DNA, 20 bp, Artificial Sequence
  Synthetic
acatcagcaggcagacgagc

SEQ ID NO: 35436 - DNA, 19 bp, Artificial Sequence
  Synthetic
gcgtcgtggcatggaagcc

SEQ ID NO: 35437 - DNA, 19 bp, Artificial Sequence
  Synthetic
acgtgaccgacggcccctt

SEQ ID NO: 35438 - DNA, 19 bp, Artificial Sequence
  Synthetic
cctaaacgtcgcccccgtc

SEQ ID NO: 35439 - DNA, 22 bp, Artificial Sequence
  Synthetic
cgggtggtcatctacacaacgg

SEQ ID NO: 35440 - DNA, 18 bp, Artificial Sequence
  Synthetic
gctcgggttctcgctgca

SEQ ID NO: 35441 - DNA, 19 bp, Artificial Sequence
  Synthetic
aggcgcggctaaagtcccg

SEQ ID NO: 35442 - DNA, 18 bp, Artificial Sequence
  Synthetic
agcggtgcagggcctgaa

SEQ ID NO: 35443 - DNA, 20 bp, Artificial Sequence
  Synthetic
gggttcaatcgccgcctctg

SEQ ID NO: 35444 - DNA, 19 bp, Artificial Sequence
  Synthetic
tgggcgccatggacctgac

SEQ ID NO: 35445 - DNA, 19 bp, Artificial Sequence
  Synthetic
tccgttctcacgcgctggg

SEQ ID NO: 35446 - DNA, 19 bp, Artificial Sequence
  Synthetic
gtacacgttgccgttcgcg

SEQ ID NO: 35447 - DNA, 21 bp, Artificial Sequence
  Synthetic
gctggaggaccacgagtttgt

SEQ ID NO: 35448 - DNA, 19 bp, Artificial Sequence
  Synthetic
gcttcatcatgggcgcggg

SEQ ID NO: 35449 - DNA, 19 bp, Artificial Sequence
  Synthetic
gccgcgagcatcttcgtgg

SEQ ID NO: 35450 - DNA, 20 bp, Artificial Sequence
  Synthetic
gtaggggttgcagggcacat

SEQ ID NO: 35451 - DNA, 19 bp, Artificial Sequence
  Synthetic
gtggcgaccgtcaagtccc

SEQ ID NO: 35452 - DNA, 19 bp, Artificial Sequence
  Synthetic
atgatgctggcggtgccgg

SEQ ID NO: 35453 - DNA, 18 bp, Artificial Sequence
  Synthetic
ttgtcgttgccgcgggtg

SEQ ID NO: 35454 - DNA, 19 bp, Artificial Sequence
  Synthetic
accgagagcgacgcctgac

SEQ ID NO: 35455 - DNA, 20 bp, Artificial Sequence
  Synthetic
ccagcggttcaggatgctga

SEQ ID NO: 35456 - DNA, 18 bp, Artificial Sequence
  Synthetic
actggctgcccgatccga

SEQ ID NO: 35457 - DNA, 19 bp, Artificial Sequence
  Synthetic
tacactaccgcggtcccgg

SEQ ID NO: 35458 - DNA, 19 bp, Artificial Sequence
  Synthetic
ccccatcggcattccggtt

SEQ ID NO: 35459 - DNA, 21 bp, Artificial Sequence
  Synthetic
taacctccacgggagccgcaa

SEQ ID NO: 35460 - DNA, 19 bp, Artificial Sequence
  Synthetic
tggaggacgcggatctccc

SEQ ID NO: 35461 - DNA, 19 bp, Artificial Sequence
  Synthetic
agaaaggtccgggccgtcg

SEQ ID NO: 35462 - DNA, 21 bp, Artificial Sequence
  Synthetic
agaaaccaaccgacgaccacc

SEQ ID NO: 35463 - DNA, 19 bp, Artificial Sequence
  Synthetic
gacgtgggtgatgtccggg

SEQ ID NO: 35464 - DNA, 19 bp, Artificial Sequence
  Synthetic
gcgaatccccaccatggcg

SEQ ID NO: 35465 - DNA, 21 bp, Artificial Sequence
  Synthetic
tacctttccctagcggccccg

SEQ ID NO: 35466 - DNA, 19 bp, Artificial Sequence
  Synthetic
gcgcaacacgtgtcccctg

SEQ ID NO: 35467 - DNA, 17 bp, Artificial Sequence
  Synthetic
acgcagcgcccgtgttt

SEQ ID NO: 35468 - DNA, 22 bp, Artificial Sequence
  Synthetic
tgctaaggcgtatttggcgcag

SEQ ID NO: 35469 - DNA, 20 bp, Artificial Sequence
  Synthetic
gcaggcacgttccagcactg

SEQ ID NO: 35470 - DNA, 19 bp, Artificial Sequence
  Synthetic
tcgcgctgccgacccatac

SEQ ID NO: 35471 - DNA, 23 bp, Artificial Sequence
  Synthetic
acagtcctaccatacatcgaaca

SEQ ID NO: 35472 - DNA, 20 bp, Artificial Sequence
  Synthetic
aatagtaggcggccacaacc

SEQ ID NO: 35473 - DNA, 24 bp, Artificial Sequence
  Synthetic
tgttttataccccctgtacccata

SEQ ID NO: 35474 - DNA, 24 bp, Artificial Sequence
  Synthetic
ggttttcgggatcattgtcaaaca

SEQ ID NO: 35475 - DNA, 20 bp, Artificial Sequence
  Synthetic
cacagcttttctgcgtgtgc

SEQ ID NO: 35476 - DNA, 19 bp, Artificial Sequence
  Synthetic
actgtgccaccgccaccac

SEQ ID NO: 35477 - DNA, 20 bp, Artificial Sequence
  Synthetic
ctactgaggcgacgcacgtc

SEQ ID NO: 35478 - DNA, 20 bp, Artificial Sequence
  Synthetic
tagtcccctcaccggattgc

SEQ ID NO: 35479 - DNA, 20 bp, Artificial Sequence
  Synthetic
tgcgtctcacgtattcctct

SEQ ID NO: 35480 - DNA, 23 bp, Artificial Sequence
  Synthetic
tgttacaccaatacctaagggct

SEQ ID NO: 35481 - DNA, 20 bp, Artificial Sequence
  Synthetic
atgaagaagcatccccctca

SEQ ID NO: 35482 - DNA, 22 bp, Artificial Sequence
  Synthetic
tgggtcagtggaggtatcatct

SEQ ID NO: 35483 - DNA, 23 bp, Artificial Sequence
  Synthetic
actcagatctgctacagaatgct

SEQ ID NO: 35484 - DNA, 20 bp, Artificial Sequence
  Synthetic
gtgcatcgaaacgctctgtc

SEQ ID NO: 35485 - DNA, 20 bp, Artificial Sequence
  Synthetic
ttcgggcctatttccacacc

SEQ ID NO: 35486 - DNA, 20 bp, Artificial Sequence
  Synthetic
cgctgtaggtctgcttggag

SEQ ID NO: 35487 - DNA, 22 bp, Artificial Sequence
  Synthetic
tcgtttctgcaaacagtgtcat

SEQ ID NO: 35488 - DNA, 22 bp, Artificial Sequence
  Synthetic
aggttgtagaggagtcgtcccg

SEQ ID NO: 35489 - DNA, 22 bp, Artificial Sequence
  Synthetic
tcgtgctccaacttgtgaagca

SEQ ID NO: 35490 - DNA, 23 bp, Artificial Sequence
  Synthetic
tcgaaggagcctaaagaaaaagc

SEQ ID NO: 35491 - DNA, 22 bp, Artificial Sequence
  Synthetic
ggacgaataccagtggtaaccc

SEQ ID NO: 35492 - DNA, 23 bp, Artificial Sequence
  Synthetic
cctgtaccagcattaacatccac

SEQ ID NO: 35493 - DNA, 24 bp, Artificial Sequence
  Synthetic
ggttgttccactatatctggtgtc

SEQ ID NO: 35494 - DNA, 22 bp, Artificial Sequence
  Synthetic
cccaatgtttccaacgcaatga

SEQ ID NO: 35495 - DNA, 20 bp, Artificial Sequence
  Synthetic
caaaggtcctccccttccaa

SEQ ID NO: 35496 - DNA, 23 bp, Artificial Sequence
  Synthetic
tgtcatcatttgagctgccttag

SEQ ID NO: 35497 - DNA, 25 bp, Artificial Sequence
  Synthetic
ttaacttttactccggaaccagaaa

SEQ ID NO: 35498 - DNA, 24 bp, Artificial Sequence
  Synthetic
tgttgcaacaattcttcctgatga

SEQ ID NO: 35499 - DNA, 20 bp, Artificial Sequence
  Synthetic
cggtaaaagcgttcagcctc

SEQ ID NO: 35500 - DNA, 22 bp, Artificial Sequence
  Synthetic
agctgcggacttttgattaact

SEQ ID NO: 35501 - DNA, 25 bp, Artificial Sequence
  Synthetic
ccaacaaacaccagacaattcttct

SEQ ID NO: 35502 - DNA, 20 bp, Artificial Sequence
  Synthetic
cttgcagtgcaacgaaacgt

SEQ ID NO: 35503 - DNA, 20 bp, Artificial Sequence
  Synthetic
ctggaggacagttgccagta

SEQ ID NO: 35504 - DNA, 21 bp, Artificial Sequence
  Synthetic
ggcaagtgcaaaacgttttgg

SEQ ID NO: 35505 - DNA, 24 bp, Artificial Sequence
  Synthetic
ccgggttaaaaagtcaacattgtc

SEQ ID NO: 35506 - DNA, 20 bp, Artificial Sequence
  Synthetic
gtagtgcacacgaggaccta

SEQ ID NO: 35507 - DNA, 23 bp, Artificial Sequence
  Synthetic
ccagtttgttgttgccataatgc

SEQ ID NO: 35508 - DNA, 25 bp, Artificial Sequence
  Synthetic
ggcaaatttatttggatcaggcaat

SEQ ID NO: 35509 - DNA, 20 bp, Artificial Sequence
  Synthetic
ttcgcctgatctccaacaca

SEQ ID NO: 35510 - DNA, 24 bp, Artificial Sequence
  Synthetic
ctctatactctgaggaggaggagg

SEQ ID NO: 35511 - DNA, 21 bp, Artificial Sequence
  Synthetic
gacagctggattacttcgctg

SEQ ID NO: 35512 - DNA, 20 bp, Artificial Sequence
  Synthetic
ctagcacatgcgtcagcttt

SEQ ID NO: 35513 - DNA, 20 bp, Artificial Sequence
  Synthetic
ccacacgaggtgtcaactct

SEQ ID NO: 35514 - DNA, 21 bp, Artificial Sequence
  Synthetic
acccgtttgtgctttcttcaa

SEQ ID NO: 35515 - DNA, 22 bp, Artificial Sequence
  Synthetic
gcctctacctgcaaaagttcat

SEQ ID NO: 35516 - DNA, 20 bp, Artificial Sequence
  Synthetic
aaagccaccagttcccttcc

SEQ ID NO: 35517 - DNA, 23 bp, Artificial Sequence
  Synthetic
cctcctcaattgcaaattcagca

SEQ ID NO: 35518 - DNA, 25 bp, Artificial Sequence
  Synthetic
tctgcagaattgtgaataggaaagt

SEQ ID NO: 35519 - DNA, 20 bp, Artificial Sequence
  Synthetic
tgtgccgctggatattcaac

SEQ ID NO: 35520 - DNA, 25 bp, Artificial Sequence
  Synthetic
aacatttttgtggctacaaatgcca

SEQ ID NO: 35521 - DNA, 20 bp, Artificial Sequence
  Synthetic
attccggccacttgtctagc

SEQ ID NO: 35522 - DNA, 22 bp, Artificial Sequence
  Synthetic
ccgtggggaattcctagcctca

SEQ ID NO: 35523 - DNA, 20 bp, Artificial Sequence
  Synthetic
atcgggcaacttccaacacc

SEQ ID NO: 35524 - DNA, 24 bp, Artificial Sequence
  Synthetic
gcaacttcaacagtgtctagatca

SEQ ID NO: 35525 - DNA, 24 bp, Artificial Sequence
  Synthetic
tctgctcattttgtctatctgcat

SEQ ID NO: 35526 - DNA, 22 bp, Artificial Sequence
  Synthetic
acatgtgttcccaacattgctt

SEQ ID NO: 35527 - DNA, 20 bp, Artificial Sequence
  Synthetic
catgcacacaagctgctctg

SEQ ID NO: 35528 - DNA, 20 bp, Artificial Sequence
  Synthetic
cttagggttaggtgcaccgg

SEQ ID NO: 35529 - DNA, 21 bp, Artificial Sequence
  Synthetic
tgcagtgggggatagtttctg

SEQ ID NO: 35530 - DNA, 21 bp, Artificial Sequence
  Synthetic
caccagctgttaacaatccga

SEQ ID NO: 35531 - DNA, 25 bp, Artificial Sequence
  Synthetic
tgtctagttgctttagtttgctaca

SEQ ID NO: 35532 - DNA, 20 bp, Artificial Sequence
  Synthetic
acctggtgtgccgtgtatta

SEQ ID NO: 35533 - DNA, 22 bp, Artificial Sequence
  Synthetic
caagctcgacaatcatcggatt

SEQ ID NO: 35534 - DNA, 21 bp, Artificial Sequence
  Synthetic
ggagccacatcttctccaatc

SEQ ID NO: 35535 - DNA, 21 bp, Artificial Sequence
  Synthetic
tcacaaagtttaccacgtcgg

SEQ ID NO: 35536 - DNA, 21 bp, Artificial Sequence
  Synthetic
gccatatggtccacagttgtt

SEQ ID NO: 35537 - DNA, 24 bp, Artificial Sequence
  Synthetic
gctccttcttcttttccttggtaa

SEQ ID NO: 35538 - DNA, 20 bp, Artificial Sequence
  Synthetic
gggtctgctgatactgttgc

SEQ ID NO: 35539 - DNA, 20 bp, Artificial Sequence
  Synthetic
gcctcaggagttgatgcatg

SEQ ID NO: 35540 - DNA, 23 bp, Artificial Sequence
  Synthetic
tcactaacctcttcaggagacag

SEQ ID NO: 35541 - DNA, 25 bp, Artificial Sequence
  Synthetic
gctgctgcaaatggtaatagcttta

SEQ ID NO: 35542 - DNA, 24 bp, Artificial Sequence
  Synthetic
acccacttaaacaatggttacacc

SEQ ID NO: 35543 - DNA, 21 bp, Artificial Sequence
  Synthetic
agttggggtcccagacgaaga

SEQ ID NO: 35544 - DNA, 21 bp, Artificial Sequence
  Synthetic
cgtgcaactgatcgatggcta

SEQ ID NO: 35545 - DNA, 25 bp, Artificial Sequence
  Synthetic
aactcagttgtcacatctatggttt

SEQ ID NO: 35546 - DNA, 21 bp, Artificial Sequence
  Synthetic
gccaacagtcaacagtctgtc

SEQ ID NO: 35547 - DNA, 23 bp, Artificial Sequence
  Synthetic
ctgtcaaataacggatgaccagt

SEQ ID NO: 35548 - DNA, 22 bp, Artificial Sequence
  Synthetic
gccatggctagacgctttctgc

SEQ ID NO: 35549 - DNA, 22 bp, Artificial Sequence
  Synthetic
ccgggaacttgacgtccattgg

SEQ ID NO: 35550 - DNA, 20 bp, Artificial Sequence
  Synthetic
aagccgttctgagcaacccg

SEQ ID NO: 35551 - DNA, 21 bp, Artificial Sequence
  Synthetic
aggcaagatagcaagctgcgt

SEQ ID NO: 35552 - DNA, 19 bp, Artificial Sequence
  Synthetic
acgacgagccgctccaatg

SEQ ID NO: 35553 - DNA, 21 bp, Artificial Sequence
  Synthetic
caccgttgatagtggtcgcca

SEQ ID NO: 35554 - DNA, 19 bp, Artificial Sequence
  Synthetic
acacggccgccctgaagag

SEQ ID NO: 35555 - DNA, 22 bp, Artificial Sequence
  Synthetic
gctcctcctgaacatcccccat

SEQ ID NO: 35556 - DNA, 22 bp, Artificial Sequence
  Synthetic
gtctttccccctgcgagacaaa

SEQ ID NO: 35557 - DNA, 22 bp, Artificial Sequence
  Synthetic
gggtcggcttaagtctggtgag

SEQ ID NO: 35558 - DNA, 21 bp, Artificial Sequence
  Synthetic
cagcaatttgagccccgcatg

SEQ ID NO: 35559 - DNA, 21 bp, Artificial Sequence
  Synthetic
ctaagcaggggtttgcagggt

SEQ ID NO: 35560 - DNA, 22 bp, Artificial Sequence
  Synthetic
tgaggtgctagtgtcctccaca

SEQ ID NO: 35561 - DNA, 20 bp, Artificial Sequence
  Synthetic
acaattaaccgcgcgggctt

SEQ ID NO: 35562 - DNA, 22 bp, Artificial Sequence
  Synthetic
agttaaacatcgggccaccaca

SEQ ID NO: 35563 - DNA, 20 bp, Artificial Sequence
  Synthetic
gccatcgtgggctacggaga

SEQ ID NO: 35564 - DNA, 20 bp, Artificial Sequence
  Synthetic
tggctttgcgttgctcatct

SEQ ID NO: 35565 - DNA, 22 bp, Artificial Sequence
  Synthetic
gcctgaaccagctcttttaact

SEQ ID NO: 35566 - DNA, 20 bp, Artificial Sequence
  Synthetic
cgattccagccccttgagtg

SEQ ID NO: 35567 - DNA, 20 bp, Artificial Sequence
  Synthetic
tggggttgtagtctgggtcg

SEQ ID NO: 35568 - DNA, 25 bp, Artificial Sequence
  Synthetic
agtaataaaagtaggtggcagcttt

SEQ ID NO: 35569 - DNA, 21 bp, Artificial Sequence
  Synthetic
gaacaggttgcagtcccaatt

SEQ ID NO: 35570 - DNA, 23 bp, Artificial Sequence
  Synthetic
acatttcagcatcctgagcaaat

SEQ ID NO: 35571 - DNA, 22 bp, Artificial Sequence
  Synthetic
tggatccctagcttcttcttgt

SEQ ID NO: 35572 - DNA, 22 bp, Artificial Sequence
  Synthetic
ctagttttccttcccgcctcta

SEQ ID NO: 35573 - DNA, 25 bp, Artificial Sequence
  Synthetic
actgagctatagggtctacaaaagt

SEQ ID NO: 35574 - DNA, 24 bp, Artificial Sequence
  Synthetic
aaagtaaggatgaccaacggtaag

SEQ ID NO: 35575 - DNA, 22 bp, Artificial Sequence
  Synthetic
gctctgccagcaatgaaatgtt

SEQ ID NO: 35576 - DNA, 24 bp, Artificial Sequence
  Synthetic
aactgctttgtccatgttatttgg

SEQ ID NO: 35577 - DNA, 24 bp, Artificial Sequence
  Synthetic
tccacaatatcaagtgcaagatcc

SEQ ID NO: 35578 - DNA, 24 bp, Artificial Sequence
  Synthetic
ccactacagcctctacataaaacc

SEQ ID NO: 35579 - DNA, 21 bp, Artificial Sequence
  Synthetic
tggcaaagagtctccatcgtt

SEQ ID NO: 35580 - DNA, 25 bp, Artificial Sequence
  Synthetic
tgttggtgcagttaaatacacttca

SEQ ID NO: 35581 - DNA, 21 bp, Artificial Sequence
  Synthetic
gcaagtagacagtggcctcac

SEQ ID NO: 35582 - DNA, 23 bp, Artificial Sequence
  Synthetic
atcacctggatttactgcaacat

SEQ ID NO: 35583 - DNA, 25 bp, Artificial Sequence
  Synthetic
gtctggtacattttcaccaacagta

SEQ ID NO: 35584 - DNA, 20 bp, Artificial Sequence
  Synthetic
tcatcctcctcctctgagct

SEQ ID NO: 35585 - DNA, 20 bp, Artificial Sequence
  Synthetic
attgccttttccgcaagctc

SEQ ID NO: 35586 - DNA, 20 bp, Artificial Sequence
  Synthetic
tgggtttttcggctcctgtg

SEQ ID NO: 35587 - DNA, 20 bp, Artificial Sequence
  Synthetic
gttcgattggggcaacatct

SEQ ID NO: 35588 - DNA, 21 bp, Artificial Sequence
  Synthetic
gttgtccctcactctcctctt

SEQ ID NO: 35589 - DNA, 21 bp, Artificial Sequence
  Synthetic
ggaggccagattgctcaagtt

SEQ ID NO: 35590 - DNA, 25 bp, Artificial Sequence
  Synthetic
ttcgaacatgtacccttttcctaat

SEQ ID NO: 35591 - DNA, 20 bp, Artificial Sequence
  Synthetic
accaacgctcatgtcagctg

SEQ ID NO: 35592 - DNA, 21 bp, Artificial Sequence
  Synthetic
ggaatgtggaggttccggata

SEQ ID NO: 35593 - DNA, 20 bp, Artificial Sequence
  Synthetic
aggaaaaagctggcaacgac

SEQ ID NO: 35594 - DNA, 21 bp, Artificial Sequence
  Synthetic
gcagactaacatgcctagcac

SEQ ID NO: 35595 - DNA, 24 bp, Artificial Sequence
  Synthetic
ttggttcttcttgactcaccaaat

SEQ ID NO: 35596 - DNA, 22 bp, Artificial Sequence
  Synthetic
gtcggtcatcttagtgtcgttg

SEQ ID NO: 35597 - DNA, 25 bp, Artificial Sequence
  Synthetic
tgcggaggactgtttaagtactttc

SEQ ID NO: 35598 - DNA, 20 bp, Artificial Sequence
  Synthetic
tcctatacagtcacgcaccc

SEQ ID NO: 35599 - DNA, 20 bp, Artificial Sequence
  Synthetic
gctttatcctgggaagctgc

SEQ ID NO: 35600 - DNA, 20 bp, Artificial Sequence
  Synthetic
acccacccttaggaaccgtc

SEQ ID NO: 35601 - DNA, 22 bp, Artificial Sequence
  Synthetic
cagcaggactttcttgtggaat

SEQ ID NO: 35602 - DNA, 23 bp, Artificial Sequence
  Synthetic
ggagaaactttaggcacagtcat

SEQ ID NO: 35603 - DNA, 25 bp, Artificial Sequence
  Synthetic
gccaattagaaacatttgggtttgt

SEQ ID NO: 35604 - DNA, 24 bp, Artificial Sequence
  Synthetic
tgactcgaagacaggtaaatgaca

SEQ ID NO: 35605 - DNA, 21 bp, Artificial Sequence
  Synthetic
acaagcaggcaggcaggattt

SEQ ID NO: 35606 - DNA, 22 bp, Artificial Sequence
  Synthetic
tgacaaaaacgtctcctttgga

SEQ ID NO: 35607 - DNA, 24 bp, Artificial Sequence
  Synthetic
tccattatctggacctgaaattcc

SEQ ID NO: 35608 - DNA, 22 bp, Artificial Sequence
  Synthetic
gtctggaactgtgacttttggt

SEQ ID NO: 35609 - DNA, 25 bp, Artificial Sequence
  Synthetic
gctcaagtttctcacagatactcct

SEQ ID NO: 35610 - DNA, 21 bp, Artificial Sequence
  Synthetic
gtgtacctcttctgcccaaga

SEQ ID NO: 35611 - DNA, 21 bp, Artificial Sequence
  Synthetic
cagacactccaaagctgggca

SEQ ID NO: 35612 - DNA, 20 bp, Artificial Sequence
  Synthetic
gcctgtgctgtctctagctc

SEQ ID NO: 35613 - DNA, 21 bp, Artificial Sequence
  Synthetic
tcgtttttgggctcgcctata

SEQ ID NO: 35614 - DNA, 23 bp, Artificial Sequence
  Synthetic
ttcccaacgtattagttgccaat

SEQ ID NO: 35615 - DNA, 22 bp, Artificial Sequence
  Synthetic
acactgtcccatgctacatagg

SEQ ID NO: 35616 - DNA, 22 bp, Artificial Sequence
  Synthetic
tggtcgctatgttttcgcaatc

SEQ ID NO: 35617 - DNA, 20 bp, Artificial Sequence
  Synthetic
cagacagatggcaaaagcgg

SEQ ID NO: 35618 - DNA, 20 bp, Artificial Sequence
  Synthetic
agtgtccacaggctcaaagg

SEQ ID NO: 35619 - DNA, 23 bp, Artificial Sequence
  Synthetic
caaacaagtcattgtcctccgtg

SEQ ID NO: 35620 - DNA, 20 bp, Artificial Sequence
  Synthetic
aaaagctgctcacgccgtaa

SEQ ID NO: 35621 - DNA, 22 bp, Artificial Sequence
  Synthetic
ggtactgggagtggtatctacc

SEQ ID NO: 35622 - DNA, 25 bp, Artificial Sequence
  Synthetic
acaatatatagcccaacaagcaaca

SEQ ID NO: 35623 - DNA, 25 bp, Artificial Sequence
  Synthetic
ccctgattgttcaagtttctcacat

SEQ ID NO: 35624 - DNA, 20 bp, Artificial Sequence
  Synthetic
accaaaactgggaagctcca

SEQ ID NO: 35625 - DNA, 25 bp, Artificial Sequence
  Synthetic
gcacctttggtacatttgttcatct

SEQ ID NO: 35626 - DNA, 22 bp, Artificial Sequence
  Synthetic
ccggaccgatagacgtaccctt

SEQ ID NO: 35627 - DNA, 21 bp, Artificial Sequence
  Synthetic
cccccactggcattgtcaacc

SEQ ID NO: 35628 - DNA, 19 bp, Artificial Sequence
  Synthetic
aagctctccgggctgggag

SEQ ID NO: 35629 - DNA, 21 bp, Artificial Sequence
  Synthetic
gggggcagactctaggcagag

SEQ ID NO: 35630 - DNA, 21 bp, Artificial Sequence
  Synthetic
aaaaggtgccctgaccatgct

SEQ ID NO: 35631 - DNA, 22 bp, Artificial Sequence
  Synthetic
tcccgggaagtcaaaagcgaat

SEQ ID NO: 35632 - DNA, 19 bp, Artificial Sequence
  Synthetic
tggtcgagttcgggcaggg

SEQ ID NO: 35633 - DNA, 22 bp, Artificial Sequence
  Synthetic
cccaaggtaagcgaccacacaa

SEQ ID NO: 35634 - DNA, 22 bp, Artificial Sequence
  Synthetic
gacccattggaccagccattgt

SEQ ID NO: 35635 - DNA, 20 bp, Artificial Sequence
  Synthetic
aactagcatgcccacagcgt

SEQ ID NO: 35636 - DNA, 22 bp, Artificial Sequence
  Synthetic
agtggcagaaaagcaggtgtct

SEQ ID NO: 35637 - DNA, 19 bp, Artificial Sequence
  Synthetic
ctaccacgtccacaccgcc

SEQ ID NO: 35638 - DNA, 22 bp, Artificial Sequence
  Synthetic
cggcccctttcctttgatacca

SEQ ID NO: 35639 - DNA, 21 bp, Artificial Sequence
  Synthetic
ccaccaacgcctcaatccagt

SEQ ID NO: 35640 - DNA, 22 bp, Artificial Sequence
  Synthetic
gcctcttggctagggagatgca

SEQ ID NO: 35641 - DNA, 22 bp, Artificial Sequence
  Synthetic
aggggggtggtaacctggattt

SEQ ID NO: 35642 - DNA, 22 bp, Artificial Sequence
  Synthetic
catgcttgacagggtcacacct

SEQ ID NO: 35643 - DNA, 22 bp, Artificial Sequence
  Synthetic
gatcaacacgtgcggaatcagc

SEQ ID NO: 35644 - DNA, 20 bp, Artificial Sequence
  Synthetic
cagggatgcctaaggcttca

SEQ ID NO: 35645 - DNA, 22 bp, Artificial Sequence
  Synthetic
cttatgaaagggaaggcctctg

SEQ ID NO: 35646 - DNA, 20 bp, Artificial Sequence
  Synthetic
tgaacctccctcgtcatccg

SEQ ID NO: 35647 - DNA, 22 bp, Artificial Sequence
  Synthetic
tgaaatgcccattggaccattg

SEQ ID NO: 35648 - DNA, 25 bp, Artificial Sequence
  Synthetic
cattgcaaatgatgactttccagaa

SEQ ID NO: 35649 - DNA, 20 bp, Artificial Sequence
  Synthetic
gcttgtcctcctggcgaccc

SEQ ID NO: 35650 - DNA, 22 bp, Artificial Sequence
  Synthetic
gaccttcctctggatcgcgatc

SEQ ID NO: 35651 - DNA, 20 bp, Artificial Sequence
  Synthetic
actcctttggggtatcgcac

SEQ ID NO: 35652 - DNA, 20 bp, Artificial Sequence
  Synthetic
ttttgagcttggccatcagc

SEQ ID NO: 35653 - DNA, 22 bp, Artificial Sequence
  Synthetic
cactgcttttgtaccgttaacg

SEQ ID NO: 35654 - DNA, 23 bp, Artificial Sequence
  Synthetic
catagtcgttgctaagatggcaa

SEQ ID NO: 35655 - DNA, 20 bp, Artificial Sequence
  Synthetic
ccgcctgcagaaagcctaat

SEQ ID NO: 35656 - DNA, 20 bp, Artificial Sequence
  Synthetic
atgccttcccatcatggcag

SEQ ID NO: 35657 - DNA, 20 bp, Artificial Sequence
  Synthetic
tccacatgctgagcacttcc

SEQ ID NO: 35658 - DNA, 23 bp, Artificial Sequence
  Synthetic
ttcacccagttttaccaccattt

SEQ ID NO: 35659 - DNA, 22 bp, Artificial Sequence
  Synthetic
tcccaatgaaagcatttccact

SEQ ID NO: 35660 - DNA, 21 bp, Artificial Sequence
  Synthetic
agggtgtaacgttttcggttg

SEQ ID NO: 35661 - DNA, 23 bp, Artificial Sequence
  Synthetic
tcttgatgctacaacacacagtc

SEQ ID NO: 35662 - DNA, 20 bp, Artificial Sequence
  Synthetic
ggctgcagtcaacctcatct

SEQ ID NO: 35663 - DNA, 23 bp, Artificial Sequence
  Synthetic
actcaaatcaaacgagtctgcat

SEQ ID NO: 35664 - DNA, 25 bp, Artificial Sequence
  Synthetic
cccatttttccatccaataatggtt

SEQ ID NO: 35665 - DNA, 22 bp, Artificial Sequence
  Synthetic
cgtccttggaggagctgacaga

SEQ ID NO: 35666 - DNA, 24 bp, Artificial Sequence
  Synthetic
tcatgcactggatttattggttct

SEQ ID NO: 35667 - DNA, 24 bp, Artificial Sequence
  Synthetic
tgattggcagaaacctttggaatt

SEQ ID NO: 35668 - DNA, 24 bp, Artificial Sequence
  Synthetic
ggtacactggctctgtcttgatta

SEQ ID NO: 35669 - DNA, 24 bp, Artificial Sequence
  Synthetic
gcgattgaatattccagagtcact

SEQ ID NO: 35670 - DNA, 24 bp, Artificial Sequence
  Synthetic
acccaatggtgtctgagataattc

SEQ ID NO: 35671 - DNA, 20 bp, Artificial Sequence
  Synthetic
tttgcgctggaacctttagg

SEQ ID NO: 35672 - DNA, 25 bp, Artificial Sequence
  Synthetic
tgtgttgttatctccatttcctctt

SEQ ID NO: 35673 - DNA, 23 bp, Artificial Sequence
  Synthetic
gactgttcaagcttttcgcaaat

SEQ ID NO: 35674 - DNA, 25 bp, Artificial Sequence
  Synthetic
tttcctagtcttgccattttgtttg

SEQ ID NO: 35675 - DNA, 25 bp, Artificial Sequence
  Synthetic
actccaatactcatatcagctgact

SEQ ID NO: 35676 - DNA, 20 bp, Artificial Sequence
  Synthetic
ggtcccccatctgataccaa

SEQ ID NO: 35677 - DNA, 23 bp, Artificial Sequence
  Synthetic
cactaagcaaattcacaggcaaa

SEQ ID NO: 35678 - DNA, 21 bp, Artificial Sequence
  Synthetic
ctcaaatcagaggcgagcttt

SEQ ID NO: 35679 - DNA, 23 bp, Artificial Sequence
  Synthetic
gtccattgtccagatttgccata

SEQ ID NO: 35680 - DNA, 20 bp, Artificial Sequence
  Synthetic
tgattttgggcccaaccact

SEQ ID NO: 35681 - DNA, 20 bp, Artificial Sequence
  Synthetic
gcaaatccaacatcaggggc

SEQ ID NO: 35682 - DNA, 21 bp, Artificial Sequence
  Synthetic
ctacagtgtctcctgcaaagc

SEQ ID NO: 35683 - DNA, 25 bp, Artificial Sequence
  Synthetic
tctttcacatattcatcggtgctta

SEQ ID NO: 35684 - DNA, 23 bp, Artificial Sequence
  Synthetic
tctcccatatcaccatcctgaat

SEQ ID NO: 35685 - DNA, 22 bp, Artificial Sequence
  Synthetic
gaaaggcttacacactgcaact

SEQ ID NO: 35686 - DNA, 20 bp, Artificial Sequence
  Synthetic
atgccgctggggactctctg

SEQ ID NO: 35687 - DNA, 24 bp, Artificial Sequence
  Synthetic
cttttaagcaaataagggggggac

SEQ ID NO: 35688 - DNA, 20 bp, Artificial Sequence
  Synthetic
attgcagctgtatcgtctgc

SEQ ID NO: 35689 - DNA, 25 bp, Artificial Sequence
  Synthetic
gatatgcacgttttcttttacgtct

SEQ ID NO: 35690 - DNA, 25 bp, Artificial Sequence
  Synthetic
gtcaaagaatttgttcttgcagcta

SEQ ID NO: 35691 - DNA, 20 bp, Artificial Sequence
  Synthetic
attggccaaagaccctgtga

SEQ ID NO: 35692 - DNA, 25 bp, Artificial Sequence
  Synthetic
cctttaaagaaaagccaaaggtgtt

SEQ ID NO: 35693 - DNA, 20 bp, Artificial Sequence
  Synthetic
aactcctcctcctcgtcctc

SEQ ID NO: 35694 - DNA, 22 bp, Artificial Sequence
  Synthetic
caaagacactgtttgcagacga

SEQ ID NO: 35695 - DNA, 20 bp, Artificial Sequence
  Synthetic
aaagcagtagccacgcttct

SEQ ID NO: 35696 - DNA, 25 bp, Artificial Sequence
  Synthetic
attcatgtaagacactactttgcct

SEQ ID NO: 35697 - DNA, 21 bp, Artificial Sequence
  Synthetic
cgctctctcagcttctccatc

SEQ ID NO: 35698 - DNA, 22 bp, Artificial Sequence
  Synthetic
tcccattctccagtaactgaca

SEQ ID NO: 35699 - DNA, 25 bp, Artificial Sequence
  Synthetic
ctgctggatcaacagtatctatagg

SEQ ID NO: 35700 - DNA, 22 bp, Artificial Sequence
  Synthetic
acaccttcaaagctactcctgg

SEQ ID NO: 35701 - DNA, 20 bp, Artificial Sequence
  Synthetic
tcgggccacttacaggtaga

SEQ ID NO: 35702 - DNA, 20 bp, Artificial Sequence
  Synthetic
cacagccagtaacgaaagcg

SEQ ID NO: 35703 - DNA, 20 bp, Artificial Sequence
  Synthetic
cgtaaggcgacagggcgacc

SEQ ID NO: 35704 - DNA, 20 bp, Artificial Sequence
  Synthetic
cgactcgtggtttggcgtgt

SEQ ID NO: 35705 - DNA, 19 bp, Artificial Sequence
  Synthetic
ttacgcccggcaacctgcg

SEQ ID NO: 35706 - DNA, 21 bp, Artificial Sequence
  Synthetic
gggaccaacacggcttcatgt

SEQ ID NO: 35707 - DNA, 20 bp, Artificial Sequence
  Synthetic
ctgcgaggtgcacagcaaac

SEQ ID NO: 35708 - DNA, 21 bp, Artificial Sequence
  Synthetic
gagggggagttcgtcgtgttc

SEQ ID NO: 35709 - DNA, 20 bp, Artificial Sequence
  Synthetic
tcgagcaccagaaactgcgg

SEQ ID NO: 35710 - DNA, 21 bp, Artificial Sequence
  Synthetic
gctcaaagtccaggaggtccc

SEQ ID NO: 35711 - DNA, 19 bp, Artificial Sequence
  Synthetic
tggggcgaactgtttggcg

SEQ ID NO: 35712 - DNA, 19 bp, Artificial Sequence
  Synthetic
ccccccactacgaccgcta

SEQ ID NO: 35713 - DNA, 21 bp, Artificial Sequence
  Synthetic
tgttgcttcactcgctcaccc

SEQ ID NO: 35714 - DNA, 18 bp, Artificial Sequence
  Synthetic
gctgcgggaagcgatcca

SEQ ID NO: 35715 - DNA, 19 bp, Artificial Sequence
  Synthetic
ggctgatgcgatgggccag

SEQ ID NO: 35716 - DNA, 19 bp, Artificial Sequence
  Synthetic
tcagcacgccaccgacacc

SEQ ID NO: 35717 - DNA, 22 bp, Artificial Sequence
  Synthetic
agcttaagcctctcctggtgct

SEQ ID NO: 35718 - DNA, 18 bp, Artificial Sequence
  Synthetic
tgcggaccaggaggagca

SEQ ID NO: 35719 - DNA, 21 bp, Artificial Sequence
  Synthetic
ccacttggaattggaggcgcg

SEQ ID NO: 35720 - DNA, 20 bp, Artificial Sequence
  Synthetic
cgcgccctcttctgcgagat

SEQ ID NO: 35721 - DNA, 20 bp, Artificial Sequence
  Synthetic
cttggccaacgaggtccagt

SEQ ID NO: 35722 - DNA, 20 bp, Artificial Sequence
  Synthetic
cctggcccccgatgatctcc

SEQ ID NO: 35723 - DNA, 19 bp, Artificial Sequence
  Synthetic
tcgtcgcctggctgaccca

SEQ ID NO: 35724 - DNA, 19 bp, Artificial Sequence
  Synthetic
gcatccgggacctgaaccc

SEQ ID NO: 35725 - DNA, 19 bp, Artificial Sequence
  Synthetic
tgttctcggagcgcgcgtc

SEQ ID NO: 35726 - DNA, 22 bp, Artificial Sequence
  Synthetic
gctactggaacaacacgcggtg

SEQ ID NO: 35727 - DNA, 18 bp, Artificial Sequence
  Synthetic
ttgtcggtggcgtgcgtg

SEQ ID NO: 35728 - DNA, 20 bp, Artificial Sequence
  Synthetic
gacgtaacacggcccagagg

SEQ ID NO: 35729 - DNA, 19 bp, Artificial Sequence
  Synthetic
gcctcgaccctgacgcgtt

SEQ ID NO: 35730 - DNA, 19 bp, Artificial Sequence
  Synthetic
ttcgtgaacgccgcccacg

SEQ ID NO: 35731 - DNA, 20 bp, Artificial Sequence
  Synthetic
cgagcggcttgacctggcta

SEQ ID NO: 35732 - DNA, 19 bp, Artificial Sequence
  Synthetic
tcttcggccagcgccttgt

SEQ ID NO: 35733 - DNA, 20 bp, Artificial Sequence
  Synthetic
ggggtttggtcttggtggcc

SEQ ID NO: 35734 - DNA, 22 bp, Artificial Sequence
  Synthetic
cgggaatcggcgactatgaagc

SEQ ID NO: 35735 - DNA, 19 bp, Artificial Sequence
  Synthetic
aagtcggcactgcgggtgg

SEQ ID NO: 35736 - DNA, 22 bp, Artificial Sequence
  Synthetic
gatacggtacatggccctggtg

SEQ ID NO: 35737 - DNA, 19 bp, Artificial Sequence
  Synthetic
gccgcagtactacctggcc

SEQ ID NO: 35738 - DNA, 19 bp, Artificial Sequence
  Synthetic
cggcggctccttccgattc

SEQ ID NO: 35739 - DNA, 19 bp, Artificial Sequence
  Synthetic
gtccaaccagccgaacccg

SEQ ID NO: 35740 - DNA, 20 bp, Artificial Sequence
  Synthetic
cggcgcgtgatggacatgtt

SEQ ID NO: 35741 - DNA, 19 bp, Artificial Sequence
  Synthetic
gggcggctggagaccatca

SEQ ID NO: 35742 - DNA, 20 bp, Artificial Sequence
  Synthetic
gtgcaccgcatacccgtgta

SEQ ID NO: 35743 - DNA, 21 bp, Artificial Sequence
  Synthetic
cctgggatacgtgtacgctcg

SEQ ID NO: 35744 - DNA, 18 bp, Artificial Sequence
  Synthetic
acacgtcggtgcgctcca

SEQ ID NO: 35745 - DNA, 22 bp, Artificial Sequence
  Synthetic
tgtacgtcatctttcccggcac

SEQ ID NO: 35746 - DNA, 20 bp, Artificial Sequence
  Synthetic
gctcctgacggccagtcacg

SEQ ID NO: 35747 - DNA, 19 bp, Artificial Sequence
  Synthetic
agccactggacgagctggc

SEQ ID NO: 35748 - DNA, 21 bp, Artificial Sequence
  Synthetic
cccctgtcgtacacgctccta

SEQ ID NO: 35749 - DNA, 19 bp, Artificial Sequence
  Synthetic
agttcgcgcccgacctgga

SEQ ID NO: 35750 - DNA, 19 bp, Artificial Sequence
  Synthetic
tgcgtgtgttggcctgggc

SEQ ID NO: 35751 - DNA, 19 bp, Artificial Sequence
  Synthetic
gggtgacgctgttctcggc

SEQ ID NO: 35752 - DNA, 20 bp, Artificial Sequence
  Synthetic
gggttgtgttggccgactgg

SEQ ID NO: 35753 - DNA, 22 bp, Artificial Sequence
  Synthetic
cgggccagtttcagtgaaaccc

SEQ ID NO: 35754 - DNA, 20 bp, Artificial Sequence
  Synthetic
tgacgttgctggtgatggcc

SEQ ID NO: 35755 - DNA, 22 bp, Artificial Sequence
  Synthetic
ggtgtcgtagatgtagtggcgg

SEQ ID NO: 35756 - DNA, 19 bp, Artificial Sequence
  Synthetic
accgccttcccccatcacc

SEQ ID NO: 35757 - DNA, 22 bp, Artificial Sequence
  Synthetic
cctgctccccaaagatcgtgtt

SEQ ID NO: 35758 - DNA, 22 bp, Artificial Sequence
  Synthetic
ggtcgcgttaaggaccttggtg

SEQ ID NO: 35759 - DNA, 20 bp, Artificial Sequence
  Synthetic
ccatccggggtttgggtgtt

SEQ ID NO: 35760 - DNA, 19 bp, Artificial Sequence
  Synthetic
tacgcgtgcgtcctccgag

SEQ ID NO: 35761 - DNA, 20 bp, Artificial Sequence
  Synthetic
cgatgtcagcctgggggacg

SEQ ID NO: 35762 - DNA, 19 bp, Artificial Sequence
  Synthetic
gctgcccacttccccccat

SEQ ID NO: 35763 - DNA, 20 bp, Artificial Sequence
  Synthetic
tcgaggcccccacgatcgac

SEQ ID NO: 35764 - DNA, 19 bp, Artificial Sequence
  Synthetic
acgaatgtccgcgccgtgg

SEQ ID NO: 35765 - DNA, 22 bp, Artificial Sequence
  Synthetic
cgccgttatcaagacgacggtt

SEQ ID NO: 35766 - DNA, 22 bp, Artificial Sequence
  Synthetic
cgccagatacaggaaccaccct

SEQ ID NO: 35767 - DNA, 20 bp, Artificial Sequence
  Synthetic
ggggggtcctcgtccagatc

SEQ ID NO: 35768 - DNA, 20 bp, Artificial Sequence
  Synthetic
agtaagggggggccacgtgg

SEQ ID NO: 35769 - DNA, 20 bp, Artificial Sequence
  Synthetic
cccgacgaccagcgacgaac

SEQ ID NO: 35770 - DNA, 19 bp, Artificial Sequence
  Synthetic
caccgtactctgctgggcc

SEQ ID NO: 35771 - DNA, 19 bp, Artificial Sequence
  Synthetic
aaggacctagcgcgcggga

SEQ ID NO: 35772 - DNA, 20 bp, Artificial Sequence
  Synthetic
ggcagtttgacgacccaccc

SEQ ID NO: 35773 - DNA, 22 bp, Artificial Sequence
  Synthetic
gctggggtataaaaggggccat

SEQ ID NO: 35774 - DNA, 20 bp, Artificial Sequence
  Synthetic
ccaatctcatcccggctgcg

SEQ ID NO: 35775 - DNA, 22 bp, Artificial Sequence
  Synthetic
gggtaatctggatggctgctgt

SEQ ID NO: 35776 - DNA, 19 bp, Artificial Sequence
  Synthetic
gggggccgagaacaaggac

SEQ ID NO: 35777 - DNA, 20 bp, Artificial Sequence
  Synthetic
ccggtctgggtcatgttggg

SEQ ID NO: 35778 - DNA, 22 bp, Artificial Sequence
  Synthetic
ccccacgaggcttcccaaaagc

SEQ ID NO: 35779 - DNA, 21 bp, Artificial Sequence
  Synthetic
taccagactgaccgtggggcc

SEQ ID NO: 35780 - DNA, 20 bp, Artificial Sequence
  Synthetic
cgcgtaacacgtacaccccg

SEQ ID NO: 35781 - DNA, 22 bp, Artificial Sequence
  Synthetic
cggaccccgtgaataaccagac

SEQ ID NO: 35782 - DNA, 20 bp, Artificial Sequence
  Synthetic
gccgtgggataaagcggcac

SEQ ID NO: 35783 - DNA, 19 bp, Artificial Sequence
  Synthetic
atccgcccgacagaacggc

SEQ ID NO: 35784 - DNA, 25 bp, Artificial Sequence
  Synthetic
gtgataattaggggcattcaattcg

SEQ ID NO: 35785 - DNA, 22 bp, Artificial Sequence
  Synthetic
acaggtgcaatttccgtccgaa

SEQ ID NO: 35786 - DNA, 23 bp, Artificial Sequence
  Synthetic
agagagtaaccccatctctttgt

SEQ ID NO: 35787 - DNA, 20 bp, Artificial Sequence
  Synthetic
aagcgaagtgcacacggtcc

SEQ ID NO: 35788 - DNA, 21 bp, Artificial Sequence
  Synthetic
agtgcagtatggtgaggtgaa

SEQ ID NO: 35789 - DNA, 22 bp, Artificial Sequence
  Synthetic
ccatgttacagccaaaggtgat

SEQ ID NO: 35790 - DNA, 23 bp, Artificial Sequence
  Synthetic
gcctgtaagcacttcttcctctt

SEQ ID NO: 35791 - DNA, 21 bp, Artificial Sequence
  Synthetic
gggttcaaccgttgatttgct

SEQ ID NO: 35792 - DNA, 20 bp, Artificial Sequence
  Synthetic
tacattcccgcgttggtctc

SEQ ID NO: 35793 - DNA, 23 bp, Artificial Sequence
  Synthetic
agagttctgacaaacccactgta

SEQ ID NO: 35794 - DNA, 23 bp, Artificial Sequence
  Synthetic
gtgctttcatctgggtcttcaat

SEQ ID NO: 35795 - DNA, 20 bp, Artificial Sequence
  Synthetic
caacagttgtcgcaacagct

SEQ ID NO: 35796 - DNA, 25 bp, Artificial Sequence
  Synthetic
gattctgtactgtcatcaaacagct

SEQ ID NO: 35797 - DNA, 22 bp, Artificial Sequence
  Synthetic
ttttcagcttcatcctgctcaa

SEQ ID NO: 35798 - DNA, 22 bp, Artificial Sequence
  Synthetic
gcgtagttcttcccggagtgag

SEQ ID NO: 35799 - DNA, 21 bp, Artificial Sequence
  Synthetic
tgagccagcatcaattacagc

SEQ ID NO: 35800 - DNA, 22 bp, Artificial Sequence
  Synthetic
gcacgtcttgatcaaactgcaa

SEQ ID NO: 35801 - DNA, 21 bp, Artificial Sequence
  Synthetic
cgtattcgtccgtgctgagaa

SEQ ID NO: 35802 - DNA, 20 bp, Artificial Sequence
  Synthetic
ctacccctaacggtcctcca

SEQ ID NO: 35803 - DNA, 21 bp, Artificial Sequence
  Synthetic
tcattgttgtcttctgcagca

SEQ ID NO: 35804 - DNA, 20 bp, Artificial Sequence
  Synthetic
aacggttgctggctttaggt

SEQ ID NO: 35805 - DNA, 20 bp, Artificial Sequence
  Synthetic
tatgcactgccgataaccgc

SEQ ID NO: 35806 - DNA, 21 bp, Artificial Sequence
  Synthetic
cgtcttctgggtgtggtgtcg

SEQ ID NO: 35807 - DNA, 20 bp, Artificial Sequence
  Synthetic
tacctggacctgcatctggt

SEQ ID NO: 35808 - DNA, 24 bp, Artificial Sequence
  Synthetic
aagctttgtatggatctgtgtctt

SEQ ID NO: 35809 - DNA, 22 bp, Artificial Sequence
  Synthetic
ccttggttacagccccttctgg

SEQ ID NO: 35810 - DNA, 23 bp, Artificial Sequence
  Synthetic
aattcgtctgcttttttccctct

SEQ ID NO: 35811 - DNA, 22 bp, Artificial Sequence
  Synthetic
ctttctttgttgggctgctgca

SEQ ID NO: 35812 - DNA, 24 bp, Artificial Sequence
  Synthetic
atttctgccaaagatgttgattgg

SEQ ID NO: 35813 - DNA, 23 bp, Artificial Sequence
  Synthetic
gggtgtggaattcctagctgaat

SEQ ID NO: 35814 - DNA, 21 bp, Artificial Sequence
  Synthetic
gctgcaggaccactttgtcat

SEQ ID NO: 35815 - DNA, 21 bp, Artificial Sequence
  Synthetic
gctctgcttctgctagttctg

SEQ ID NO: 35816 - DNA, 22 bp, Artificial Sequence
  Synthetic
atgttaacctgaccagtggtgg

SEQ ID NO: 35817 - DNA, 22 bp, Artificial Sequence
  Synthetic
ctcctatgcctttatgggctgg

SEQ ID NO: 35818 - DNA, 22 bp, Artificial Sequence
  Synthetic
tgctgtctgccttcctgattcc

SEQ ID NO: 35819 - DNA, 20 bp, Artificial Sequence
  Synthetic
agtctttctgctggggtcat

SEQ ID NO: 35820 - DNA, 20 bp, Artificial Sequence
  Synthetic
ctgcatgagaggagagccat

SEQ ID NO: 35821 - DNA, 21 bp, Artificial Sequence
  Synthetic
gcaattagcaagcggggatca

SEQ ID NO: 35822 - DNA, 23 bp, Artificial Sequence
  Synthetic
ggcgaaggagtcttagttttcct

SEQ ID NO: 35823 - DNA, 22 bp, Artificial Sequence
  Synthetic
tgccagacatcttctactgctt

SEQ ID NO: 35824 - DNA, 20 bp, Artificial Sequence
  Synthetic
aatagttgcgccgtgtttgg

SEQ ID NO: 35825 - DNA, 20 bp, Artificial Sequence
  Synthetic
tctgggagatcagtcggcgg

SEQ ID NO: 35826 - DNA, 21 bp, Artificial Sequence
  Synthetic
tctgttgctgggtttctccat

SEQ ID NO: 35827 - DNA, 20 bp, Artificial Sequence
  Synthetic
ttttgcggagggtgtgttcc

SEQ ID NO: 35828 - DNA, 21 bp, Artificial Sequence
  Synthetic
ggataacccaagccattgtgt

SEQ ID NO: 35829 - DNA, 20 bp, Artificial Sequence
  Synthetic
tgccgctttgttttagccct

SEQ ID NO: 35830 - DNA, 20 bp, Artificial Sequence
  Synthetic
ttccattggccagcttcaag

SEQ ID NO: 35831 - DNA, 21 bp, Artificial Sequence
  Synthetic
agctcgagtatttcgtcgtga

SEQ ID NO: 35832 - DNA, 21 bp, Artificial Sequence
  Synthetic
tgtctaggcaagtctggttgc

SEQ ID NO: 35833 - DNA, 24 bp, Artificial Sequence
  Synthetic
cttcttgtatagcttaactgccct

SEQ ID NO: 35834 - DNA, 20 bp, Artificial Sequence
  Synthetic
acttgcggcaacaacaagag

SEQ ID NO: 35835 - DNA, 21 bp, Artificial Sequence
  Synthetic
ctgatagctggtaacgaggct

SEQ ID NO: 35836 - DNA, 20 bp, Artificial Sequence
  Synthetic
ggtcctcagcatccacttca

SEQ ID NO: 35837 - DNA, 20 bp, Artificial Sequence
  Synthetic
atgccacacatcatgctggt

SEQ ID NO: 35838 - DNA, 20 bp, Artificial Sequence
  Synthetic
aaatcctcagctgaagcgcg

SEQ ID NO: 35839 - DNA, 22 bp, Artificial Sequence
  Synthetic
tctaacaggtatggtgtcaggg

SEQ ID NO: 35840 - DNA, 20 bp, Artificial Sequence
  Synthetic
tagggggtggtattggctga

SEQ ID NO: 35841 - DNA, 25 bp, Artificial Sequence
  Synthetic
actctaaattgatgtgctgaaacct

SEQ ID NO: 35842 - DNA, 20 bp, Artificial Sequence
  Synthetic
gatgtgtgcaaggacgtcag

SEQ ID NO: 35843 - DNA, 22 bp, Artificial Sequence
  Synthetic
acgttttctacctaaaacgcca

SEQ ID NO: 35844 - DNA, 23 bp, Artificial Sequence
  Synthetic
gcatggcaaacattttccttcca

SEQ ID NO: 35845 - DNA, 22 bp, Artificial Sequence
  Synthetic
cgtccgatgacagtgactcttc

SEQ ID NO: 35846 - DNA, 20 bp, Artificial Sequence
  Synthetic
tgctgctgctggatctttga

SEQ ID NO: 35847 - DNA, 25 bp, Artificial Sequence
  Synthetic
tgttagtttagcaatccaatcaggt

SEQ ID NO: 35848 - DNA, 22 bp, Artificial Sequence
  Synthetic
tctaaacgttctctcaggtcgt

SEQ ID NO: 35849 - DNA, 20 bp, Artificial Sequence
  Synthetic
tactggcccccctgttgacc

SEQ ID NO: 35850 - DNA, 25 bp, Artificial Sequence
  Synthetic
acaagatctgtaaatgtcttgcaca

SEQ ID NO: 35851 - DNA, 23 bp, Artificial Sequence
  Synthetic
tgaggaccaataacgtctactgt

SEQ ID NO: 35852 - DNA, 25 bp, Artificial Sequence
  Synthetic
gagatggcacgattagataaaggag

SEQ ID NO: 35853 - DNA, 22 bp, Artificial Sequence
  Synthetic
gctattgagggcatttccacat

SEQ ID NO: 35854 - DNA, 25 bp, Artificial Sequence
  Synthetic
gttcccatacacctctttagtcatt

SEQ ID NO: 35855 - DNA, 25 bp, Artificial Sequence
  Synthetic
gggtccattgcattaatatgagcta

SEQ ID NO: 35856 - DNA, 22 bp, Artificial Sequence
  Synthetic
gccatatgatccacagtggttt

SEQ ID NO: 35857 - DNA, 22 bp, Artificial Sequence
  Synthetic
gttacagccagaggtgatacca

SEQ ID NO: 35858 - DNA, 22 bp, Artificial Sequence
  Synthetic
tgatgtcaatatcctggctcca

SEQ ID NO: 35859 - DNA, 22 bp, Artificial Sequence
  Synthetic
cttcaatgtttggaggttgcct

SEQ ID NO: 35860 - DNA, 22 bp, Artificial Sequence
  Synthetic
ggagtacatttcctcgctgatc

SEQ ID NO: 35861 - DNA, 20 bp, Artificial Sequence
  Synthetic
gtcctctgtaagcgcacctg

SEQ ID NO: 35862 - DNA, 21 bp, Artificial Sequence
  Synthetic
tgtccgaggcagattttgtct

SEQ ID NO: 35863 - DNA, 21 bp, Artificial Sequence
  Synthetic
gcttggtttgctctgcagttg

SEQ ID NO: 35864 - DNA, 21 bp, Artificial Sequence
  Synthetic
ccccttcacaattggcatcaa

SEQ ID NO: 35865 - DNA, 23 bp, Artificial Sequence
  Synthetic
gccttcccatccattttcaatga

SEQ ID NO: 35866 - DNA, 24 bp, Artificial Sequence
  Synthetic
tttgttcttccaacagtagtcctg

SEQ ID NO: 35867 - DNA, 22 bp, Artificial Sequence
  Synthetic
aggttggtcatcgtcttcatca

SEQ ID NO: 35868 - DNA, 25 bp, Artificial Sequence
  Synthetic
ttagcattaacaataccattcccca

SEQ ID NO: 35869 - DNA, 23 bp, Artificial Sequence
  Synthetic
cgcatgccacatttcataacttg

SEQ ID NO: 35870 - DNA, 22 bp, Artificial Sequence
  Synthetic
cgtctgggtcgcagttactcct

SEQ ID NO: 35871 - DNA, 25 bp, Artificial Sequence
  Synthetic
cacatcgccattttctaaagtacaa

SEQ ID NO: 35872 - DNA, 20 bp, Artificial Sequence
  Synthetic
attccaaaggtgggcagtcg

SEQ ID NO: 35873 - DNA, 24 bp, Artificial Sequence
  Synthetic
tgattaacctgggtttgtttagcc

SEQ ID NO: 35874 - DNA, 25 bp, Artificial Sequence
  Synthetic
aagtataaccttaccatctgacagc

SEQ ID NO: 35875 - DNA, 22 bp, Artificial Sequence
  Synthetic
ggtgttgaagggggattgggtc

SEQ ID NO: 35876 - DNA, 20 bp, Artificial Sequence
  Synthetic
tcgatggctttgcccaactt

SEQ ID NO: 35877 - DNA, 22 bp, Artificial Sequence
  Synthetic
gcagttgtaacttcaatggggt

SEQ ID NO: 35878 - DNA, 20 bp, Artificial Sequence
  Synthetic
gtcgaaggggctaagccttt

SEQ ID NO: 35879 - DNA, 23 bp, Artificial Sequence
  Synthetic
cctaatggtgtctgatcaagctc

SEQ ID NO: 35880 - DNA, 20 bp, Artificial Sequence
  Synthetic
gctgcaacaacgagaggatc

SEQ ID NO: 35881 - DNA, 23 bp, Artificial Sequence
  Synthetic
taataaggacaccaggaaccctg

SEQ ID NO: 35882 - DNA, 24 bp, Artificial Sequence
  Synthetic
acatgatggatacccaaatgtgtg

SEQ ID NO: 35883 - DNA, 20 bp, Artificial Sequence
  Synthetic
ctgccactcccattgcatag

SEQ ID NO: 35884 - DNA, 22 bp, Artificial Sequence
  Synthetic
catcgctttccatcaactctct

SEQ ID NO: 35885 - DNA, 20 bp, Artificial Sequence
  Synthetic
ctgagctgcttcttctccca

SEQ ID NO: 35886 - DNA, 20 bp, Artificial Sequence
  Synthetic
cccctttgtgtcggtgttga

SEQ ID NO: 35887 - DNA, 22 bp, Artificial Sequence
  Synthetic
ccttgtgtctccataagtgggt

SEQ ID NO: 35888 - DNA, 23 bp, Artificial Sequence
  Synthetic
gaattcgccaggtaaagaaggtt

SEQ ID NO: 35889 - DNA, 23 bp, Artificial Sequence
  Synthetic
tgtattgcttgatctgttggtca

SEQ ID NO: 35890 - DNA, 21 bp, Artificial Sequence
  Synthetic
ccgattccgttgcatgtacaa

SEQ ID NO: 35891 - DNA, 25 bp, Artificial Sequence
  Synthetic
gcctttgtaatatatccctggtcca

SEQ ID NO: 35892 - DNA, 21 bp, Artificial Sequence
  Synthetic
atgaattcgtgtgcatggtca

SEQ ID NO: 35893 - DNA, 23 bp, Artificial Sequence
  Synthetic
gctttcagagcttgaggaagaat

SEQ ID NO: 35894 - DNA, 21 bp, Artificial Sequence
  Synthetic
cttttgtcgcaatgctatggc

SEQ ID NO: 35895 - DNA, 20 bp, Artificial Sequence
  Synthetic
tgtgaggcttccatccaaga

SEQ ID NO: 35896 - DNA, 24 bp, Artificial Sequence
  Synthetic
cggccatagcaaaaatttcgttta

SEQ ID NO: 35897 - DNA, 25 bp, Artificial Sequence
  Synthetic
tgataatttcttcgttctcaccgaa

SEQ ID NO: 35898 - DNA, 21 bp, Artificial Sequence
  Synthetic
aaaggcctctaggatgttgga

SEQ ID NO: 35899 - DNA, 22 bp, Artificial Sequence
  Synthetic
gctgtgacaaacacgtcaaacg

SEQ ID NO: 35900 - DNA, 24 bp, Artificial Sequence
  Synthetic
ttaacttcttcagtggaaccaaca

SEQ ID NO: 35901 - DNA, 25 bp, Artificial Sequence
  Synthetic
attgtctgcaaaaatcatcccattt

SEQ ID NO: 35902 - DNA, 22 bp, Artificial Sequence
  Synthetic
caaaatgccaagccaacgttta

SEQ ID NO: 35903 - DNA, 24 bp, Artificial Sequence
  Synthetic
ccaattgccttttcacaaacatct

SEQ ID NO: 35904 - DNA, 20 bp, Artificial Sequence
  Synthetic
gctcccgattcttcaagcct

SEQ ID NO: 35905 - DNA, 25 bp, Artificial Sequence
  Synthetic
cttccttaggtgttgtatcaactgt

SEQ ID NO: 35906 - DNA, 20 bp, Artificial Sequence
  Synthetic
ccttttcggatggcacaaca

SEQ ID NO: 35907 - DNA, 24 bp, Artificial Sequence
  Synthetic
tgtgttaagatcacttggtactgc

SEQ ID NO: 35908 - DNA, 24 bp, Artificial Sequence
  Synthetic
acaataaccaacttgcacaccatc

SEQ ID NO: 35909 - DNA, 20 bp, Artificial Sequence
  Synthetic
aacaacacccgtcctttgtg

SEQ ID NO: 35910 - DNA, 20 bp, Artificial Sequence
  Synthetic
cacatcttgcagcccaatga

SEQ ID NO: 35911 - DNA, 22 bp, Artificial Sequence
  Synthetic
aacacgcaatacaatctgggtt

SEQ ID NO: 35912 - DNA, 21 bp, Artificial Sequence
  Synthetic
agacaggcctaaagctctctt

SEQ ID NO: 35913 - DNA, 25 bp, Artificial Sequence
  Synthetic
acaagaaagtcaaacccttagcttt

SEQ ID NO: 35914 - DNA, 24 bp, Artificial Sequence
  Synthetic
tccaactacaataggacagctttg

SEQ ID NO: 35915 - DNA, 20 bp, Artificial Sequence
  Synthetic
ttggtggcaatagtacgcac

SEQ ID NO: 35916 - DNA, 21 bp, Artificial Sequence
  Synthetic
cagtcggaggtgtgtacaaga

SEQ ID NO: 35917 - DNA, 21 bp, Artificial Sequence
  Synthetic
cagcccagaacatgacaaaga

SEQ ID NO: 35918 - DNA, 20 bp, Artificial Sequence
  Synthetic
gcaaagcgccaagtatgcaa

SEQ ID NO: 35919 - DNA, 25 bp, Artificial Sequence
  Synthetic
cacttacagaacctgttaatccagt

SEQ ID NO: 35920 - DNA, 23 bp, Artificial Sequence
  Synthetic
gattccctgtcaaactcagcttt

SEQ ID NO: 35921 - DNA, 21 bp, Artificial Sequence
  Synthetic
ccaaacaacaccagcgtagtg

SEQ ID NO: 35922 - DNA, 23 bp, Artificial Sequence
  Synthetic
ggcttcgtagtcacatatgcata

SEQ ID NO: 35923 - DNA, 20 bp, Artificial Sequence
  Synthetic
tgcgccttgtttaacagcat

SEQ ID NO: 35924 - DNA, 23 bp, Artificial Sequence
  Synthetic
tcaaaactttggatagcagtccg

SEQ ID NO: 35925 - DNA, 23 bp, Artificial Sequence
  Synthetic
aagcacaaatccatcatggtgta

SEQ ID NO: 35926 - DNA, 23 bp, Artificial Sequence
  Synthetic
ggaggacacaatacaaagtcacc

SEQ ID NO: 35927 - DNA, 20 bp, Artificial Sequence
  Synthetic
gaggtccaaaagccgtgttt

SEQ ID NO: 35928 - DNA, 21 bp, Artificial Sequence
  Synthetic
tggccaggttttactgtttgg

SEQ ID NO: 35929 - DNA, 20 bp, Artificial Sequence
  Synthetic
gtgcgcgttccttaccagat

SEQ ID NO: 35930 - DNA, 24 bp, Artificial Sequence
  Synthetic
agcacacaacactatcatcagaaa

SEQ ID NO: 35931 - DNA, 20 bp, Artificial Sequence
  Synthetic
ccagctgaacacagtgggaa

SEQ ID NO: 35932 - DNA, 23 bp, Artificial Sequence
  Synthetic
aactcaccaacttgaaacttgga

SEQ ID NO: 35933 - DNA, 25 bp, Artificial Sequence
  Synthetic
tgatatacgctggttaatcacagac

SEQ ID NO: 35934 - DNA, 24 bp, Artificial Sequence
  Synthetic
gagataaacacagccttgctccat

SEQ ID NO: 35935 - DNA, 25 bp, Artificial Sequence
  Synthetic
gacttggtggtaaatcaatagggtt

SEQ ID NO: 35936 - DNA, 21 bp, Artificial Sequence
  Synthetic
gtgcaccttccacatccattc

SEQ ID NO: 35937 - DNA, 20 bp, Artificial Sequence
  Synthetic
tggtcaactctaaaccgcca

SEQ ID NO: 35938 - DNA, 25 bp, Artificial Sequence
  Synthetic
catagggtaggtaattgaccaatcc

SEQ ID NO: 35939 - DNA, 23 bp, Artificial Sequence
  Synthetic
gtagatcgtgtacgtgtgtcaaa

SEQ ID NO: 35940 - DNA, 22 bp, Artificial Sequence
  Synthetic
caaacgtggtaggaacccaaat

SEQ ID NO: 35941 - DNA, 23 bp, Artificial Sequence
  Synthetic
gatcaacaggtttgccatctttg

SEQ ID NO: 35942 - DNA, 25 bp, Artificial Sequence
  Synthetic
acaaaatcatccaacaacaaatcca

SEQ ID NO: 35943 - DNA, 25 bp, Artificial Sequence
  Synthetic
catctataaaaggtccttgtgcgaa

SEQ ID NO: 35944 - DNA, 23 bp, Artificial Sequence
  Synthetic
agcccatttgtagtttgacaacc

SEQ ID NO: 35945 - DNA, 21 bp, Artificial Sequence
  Synthetic
ggtgtcattgctaacgcgaat

SEQ ID NO: 35946 - DNA, 24 bp, Artificial Sequence
  Synthetic
aaacgctttcttgtcaaaagtgag

SEQ ID NO: 35947 - DNA, 21 bp, Artificial Sequence
  Synthetic
cggctgatgttagacctccta

SEQ ID NO: 35948 - DNA, 21 bp, Artificial Sequence
  Synthetic
gtcgcaacacataaccgtttg

SEQ ID NO: 35949 - DNA, 22 bp, Artificial Sequence
  Synthetic
tgttcgacaactaggtctggaa

SEQ ID NO: 35950 - DNA, 23 bp, Artificial Sequence
  Synthetic
tgcttgagaccaatacagcaatg

SEQ ID NO: 35951 - DNA, 20 bp, Artificial Sequence
  Synthetic
gtacgagtggccaaagaagc

SEQ ID NO: 35952 - DNA, 24 bp, Artificial Sequence
  Synthetic
gatgtcatcctgactgttatggtt

SEQ ID NO: 35953 - DNA, 25 bp, Artificial Sequence
  Synthetic
acatcatcattaggctgtcttttcc

SEQ ID NO: 35954 - DNA, 20 bp, Artificial Sequence
  Synthetic
gtcaagccaaagcaagggat

SEQ ID NO: 35955 - DNA, 24 bp, Artificial Sequence
  Synthetic
ccatttttgcacagtccgatacat

SEQ ID NO: 35956 - DNA, 24 bp, Artificial Sequence
  Synthetic
gtacatcatctggacatgtacctg

SEQ ID NO: 35957 - DNA, 20 bp, Artificial Sequence
  Synthetic
caggggggccaatgggatca

SEQ ID NO: 35958 - DNA, 20 bp, Artificial Sequence
  Synthetic
taacttgctgcacccgcctg

SEQ ID NO: 35959 - DNA, 22 bp, Artificial Sequence
  Synthetic
acaattaaacaaggtcccgtcg

SEQ ID NO: 35960 - DNA, 21 bp, Artificial Sequence
  Synthetic
ggcataaacctgttcacgctt

SEQ ID NO: 35961 - DNA, 20 bp, Artificial Sequence
  Synthetic
gcccaggagtcgcaggaatt

SEQ ID NO: 35962 - DNA, 22 bp, Artificial Sequence
  Synthetic
cgagagccagggcaactcgtaa

SEQ ID NO: 35963 - DNA, 20 bp, Artificial Sequence
  Synthetic
cattgccagcctggttccct

SEQ ID NO: 35964 - DNA, 19 bp, Artificial Sequence
  Synthetic
tgctcgcccactcgaccga

SEQ ID NO: 35965 - DNA, 21 bp, Artificial Sequence
  Synthetic
cagcatgacagagctggtggt

SEQ ID NO: 35966 - DNA, 21 bp, Artificial Sequence
  Synthetic
ccaggaaaccctgtcacagaa

SEQ ID NO: 35967 - DNA, 21 bp, Artificial Sequence
  Synthetic
tatggggagccaggcccaagg

SEQ ID NO: 35968 - DNA, 20 bp, Artificial Sequence
  Synthetic
cggtctcccctaggcttgga

SEQ ID NO: 35969 - DNA, 22 bp, Artificial Sequence
  Synthetic
cctctggtaggactgggcgacc

SEQ ID NO: 35970 - DNA, 21 bp, Artificial Sequence
  Synthetic
cttaggagctgtccgagggga

SEQ ID NO: 35971 - DNA, 20 bp, Artificial Sequence
  Synthetic
gtggcctagcaacgcgaacc

SEQ ID NO: 35972 - DNA, 20 bp, Artificial Sequence
  Synthetic
tgagacgggtgggtgtgtgt

SEQ ID NO: 35973 - DNA, 20 bp, Artificial Sequence
  Synthetic
gaagctccccaaggccatgg

SEQ ID NO: 35974 - DNA, 19 bp, Artificial Sequence
  Synthetic
ggctggctcccagtatgcc

SEQ ID NO: 35975 - DNA, 20 bp, Artificial Sequence
  Synthetic
ggcaaggagaccgtcgcaga

SEQ ID NO: 35976 - DNA, 20 bp, Artificial Sequence
  Synthetic
acccggctggttcacggata

SEQ ID NO: 35977 - DNA, 20 bp, Artificial Sequence
  Synthetic
gtgtacggcggacatcaggg

SEQ ID NO: 35978 - DNA, 19 bp, Artificial Sequence
  Synthetic
tgggggttctggcctcgtc

SEQ ID NO: 35979 - DNA, 18 bp, Artificial Sequence
  Synthetic
cgcatcctccccgccaaa

SEQ ID NO: 35980 - DNA, 22 bp, Artificial Sequence
  Synthetic
ggacctccagacgctaaagagc

SEQ ID NO: 35981 - DNA, 21 bp, Artificial Sequence
  Synthetic
cctctcggaggacatctcgcg

SEQ ID NO: 35982 - DNA, 19 bp, Artificial Sequence
  Synthetic
aatctggcccgcccttcgc

SEQ ID NO: 35983 - DNA, 20 bp, Artificial Sequence
  Synthetic
gagccccgtaaagatgcccg

SEQ ID NO: 35984 - DNA, 20 bp, Artificial Sequence
  Synthetic
ggacttgatggagacccgcc

SEQ ID NO: 35985 - DNA, 20 bp, Artificial Sequence
  Synthetic
gcaggtggccacagacttcc

SEQ ID NO: 35986 - DNA, 19 bp, Artificial Sequence
  Synthetic
cacgtcctgagccttggcc

SEQ ID NO: 35987 - DNA, 20 bp, Artificial Sequence
  Synthetic
tacacgtgggaccccgaccc

SEQ ID NO: 35988 - DNA, 21 bp, Artificial Sequence
  Synthetic
cgtggaactgcagcttcacct

SEQ ID NO: 35989 - DNA, 19 bp, Artificial Sequence
  Synthetic
tgtgggactggaagcgccg

SEQ ID NO: 35990 - DNA, 22 bp, Artificial Sequence
  Synthetic
ggccatgccgtgttgttcatgt

SEQ ID NO: 35991 - DNA, 19 bp, Artificial Sequence
  Synthetic
aaggtgcgggcctccaacg

SEQ ID NO: 35992 - DNA, 21 bp, Artificial Sequence
  Synthetic
ccgactgcggtgacagcagtt

SEQ ID NO: 35993 - DNA, 20 bp, Artificial Sequence
  Synthetic
ataaccgagcctctctgctg

SEQ ID NO: 35994 - DNA, 22 bp, Artificial Sequence
  Synthetic
aatctgaaggatgccacgaggg

SEQ ID NO: 35995 - DNA, 20 bp, Artificial Sequence
  Synthetic
cggaggtgactgctgggatg

SEQ ID NO: 35996 - DNA, 22 bp, Artificial Sequence
  Synthetic
ggaccaccaatgtgatcgtggt

SEQ ID NO: 35997 - DNA, 19 bp, Artificial Sequence
  Synthetic
tctacggacgccgccctag

SEQ ID NO: 35998 - DNA, 20 bp, Artificial Sequence
  Synthetic
gcggcggccacagtagtagg

SEQ ID NO: 35999 - DNA, 19 bp, Artificial Sequence
  Synthetic
atgatctcccccggtcgcg

SEQ ID NO: 36000 - DNA, 22 bp, Artificial Sequence
  Synthetic
tctatgcctcctgctacgccaa

SEQ ID NO: 36001 - DNA, 19 bp, Artificial Sequence
  Synthetic
ggcttcgggtccgagatgg

SEQ ID NO: 36002 - DNA, 20 bp, Artificial Sequence
  Synthetic
aatttgcaaagggcgtgacc

SEQ ID NO: 36003 - DNA, 19 bp, Artificial Sequence
  Synthetic
accttgagcaccgcggctg

SEQ ID NO: 36004 - DNA, 20 bp, Artificial Sequence
  Synthetic
tttgcagccccaaaggtggt

SEQ ID NO: 36005 - DNA, 20 bp, Artificial Sequence
  Synthetic
tggctcagcgaggaggtgtc

SEQ ID NO: 36006 - DNA, 22 bp, Artificial Sequence
  Synthetic
agctcttgaccttcctgggtga

SEQ ID NO: 36007 - DNA, 19 bp, Artificial Sequence
  Synthetic
cccgtgaatgaagcgggcc

SEQ ID NO: 36008 - DNA, 22 bp, Artificial Sequence
  Synthetic
aggatggacttggtgggagaca

SEQ ID NO: 36009 - DNA, 19 bp, Artificial Sequence
  Synthetic
gggcggctctctttggagc

SEQ ID NO: 36010 - DNA, 21 bp, Artificial Sequence
  Synthetic
ggccctagagattggggaggt

SEQ ID NO: 36011 - DNA, 22 bp, Artificial Sequence
  Synthetic
tctgtgcttctctcggcctaca

SEQ ID NO: 36012 - DNA, 19 bp, Artificial Sequence
  Synthetic
ggggacacgcgcagtgagt

SEQ ID NO: 36013 - DNA, 19 bp, Artificial Sequence
  Synthetic
ccctaaccgcctggtggtg

SEQ ID NO: 36014 - DNA, 22 bp, Artificial Sequence
  Synthetic
cctcacctggccgtctaccaga

SEQ ID NO: 36015 - DNA, 19 bp, Artificial Sequence
  Synthetic
tcctgctgacgctgggcac

SEQ ID NO: 36016 - DNA, 19 bp, Artificial Sequence
  Synthetic
cccgcatgcgcaaccactt

SEQ ID NO: 36017 - DNA, 19 bp, Artificial Sequence
  Synthetic
tgcccaaccacggcaaccc

SEQ ID NO: 36018 - DNA, 19 bp, Artificial Sequence
  Synthetic
aggtggccacactggggac

SEQ ID NO: 36019 - DNA, 19 bp, Artificial Sequence
  Synthetic
gcctcacctgaacccccct

SEQ ID NO: 36020 - DNA, 20 bp, Artificial Sequence
  Synthetic
tcgttttagggctgcaacag

SEQ ID NO: 36021 - DNA, 21 bp, Artificial Sequence
  Synthetic
acgagttctaggaggattgca

SEQ ID NO: 36022 - DNA, 24 bp, Artificial Sequence
  Synthetic
gtgctaggtctaactgtagtaggt

SEQ ID NO: 36023 - DNA, 23 bp, Artificial Sequence
  Synthetic
ccgtattcagcactttagcaact

SEQ ID NO: 36024 - DNA, 25 bp, Artificial Sequence
  Synthetic
tcaccatcttgaatgtaagtgtgaa

SEQ ID NO: 36025 - DNA, 23 bp, Artificial Sequence
  Synthetic
cttctattccctgaggtggtgga

SEQ ID NO: 36026 - DNA, 24 bp, Artificial Sequence
  Synthetic
tggtgtttctacaatgtaggacca

SEQ ID NO: 36027 - DNA, 20 bp, Artificial Sequence
  Synthetic
tgggtatgagccctccttct

SEQ ID NO: 36028 - DNA, 21 bp, Artificial Sequence
  Synthetic
gacctctggattgaatggacg

SEQ ID NO: 36029 - DNA, 23 bp, Artificial Sequence
  Synthetic
accttttccctgttcaactttga

SEQ ID NO: 36030 - DNA, 20 bp, Artificial Sequence
  Synthetic
gtcgttttgaagccaggacg

SEQ ID NO: 36031 - DNA, 25 bp, Artificial Sequence
  Synthetic
actgctcaaacttatagcatgtagc

SEQ ID NO: 36032 - DNA, 20 bp, Artificial Sequence
  Synthetic
gttcctgttgcgctcgaatt

SEQ ID NO: 36033 - DNA, 22 bp, Artificial Sequence
  Synthetic
ggtacctcttccacctgtgttt

SEQ ID NO: 36034 - DNA, 24 bp, Artificial Sequence
  Synthetic
gcacaatgctgcaataacaattgt

SEQ ID NO: 36035 - DNA, 22 bp, Artificial Sequence
  Synthetic
gcttggaggtctctcccccgtc

SEQ ID NO: 36036 - DNA, 22 bp, Artificial Sequence
  Synthetic
acagcattaatggggggtcttt

SEQ ID NO: 36037 - DNA, 22 bp, Artificial Sequence
  Synthetic
ttagtagcaatgccagcgttag

SEQ ID NO: 36038 - DNA, 21 bp, Artificial Sequence
  Synthetic
acatagccagtggcaccacca

SEQ ID NO: 36039 - DNA, 20 bp, Artificial Sequence
  Synthetic
gcattgtccactggtactgg

SEQ ID NO: 36040 - DNA, 20 bp, Artificial Sequence
  Synthetic
tggaggctcctcaacagtac

SEQ ID NO: 36041 - DNA, 21 bp, Artificial Sequence
  Synthetic
atggtactgtcacctgagtgt

SEQ ID NO: 36042 - DNA, 25 bp, Artificial Sequence
  Synthetic
tgttctttccacatattcatcggtg

SEQ ID NO: 36043 - DNA, 23 bp, Artificial Sequence
  Synthetic
ggttgtcctctgcctatttcaat

SEQ ID NO: 36044 - DNA, 20 bp, Artificial Sequence
  Synthetic
ccatcaggaacagcgtcacc

SEQ ID NO: 36045 - DNA, 23 bp, Artificial Sequence
  Synthetic
tgaaacaagagtccaaggagttg

SEQ ID NO: 36046 - DNA, 23 bp, Artificial Sequence
  Synthetic
gaacttatcaactcgaccctcag

SEQ ID NO: 36047 - DNA, 23 bp, Artificial Sequence
  Synthetic
tctagagatccacaaggagtccc

SEQ ID NO: 36048 - DNA, 20 bp, Artificial Sequence
  Synthetic
atatcagcgctggacgagaa

SEQ ID NO: 36049 - DNA, 20 bp, Artificial Sequence
  Synthetic
ctgcagaagcgcaaaccttt

SEQ ID NO: 36050 - DNA, 22 bp, Artificial Sequence
  Synthetic
gagaatgtatcccctgtctgga

SEQ ID NO: 36051 - DNA, 20 bp, Artificial Sequence
  Synthetic
aaggtttttgcccatcacgg

SEQ ID NO: 36052 - DNA, 21 bp, Artificial Sequence
  Synthetic
agaaaaagctaagcggcacaa

SEQ ID NO: 36053 - DNA, 20 bp, Artificial Sequence
  Synthetic
tcaggcgattgttggaggac

SEQ ID NO: 36054 - DNA, 20 bp, Artificial Sequence
  Synthetic
gcgcatttaggaaccacgac

SEQ ID NO: 36055 - DNA, 22 bp, Artificial Sequence
  Synthetic
gctgtacaaaatgaacgcaacg

SEQ ID NO: 36056 - DNA, 21 bp, Artificial Sequence
  Synthetic
tgcacatgtcccattccttct

SEQ ID NO: 36057 - DNA, 20 bp, Artificial Sequence
  Synthetic
gcactcaaccgctctcgaat

SEQ ID NO: 36058 - DNA, 21 bp, Artificial Sequence
  Synthetic
actgttgtcgccttacctaca

SEQ ID NO: 36059 - DNA, 20 bp, Artificial Sequence
  Synthetic
ggatttgggaaacgttcgct

SEQ ID NO: 36060 - DNA, 22 bp, Artificial Sequence
  Synthetic
cctttggctttgataccgtcat

SEQ ID NO: 36061 - DNA, 22 bp, Artificial Sequence
  Synthetic
aagtgcagcaagaagaaaagga

SEQ ID NO: 36062 - DNA, 20 bp, Artificial Sequence
  Synthetic
cgctgacaggaatgccttgt

SEQ ID NO: 36063 - DNA, 22 bp, Artificial Sequence
  Synthetic
gcatcgttgtgtaggatagcgt

SEQ ID NO: 36064 - DNA, 20 bp, Artificial Sequence
  Synthetic
gtctctgattcccctcgtgc

SEQ ID NO: 36065 - DNA, 21 bp, Artificial Sequence
  Synthetic
actgtcgataccgttgttgct

SEQ ID NO: 36066 - DNA, 21 bp, Artificial Sequence
  Synthetic
gtgtttacggacgtacggttt

SEQ ID NO: 36067 - DNA, 25 bp, Artificial Sequence
  Synthetic
agttagaaattgggattgcttcaga

SEQ ID NO: 36068 - DNA, 20 bp, Artificial Sequence
  Synthetic
agcggactttgttggtagcg

SEQ ID NO: 36069 - DNA, 21 bp, Artificial Sequence
  Synthetic
ctgcctgagggaattgagatg

SEQ ID NO: 36070 - DNA, 23 bp, Artificial Sequence
  Synthetic
agaacgatgtggaaagaggaatg

SEQ ID NO: 36071 - DNA, 21 bp, Artificial Sequence
  Synthetic
gttccatttcttcgggcagag

SEQ ID NO: 36072 - DNA, 24 bp, Artificial Sequence
  Synthetic
tcgttgttatagatcctaggcctc

SEQ ID NO: 36073 - DNA, 20 bp, Artificial Sequence
  Synthetic
gtgtttcttcggaagagcgt

SEQ ID NO: 36074 - DNA, 23 bp, Artificial Sequence
  Synthetic
gttagcctctgtttaggagcttt

SEQ ID NO: 36075 - DNA, 20 bp, Artificial Sequence
  Synthetic
ctgcttggtagtgtcgaacg

SEQ ID NO: 36076 - DNA, 21 bp, Artificial Sequence
  Synthetic
gcagagcagtcagtaaaaccg

SEQ ID NO: 36077 - DNA, 21 bp, Artificial Sequence
  Synthetic
caggtgggatggagtttctgt

SEQ ID NO: 36078 - DNA, 23 bp, Artificial Sequence
  Synthetic
ctctttgggaggagaaagtcatc

SEQ ID NO: 36079 - DNA, 22 bp, Artificial Sequence
  Synthetic
ccctaaggaagagaagcgtaca

SEQ ID NO: 36080 - DNA, 22 bp, Artificial Sequence
  Synthetic
gggatgacttttccagggaagt

SEQ ID NO: 36081 - DNA, 20 bp, Artificial Sequence
  Synthetic
agtctccagcgctatctcca

SEQ ID NO: 36082 - DNA, 21 bp, Artificial Sequence
  Synthetic
aagtttaacgcgcagtcatca

SEQ ID NO: 36083 - DNA, 20 bp, Artificial Sequence
  Synthetic
tgttttgggctgtagcgttc

SEQ ID NO: 36084 - DNA, 23 bp, Artificial Sequence
  Synthetic
gtgtcgctattctacagggaatc

SEQ ID NO: 36085 - DNA, 24 bp, Artificial Sequence
  Synthetic
cgcaagtgattgaaattcacactc

SEQ ID NO: 36086 - DNA, 23 bp, Artificial Sequence
  Synthetic
ttcgtattatggtgcgtgattgt

SEQ ID NO: 36087 - DNA, 21 bp, Artificial Sequence
  Synthetic
gttacgaagcagcagcgttat

SEQ ID NO: 36088 - DNA, 21 bp, Artificial Sequence
  Synthetic
taaagctgtggcgaggactct

SEQ ID NO: 36089 - DNA, 22 bp, Artificial Sequence
  Synthetic
tcttcatacgctcagagcagat

SEQ ID NO: 36090 - DNA, 23 bp, Artificial Sequence
  Synthetic
gtctcgtcgttctatgattaccc

SEQ ID NO: 36091 - DNA, 22 bp, Artificial Sequence
  Synthetic
ggagggattgttttcggtccta

SEQ ID NO: 36092 - DNA, 20 bp, Artificial Sequence
  Synthetic
tgtgtcctagaagctcgggt

SEQ ID NO: 36093 - DNA, 21 bp, Artificial Sequence
  Synthetic
gtagcagcaatcccatccaag

SEQ ID NO: 36094 - DNA, 20 bp, Artificial Sequence
  Synthetic
atgctttggtatgcggggtt

SEQ ID NO: 36095 - DNA, 20 bp, Artificial Sequence
  Synthetic
aaggagggatggggttttcg

SEQ ID NO: 36096 - DNA, 20 bp, Artificial Sequence
  Synthetic
gggaaaacctgacgcgagat

SEQ ID NO: 36097 - DNA, 20 bp, Artificial Sequence
  Synthetic
ttgcgagcgtaactcttgga

SEQ ID NO: 36098 - DNA, 22 bp, Artificial Sequence
  Synthetic
tctggatcgtcccaatcctatg

SEQ ID NO: 36099 - DNA, 21 bp, Artificial Sequence
  Synthetic
gcgttacgaccatatggagga

SEQ ID NO: 36100 - DNA, 22 bp, Artificial Sequence
  Synthetic
agtcaaagatgctgcaaagcaa

SEQ ID NO: 36101 - DNA, 20 bp, Artificial Sequence
  Synthetic
acagtgttgctacctgcgat

SEQ ID NO: 36102 - DNA, 24 bp, Artificial Sequence
  Synthetic
ccggtcatcgaaaacaaagagttt

SEQ ID NO: 36103 - DNA, 22 bp, Artificial Sequence
  Synthetic
gaaattctccaacagacgggaa

SEQ ID NO: 36104 - DNA, 23 bp, Artificial Sequence
  Synthetic
tccttcacttaggtgcataagca

SEQ ID NO: 36105 - DNA, 25 bp, Artificial Sequence
  Synthetic
aacaaagcaaaagagaaaactcctt

SEQ ID NO: 36106 - DNA, 20 bp, Artificial Sequence
  Synthetic
cccatggcctactgcaaaga

SEQ ID NO: 36107 - DNA, 20 bp, Artificial Sequence
  Synthetic
atatcggcccgcattgatgt

SEQ ID NO: 36108 - DNA, 24 bp, Artificial Sequence
  Synthetic
cgtttctgatatgcgttctatcga

SEQ ID NO: 36109 - DNA, 20 bp, Artificial Sequence
  Synthetic
actaggttcttcgggtgcat

SEQ ID NO: 36110 - DNA, 21 bp, Artificial Sequence
  Synthetic
agagcttcctcttccaacagg

SEQ ID NO: 36111 - DNA, 23 bp, Artificial Sequence
  Synthetic
tcaggataattgtggattgcctc

SEQ ID NO: 36112 - DNA, 22 bp, Artificial Sequence
  Synthetic
tgatacaaaaagcggtctcagg

SEQ ID NO: 36113 - DNA, 22 bp, Artificial Sequence
  Synthetic
tccgtctacagcaaataaagcc

SEQ ID NO: 36114 - DNA, 23 bp, Artificial Sequence
  Synthetic
aatcgatcttcgtaattcccacc

SEQ ID NO: 36115 - DNA, 20 bp, Artificial Sequence
  Synthetic
ctcttaggacgccccatcga

SEQ ID NO: 36116 - DNA, 20 bp, Artificial Sequence
  Synthetic
atactggcaaagcgttctcg

SEQ ID NO: 36117 - DNA, 21 bp, Artificial Sequence
  Synthetic
gcctcttaacgttgcctgaat

SEQ ID NO: 36118 - DNA, 20 bp, Artificial Sequence
  Synthetic
agcagtcgtcctctcatcct

SEQ ID NO: 36119 - DNA, 20 bp, Artificial Sequence
  Synthetic
aaatcattatgcgggcagcc

SEQ ID NO: 36120 - DNA, 23 bp, Artificial Sequence
  Synthetic
caaaaacagagactgactcacct

SEQ ID NO: 36121 - DNA, 22 bp, Artificial Sequence
  Synthetic
gcggaaaagcttatgttctccc

SEQ ID NO: 36122 - DNA, 21 bp, Artificial Sequence
  Synthetic
tggaactgcttccctcctaga

SEQ ID NO: 36123 - DNA, 22 bp, Artificial Sequence
  Synthetic
gcgatgatgaaagcactcgaaa

SEQ ID NO: 36124 - DNA, 24 bp, Artificial Sequence
  Synthetic
caaaaagacacatcaatcaccctc

SEQ ID NO: 36125 - DNA, 22 bp, Artificial Sequence
  Synthetic
ccgaatcgcaaaatacctgagg

SEQ ID NO: 36126 - DNA, 20 bp, Artificial Sequence
  Synthetic
gtatacgcggcacacccaat

SEQ ID NO: 36127 - DNA, 23 bp, Artificial Sequence
  Synthetic
tccattttttcctcttcctccag

SEQ ID NO: 36128 - DNA, 20 bp, Artificial Sequence
  Synthetic
gcagtctgctagctgaggat

SEQ ID NO: 36129 - DNA, 24 bp, Artificial Sequence
  Synthetic
gaattccttggagcaatacctgat

SEQ ID NO: 36130 - DNA, 20 bp, Artificial Sequence
  Synthetic
cttttgctaacaagcgcgca

SEQ ID NO: 36131 - DNA, 22 bp, Artificial Sequence
  Synthetic
agcattaacgaaaaaggccagt

SEQ ID NO: 36132 - DNA, 22 bp, Artificial Sequence
  Synthetic
caaaaatcgcaacggtcattgg

SEQ ID NO: 36133 - DNA, 21 bp, Artificial Sequence
  Synthetic
tgattgtccgcgttttcctag

SEQ ID NO: 36134 - DNA, 22 bp, Artificial Sequence
  Synthetic
accatgaggagagtgaatccaa

SEQ ID NO: 36135 - DNA, 22 bp, Artificial Sequence
  Synthetic
agccaaatctcctacaccttca

SEQ ID NO: 36136 - DNA, 20 bp, Artificial Sequence
  Synthetic
acccgtagctagcacggata

SEQ ID NO: 36137 - DNA, 21 bp, Artificial Sequence
  Synthetic
cccgactttgtctcgaaacct

SEQ ID NO: 36138 - DNA, 20 bp, Artificial Sequence
  Synthetic
tctcagttgcattctggcgt

SEQ ID NO: 36139 - DNA, 22 bp, Artificial Sequence
  Synthetic
ttccctcatccactttccatct

SEQ ID NO: 36140 - DNA, 22 bp, Artificial Sequence
  Synthetic
tcccacgtttgatcatcctgat

SEQ ID NO: 36141 - DNA, 25 bp, Artificial Sequence
  Synthetic
ccagaaattccaattgttagccaat

SEQ ID NO: 36142 - DNA, 25 bp, Artificial Sequence
  Synthetic
tgataattaggggcattcatttcga

SEQ ID NO: 36143 - DNA, 21 bp, Artificial Sequence
  Synthetic
tccaaacaccattgccgtatt

SEQ ID NO: 36144 - DNA, 24 bp, Artificial Sequence
  Synthetic
gtggtccaaacatactcaacatca

SEQ ID NO: 36145 - DNA, 22 bp, Artificial Sequence
  Synthetic
ctgcagtcgcttgtaaaggaat

SEQ ID NO: 36146 - DNA, 21 bp, Artificial Sequence
  Synthetic
tggtgggaattagaaggccat

SEQ ID NO: 36147 - DNA, 23 bp, Artificial Sequence
  Synthetic
aagttagatctctgatggcttgc

SEQ ID NO: 36148 - DNA, 22 bp, Artificial Sequence
  Synthetic
cctgttcactcgatccagccat

SEQ ID NO: 36149 - DNA, 23 bp, Artificial Sequence
  Synthetic
gctgtttgtattataacgcaggc

SEQ ID NO: 36150 - DNA, 25 bp, Artificial Sequence
  Synthetic
agtactacagccttctttaggatct

SEQ ID NO: 36151 - DNA, 22 bp, Artificial Sequence
  Synthetic
gaatctggggtggatcagctat

SEQ ID NO: 36152 - DNA, 20 bp, Artificial Sequence
  Synthetic
catcctcaccctcgtcttct

SEQ ID NO: 36153 - DNA, 19 bp, Artificial Sequence
  Synthetic
tgctcctgcccctgctcct

SEQ ID NO: 36154 - DNA, 25 bp, Artificial Sequence
  Synthetic
agcctttatacttttctttagccct

SEQ ID NO: 36155 - DNA, 23 bp, Artificial Sequence
  Synthetic
actgtgggtgtatttccaactct

SEQ ID NO: 36156 - DNA, 21 bp, Artificial Sequence
  Synthetic
ctgcaggtgtttcagcatagg

SEQ ID NO: 36157 - DNA, 22 bp, Artificial Sequence
  Synthetic
tgtggatcaactgagcttctca

SEQ ID NO: 36158 - DNA, 25 bp, Artificial Sequence
  Synthetic
ttgctttggatcaaaagatgtgttt

SEQ ID NO: 36159 - DNA, 25 bp, Artificial Sequence
  Synthetic
gataccaaagacccactaacagtag

SEQ ID NO: 36160 - DNA, 20 bp, Artificial Sequence
  Synthetic
gacccaacccacgaattgac

SEQ ID NO: 36161 - DNA, 25 bp, Artificial Sequence
  Synthetic
atgccacaattacatcaaaaaggag

SEQ ID NO: 36162 - DNA, 25 bp, Artificial Sequence
  Synthetic
gctttgcaaatgagatttgtttcct

SEQ ID NO: 36163 - DNA, 25 bp, Artificial Sequence
  Synthetic
aaagagtccagtacaactttagcaa

SEQ ID NO: 36164 - DNA, 23 bp, Artificial Sequence
  Synthetic
caacattaaaagaaagacgcgct

SEQ ID NO: 36165 - DNA, 24 bp, Artificial Sequence
  Synthetic
accatcaacagttagcaagatgtc

SEQ ID NO: 36166 - DNA, 20 bp, Artificial Sequence
  Synthetic
ccagaccagtacgctgttcc

SEQ ID NO: 36167 - DNA, 24 bp, Artificial Sequence
  Synthetic
ttgggctttaataatacgctgagt

SEQ ID NO: 36168 - DNA, 21 bp, Artificial Sequence
  Synthetic
agcataaaaagctcaggcagc

SEQ ID NO: 36169 - DNA, 25 bp, Artificial Sequence
  Synthetic
aagaatcacaatcaatgcaattcca

SEQ ID NO: 36170 - DNA, 24 bp, Artificial Sequence
  Synthetic
acaggaaacaccagctattttagc

SEQ ID NO: 36171 - DNA, 21 bp, Artificial Sequence
  Synthetic
cttctcgcaacacttctggaa

SEQ ID NO: 36172 - DNA, 23 bp, Artificial Sequence
  Synthetic
cagcaatggaactagcagtcaat

SEQ ID NO: 36173 - DNA, 21 bp, Artificial Sequence
  Synthetic
gctttagccaactgagagcaa

SEQ ID NO: 36174 - DNA, 21 bp, Artificial Sequence
  Synthetic
catgaaaggctccttgtggtt

SEQ ID NO: 36175 - DNA, 25 bp, Artificial Sequence
  Synthetic
aagatgcttatgcttaaccaacaac

SEQ ID NO: 36176 - DNA, 23 bp, Artificial Sequence
  Synthetic
tctgtaaagcctgcaaaacagta

SEQ ID NO: 36177 - DNA, 25 bp, Artificial Sequence
  Synthetic
tcaactacctggtcataaacacttt

SEQ ID NO: 36178 - DNA, 20 bp, Artificial Sequence
  Synthetic
accaacaacccagcctcttg

SEQ ID NO: 36179 - DNA, 20 bp, Artificial Sequence
  Synthetic
tctgggtgttcaactcgtgc

SEQ ID NO: 36180 - DNA, 20 bp, Artificial Sequence
  Synthetic
accaatgccagcaacactag

SEQ ID NO: 36181 - DNA, 21 bp, Artificial Sequence
  Synthetic
ccaccaatttgtccgcaaact

SEQ ID NO: 36182 - DNA, 24 bp, Artificial Sequence
  Synthetic
aaagacaagcgataacgatgtgta

SEQ ID NO: 36183 - DNA, 22 bp, Artificial Sequence
  Synthetic
gacttgtgatgccggtatacac

SEQ ID NO: 36184 - DNA, 21 bp, Artificial Sequence
  Synthetic
actacaggaacaccacgtgta

SEQ ID NO: 36185 - DNA, 25 bp, Artificial Sequence
  Synthetic
ttcaatcttattgccattgcatgac

SEQ ID NO: 36186 - DNA, 25 bp, Artificial Sequence
  Synthetic
ctactataattctcctgcggaacaa

SEQ ID NO: 36187 - DNA, 23 bp, Artificial Sequence
  Synthetic
acttatcatagcactccaccctg

SEQ ID NO: 36188 - DNA, 25 bp, Artificial Sequence
  Synthetic
ggctaataaaaacagctttatgcca

SEQ ID NO: 36189 - DNA, 25 bp, Artificial Sequence
  Synthetic
ctacattgaactttagtttcgacgg

SEQ ID NO: 36190 - DNA, 21 bp, Artificial Sequence
  Synthetic
cggagacaagtgagctcaaag

SEQ ID NO: 36191 - DNA, 20 bp, Artificial Sequence
  Synthetic
cacaggcaatcgcttttggg

SEQ ID NO: 36192 - DNA, 20 bp, Artificial Sequence
  Synthetic
aaggcatttcaccagcctgt

SEQ ID NO: 36193 - DNA, 23 bp, Artificial Sequence
  Synthetic
cttcaagagcaccattatcacga

SEQ ID NO: 36194 - DNA, 25 bp, Artificial Sequence
  Synthetic
ccataaacaatgtgttcaaaggcat

SEQ ID NO: 36195 - DNA, 20 bp, Artificial Sequence
  Synthetic
gccacccagagctaacttgt

SEQ ID NO: 36196 - DNA, 20 bp, Artificial Sequence
  Synthetic
tgttgaccttcgcctgtgta

SEQ ID NO: 36197 - DNA, 25 bp, Artificial Sequence
  Synthetic
cgacttatcattaagccaagcttct

SEQ ID NO: 36198 - DNA, 20 bp, Artificial Sequence
  Synthetic
acacgaccgctatagcaact

SEQ ID NO: 36199 - DNA, 25 bp, Artificial Sequence
  Synthetic
agcttgtttgaataaactccaccat

SEQ ID NO: 36200 - DNA, 21 bp, Artificial Sequence
  Synthetic
tctgagcttccgcttcaagag

SEQ ID NO: 36201 - DNA, 20 bp, Artificial Sequence
  Synthetic
gcaatgcacagaccaggact

SEQ ID NO: 36202 - DNA, 25 bp, Artificial Sequence
  Synthetic
gacttttattgcctcctgtaaccta

SEQ ID NO: 36203 - DNA, 24 bp, Artificial Sequence
  Synthetic
agttgtttgtttctgggttgaaac

SEQ ID NO: 36204 - DNA, 20 bp, Artificial Sequence
  Synthetic
ttctcaacaatgcggtgtcc

SEQ ID NO: 36205 - DNA, 21 bp, Artificial Sequence
  Synthetic
aggtaggggttctattgccag

SEQ ID NO: 36206 - DNA, 22 bp, Artificial Sequence
  Synthetic
ttcataaacatccttctggggc

SEQ ID NO: 36207 - DNA, 23 bp, Artificial Sequence
  Synthetic
gaccccaattgcatttttgacat

SEQ ID NO: 36208 - DNA, 23 bp, Artificial Sequence
  Synthetic
cccaattgcatttttgacatcct

SEQ ID NO: 36209 - DNA, 20 bp, Artificial Sequence
  Synthetic
ccatggctaggcgctttccg

SEQ ID NO: 36210 - DNA, 21 bp, Artificial Sequence
  Synthetic
cgggaacttgacgtcctgtgg

SEQ ID NO: 36211 - DNA, 22 bp, Artificial Sequence
  Synthetic
ccgtcctggacacaaggtacac

SEQ ID NO: 36212 - DNA, 20 bp, Artificial Sequence
  Synthetic
gccccatccctgcctgaaga

SEQ ID NO: 36213 - DNA, 20 bp, Artificial Sequence
  Synthetic
ccccctggtccagttgcaag

SEQ ID NO: 36214 - DNA, 20 bp, Artificial Sequence
  Synthetic
agcggcccagtgttgcattg

SEQ ID NO: 36215 - DNA, 22 bp, Artificial Sequence
  Synthetic
cagaggaacccttgagacaggc

SEQ ID NO: 36216 - DNA, 21 bp, Artificial Sequence
  Synthetic
cccataggcacgcgacatgaa

SEQ ID NO: 36217 - DNA, 20 bp, Artificial Sequence
  Synthetic
ccgcatcttggggagcagtg

SEQ ID NO: 36218 - DNA, 22 bp, Artificial Sequence
  Synthetic
gccctccagctcaatatgaccc

SEQ ID NO: 36219 - DNA, 22 bp, Artificial Sequence
  Synthetic
gaacgccataagagacgccaca

SEQ ID NO: 36220 - DNA, 19 bp, Artificial Sequence
  Synthetic
caccgacgacgagagcacc

SEQ ID NO: 36221 - DNA, 20 bp, Artificial Sequence
  Synthetic
ttctgtggcccccgtgatgt

SEQ ID NO: 36222 - DNA, 20 bp, Artificial Sequence
  Synthetic
gtggccttcaacgacggagc

SEQ ID NO: 36223 - DNA, 21 bp, Artificial Sequence
  Synthetic
cccgtggtggtaaggcacatc

SEQ ID NO: 36224 - DNA, 20 bp, Artificial Sequence
  Synthetic
gagcagcagaccacgctctg

SEQ ID NO: 36225 - DNA, 22 bp, Artificial Sequence
  Synthetic
cgcagacaagaaagtccgggtt

SEQ ID NO: 36226 - DNA, 20 bp, Artificial Sequence
  Synthetic
atgtcacagccagaggtgat

SEQ ID NO: 36227 - DNA, 22 bp, Artificial Sequence
  Synthetic
gatgttagtatcctggctccca

SEQ ID NO: 36228 - DNA, 25 bp, Artificial Sequence
  Synthetic
tctcactatgttcctagcagcaata

SEQ ID NO: 36229 - DNA, 23 bp, Artificial Sequence
  Synthetic
gtaagcacctcttcctctctctt

SEQ ID NO: 36230 - DNA, 23 bp, Artificial Sequence
  Synthetic
cataggattcagtcgctgattcg

SEQ ID NO: 36231 - DNA, 20 bp, Artificial Sequence
  Synthetic
atttcctcgttggtcccgga

SEQ ID NO: 36232 - DNA, 22 bp, Artificial Sequence
  Synthetic
cactccagctgtgccttcatct

SEQ ID NO: 36233 - DNA, 22 bp, Artificial Sequence
  Synthetic
tgtgctgatagaagagccctgc

SEQ ID NO: 36234 - DNA, 20 bp, Artificial Sequence
  Synthetic
accgaaccaattgcccagcg

SEQ ID NO: 36235 - DNA, 20 bp, Artificial Sequence
  Synthetic
ccagatcacagcgttcgccc

SEQ ID NO: 36236 - DNA, 19 bp, Artificial Sequence
  Synthetic
acaagaccgtgcgtcccgg

SEQ ID NO: 36237 - DNA, 21 bp, Artificial Sequence
  Synthetic
aagacgactggttccacagcc

SEQ ID NO: 36238 - DNA, 22 bp, Artificial Sequence
  Synthetic
cccgtggtagacagtccagcat

SEQ ID NO: 36239 - DNA, 20 bp, Artificial Sequence
  Synthetic
aagtccaccgccttagccac

SEQ ID NO: 36240 - DNA, 20 bp, Artificial Sequence
  Synthetic
ctgaacagcgcccagtctgt

SEQ ID NO: 36241 - DNA, 21 bp, Artificial Sequence
  Synthetic
agggccttctgcttgaactgc

SEQ ID NO: 36242 - DNA, 19 bp, Artificial Sequence
  Synthetic
tccaacgctgccgatggcg

SEQ ID NO: 36243 - DNA, 18 bp, Artificial Sequence
  Synthetic
tgcatcgctctccggcac

SEQ ID NO: 36244 - DNA, 20 bp, Artificial Sequence
  Synthetic
acctcccgctcatcctcctc

SEQ ID NO: 36245 - DNA, 22 bp, Artificial Sequence
  Synthetic
cgggctcagaggatgttgtcgt

SEQ ID NO: 36246 - DNA, 20 bp, Artificial Sequence
  Synthetic
gacgccgctgctttgacctc

SEQ ID NO: 36247 - DNA, 21 bp, Artificial Sequence
  Synthetic
cacgatgagacgagctggctt

SEQ ID NO: 36248 - DNA, 21 bp, Artificial Sequence
  Synthetic
ccgcagttttccccccttgaa

SEQ ID NO: 36249 - DNA, 22 bp, Artificial Sequence
  Synthetic
ggggttgtagggtcacgggtaa

SEQ ID NO: 36250 - DNA, 22 bp, Artificial Sequence
  Synthetic
ggaccccaagttttctgaggca

SEQ ID NO: 36251 - DNA, 23 bp, Artificial Sequence
  Synthetic
gtctgctggtccataaaacacta

SEQ ID NO: 36252 - DNA, 19 bp, Artificial Sequence
  Synthetic
tggtgctgtccgtcgaccg

SEQ ID NO: 36253 - DNA, 22 bp, Artificial Sequence
  Synthetic
cacaaaaaaagcccagcaatgt

SEQ ID NO: 36254 - DNA, 20 bp, Artificial Sequence
  Synthetic
aacatctggggggcatgtgc

SEQ ID NO: 36255 - DNA, 20 bp, Artificial Sequence
  Synthetic
ggggctatagggctaaggtc

SEQ ID NO: 36256 - DNA, 20 bp, Artificial Sequence
  Synthetic
aaagtccatggccccatagc

SEQ ID NO: 36257 - DNA, 25 bp, Artificial Sequence
  Synthetic
acaactcgtttcaactctaaatggt

SEQ ID NO: 36258 - DNA, 25 bp, Artificial Sequence
  Synthetic
gcaggattttcatcaaagtaaacct

SEQ ID NO: 36259 - DNA, 20 bp, Artificial Sequence
  Synthetic
tttcggctggctcgtcaaca

SEQ ID NO: 36260 - DNA, 21 bp, Artificial Sequence
  Synthetic
acagactccaaccgggctgaa

SEQ ID NO: 36261 - DNA, 20 bp, Artificial Sequence
  Synthetic
agtgcctttacccgttccaa

SEQ ID NO: 36262 - DNA, 24 bp, Artificial Sequence
  Synthetic
ttgtttcacctacttcttcttgca

SEQ ID NO: 36263 - DNA, 20 bp, Artificial Sequence
  Synthetic
attcaaattgaaccgcgcga

SEQ ID NO: 36264 - DNA, 20 bp, Artificial Sequence
  Synthetic
gggagttggttttgcaggtg

SEQ ID NO: 36265 - DNA, 20 bp, Artificial Sequence
  Synthetic
gaccgcctcttccaatttgc

SEQ ID NO: 36266 - DNA, 22 bp, Artificial Sequence
  Synthetic
ggacaagagcctttatcaggac

SEQ ID NO: 36267 - DNA, 22 bp, Artificial Sequence
  Synthetic
cgccatcaacacctcctctaac

SEQ ID NO: 36268 - DNA, 21 bp, Artificial Sequence
  Synthetic
acaccgttttggcttcattgt

SEQ ID NO: 36269 - DNA, 21 bp, Artificial Sequence
  Synthetic
tgggcccatatgtattccacc

SEQ ID NO: 36270 - DNA, 23 bp, Artificial Sequence
  Synthetic
ttcgccacatcttacatggaatt

SEQ ID NO: 36271 - DNA, 24 bp, Artificial Sequence
  Synthetic
gaaagtatcgttggagttggtaca

SEQ ID NO: 36272 - DNA, 22 bp, Artificial Sequence
  Synthetic
tctcatttgtttgagcactgct

SEQ ID NO: 36273 - DNA, 21 bp, Artificial Sequence
  Synthetic
gccactaacaagaaagcctgc

SEQ ID NO: 36274 - DNA, 21 bp, Artificial Sequence
  Synthetic
ccaacactttccatcgcttga

SEQ ID NO: 36275 - DNA, 24 bp, Artificial Sequence
  Synthetic
tttacgtacacatcccacaaaagt

SEQ ID NO: 36276 - DNA, 25 bp, Artificial Sequence
  Synthetic
acaataaggatgtggtgtaccatca

SEQ ID NO: 36277 - DNA, 25 bp, Artificial Sequence
  Synthetic
ccttaactggcaactgtacaacttg

SEQ ID NO: 36278 - DNA, 24 bp, Artificial Sequence
  Synthetic
agcctcaggtttaatagtaatggc

SEQ ID NO: 36279 - DNA, 25 bp, Artificial Sequence
  Synthetic
aacaccaactaaacctacttcaact

SEQ ID NO: 36280 - DNA, 23 bp, Artificial Sequence
  Synthetic
ggcatagcacgatcacatttagg

SEQ ID NO: 36281 - DNA, 24 bp, Artificial Sequence
  Synthetic
aaatcatcaacaaaacaaccagct

SEQ ID NO: 36282 - DNA, 20 bp, Artificial Sequence
  Synthetic
atgagcgccctcaacatcaa

SEQ ID NO: 36283 - DNA, 22 bp, Artificial Sequence
  Synthetic
catagcatggcagctttaagca

SEQ ID NO: 36284 - DNA, 25 bp, Artificial Sequence
  Synthetic
tctaaaccatctacgtacacacaag

SEQ ID NO: 36285 - DNA, 20 bp, Artificial Sequence
  Synthetic
accactacccatgcgaagag

SEQ ID NO: 36286 - DNA, 22 bp, Artificial Sequence
  Synthetic
tgaacctgagcctctaaagcat

SEQ ID NO: 36287 - DNA, 25 bp, Artificial Sequence
  Synthetic
gatagtcctcaataactggcctaac

SEQ ID NO: 36288 - DNA, 21 bp, Artificial Sequence
  Synthetic
acgatttccagaggagcttct

SEQ ID NO: 36289 - DNA, 23 bp, Artificial Sequence
  Synthetic
ccttggcattttgcttagtgact

SEQ ID NO: 36290 - DNA, 24 bp, Artificial Sequence
  Synthetic
tttacgctgaggtttagaactcaa

SEQ ID NO: 36291 - DNA, 22 bp, Artificial Sequence
  Synthetic
gttcgacaatcatcgggttgaa

SEQ ID NO: 36292 - DNA, 24 bp, Artificial Sequence
  Synthetic
tcctcattttcaatgtcctgcaat

SEQ ID NO: 36293 - DNA, 20 bp, Artificial Sequence
  Synthetic
caattggggctacgtcctct

SEQ ID NO: 36294 - DNA, 23 bp, Artificial Sequence
  Synthetic
cagtgagagaaaactccatgctc

SEQ ID NO: 36295 - DNA, 25 bp, Artificial Sequence
  Synthetic
tgtctttctctttaatcgaggactc

SEQ ID NO: 36296 - DNA, 21 bp, Artificial Sequence
  Synthetic
ccctgatctcagtggcattct

SEQ ID NO: 36297 - DNA, 22 bp, Artificial Sequence
  Synthetic
gcctcgctttatcatccgaatt

SEQ ID NO: 36298 - DNA, 22 bp, Artificial Sequence
  Synthetic
cttgagactctcaggtcctcaa

SEQ ID NO: 36299 - DNA, 20 bp, Artificial Sequence
  Synthetic
tcgggactctctggcggagg

SEQ ID NO: 36300 - DNA, 20 bp, Artificial Sequence
  Synthetic
cgacagaccgtgttttggaa

SEQ ID NO: 36301 - DNA, 24 bp, Artificial Sequence
  Synthetic
tgtaggctgttcgtctatatccat

SEQ ID NO: 36302 - DNA, 25 bp, Artificial Sequence
  Synthetic
tgaacttgtttaggatccatggaaa

SEQ ID NO: 36303 - DNA, 25 bp, Artificial Sequence
  Synthetic
aaaatttcctacctaaagcatgctg

SEQ ID NO: 36304 - DNA, 25 bp, Artificial Sequence
  Synthetic
gcagcaaacttgttagtttcgattt

SEQ ID NO: 36305 - DNA, 25 bp, Artificial Sequence
  Synthetic
gaaatttaggcttctctacccctgt

SEQ ID NO: 36306 - DNA, 24 bp, Artificial Sequence
  Synthetic
acttcaattggcttgttctcttca

SEQ ID NO: 36307 - DNA, 24 bp, Artificial Sequence
  Synthetic
tctttctctttgacagaagactcg

SEQ ID NO: 36308 - DNA, 22 bp, Artificial Sequence
  Synthetic
tccaccgatgaggattccaatt

SEQ ID NO: 36309 - DNA, 20 bp, Artificial Sequence
  Synthetic
tgctccttgctagtgcttcg

SEQ ID NO: 36310 - DNA, 22 bp, Artificial Sequence
  Synthetic
gttttggtgtacctcttctgcc

SEQ ID NO: 36311 - DNA, 20 bp, Artificial Sequence
  Synthetic
gaaactccaaagctgggcag

SEQ ID NO: 36312 - DNA, 23 bp, Artificial Sequence
  Synthetic
cctttggctagtgttgagaatgg

SEQ ID NO: 36313 - DNA, 20 bp, Artificial Sequence
  Synthetic
tccatgcatagcgaccctta

SEQ ID NO: 36314 - DNA, 20 bp, Artificial Sequence
  Synthetic
taagaccatgctcccttgct

SEQ ID NO: 36315 - DNA, 21 bp, Artificial Sequence
  Synthetic
cttgcaggagacacatcaaca

SEQ ID NO: 36316 - DNA, 20 bp, Artificial Sequence
  Synthetic
cccctgtttgaggaacctca

SEQ ID NO: 36317 - DNA, 21 bp, Artificial Sequence
  Synthetic
gatcaggcacaacatcctgtg

SEQ ID NO: 36318 - DNA, 22 bp, Artificial Sequence
  Synthetic
tgacatcctggatttgccatca

SEQ ID NO: 36319 - DNA, 22 bp, Artificial Sequence
  Synthetic
cccgtaacatgagcattcttca

SEQ ID NO: 36320 - DNA, 20 bp, Artificial Sequence
  Synthetic
ccaagtgttagccccatcca

SEQ ID NO: 36321 - DNA, 20 bp, Artificial Sequence
  Synthetic
agtgagtatctcgcgagtgc

SEQ ID NO: 36322 - DNA, 22 bp, Artificial Sequence
  Synthetic
ggccattcctattccaccatgt

SEQ ID NO: 36323 - DNA, 25 bp, Artificial Sequence
  Synthetic
actcttattttcagtgtttggaggt

SEQ ID NO: 36324 - DNA, 21 bp, Artificial Sequence
  Synthetic
ccttgcgtttcactgacttct

SEQ ID NO: 36325 - DNA, 20 bp, Artificial Sequence
  Synthetic
aatgtcccaagcacatcccg

SEQ ID NO: 36326 - DNA, 20 bp, Artificial Sequence
  Synthetic
ctcaggacagcagactccac

SEQ ID NO: 36327 - DNA, 20 bp, Artificial Sequence
  Synthetic
cactgaggctcacagcaatt

SEQ ID NO: 36328 - DNA, 21 bp, Artificial Sequence
  Synthetic
cctcctccggttcatcttctg

SEQ ID NO: 36329 - DNA, 20 bp, Artificial Sequence
  Synthetic
cttccagcctcggactcaaa

SEQ ID NO: 36330 - DNA, 21 bp, Artificial Sequence
  Synthetic
tcttcttcgtcttctggaggg

SEQ ID NO: 36331 - DNA, 20 bp, Artificial Sequence
  Synthetic
aatctgcccccagtacctct

SEQ ID NO: 36332 - DNA, 20 bp, Artificial Sequence
  Synthetic
cttccaccccaactcctgga

SEQ ID NO: 36333 - DNA, 22 bp, Artificial Sequence
  Synthetic
tcaaattcgatgctgacgtcag

SEQ ID NO: 36334 - DNA, 22 bp, Artificial Sequence
  Synthetic
tgctgttgctgtgttactttgt

SEQ ID NO: 36335 - DNA, 24 bp, Artificial Sequence
  Synthetic
agtacctattcctaaaggtccacc

SEQ ID NO: 36336 - DNA, 25 bp, Artificial Sequence
  Synthetic
catgtccaaatcctatatcacccat

SEQ ID NO: 36337 - DNA, 25 bp, Artificial Sequence
  Synthetic
accacatacatacacaatgacttct

SEQ ID NO: 36338 - DNA, 22 bp, Artificial Sequence
  Synthetic
cctgaattagtcaatgcctccg

SEQ ID NO: 36339 - DNA, 20 bp, Artificial Sequence
  Synthetic
ctgcacgtttagcacattgc

SEQ ID NO: 36340 - DNA, 25 bp, Artificial Sequence
  Synthetic
ggaaatgtagcatcgtctataagcc

SEQ ID NO: 36341 - DNA, 21 bp, Artificial Sequence
  Synthetic
cagtacatgctcctgccttac

SEQ ID NO: 36342 - DNA, 22 bp, Artificial Sequence
  Synthetic
tgtccatgtgttttatgccaca

SEQ ID NO: 36343 - DNA, 22 bp, Artificial Sequence
  Synthetic
accagtacccttacctgtgcct

SEQ ID NO: 36344 - DNA, 21 bp, Artificial Sequence
  Synthetic
atggcgtaacatgtctgctac

SEQ ID NO: 36345 - DNA, 21 bp, Artificial Sequence
  Synthetic
aaacatatgcgaacgtttgcg

SEQ ID NO: 36346 - DNA, 25 bp, Artificial Sequence
  Synthetic
cagataactaattcggttgctggaa

SEQ ID NO: 36347 - DNA, 20 bp, Artificial Sequence
  Synthetic
cgggtgacaactcctcatca

SEQ ID NO: 36348 - DNA, 21 bp, Artificial Sequence
  Synthetic
ctgccatgtcgaaaaagggat

SEQ ID NO: 36349 - DNA, 20 bp, Artificial Sequence
  Synthetic
tcagcaaccgttctgtcctg

SEQ ID NO: 36350 - DNA, 21 bp, Artificial Sequence
  Synthetic
acggtcgcgttaaatctccat

SEQ ID NO: 36351 - DNA, 25 bp, Artificial Sequence
  Synthetic
tggaggtatatactgttggttgagt

SEQ ID NO: 36352 - DNA, 22 bp, Artificial Sequence
  Synthetic
tcgtcctaattccctgacatct

SEQ ID NO: 36353 - DNA, 24 bp, Artificial Sequence
  Synthetic
tggatctggaaatagtagtcgcat

SEQ ID NO: 36354 - DNA, 23 bp, Artificial Sequence
  Synthetic
gccaagataattatgaaggcgcg

SEQ ID NO: 36355 - DNA, 19 bp, Artificial Sequence
  Synthetic
tgctcgcccactcgaccga

SEQ ID NO: 36356 - DNA, 21 bp, Artificial Sequence
  Synthetic
accccgtcacagaattgattg

SEQ ID NO: 36357 - DNA, 18 bp, Artificial Sequence
  Synthetic
atggggagccaggcccaa

SEQ ID NO: 36358 - DNA, 20 bp, Artificial Sequence
  Synthetic
cggtctcccctaggcttgga

SEQ ID NO: 36359 - DNA, 22 bp, Artificial Sequence
  Synthetic
ccacagaaactacacggcctca

SEQ ID NO: 36360 - DNA, 22 bp, Artificial Sequence
  Synthetic
ttccgaccacgagtctttgtcc

SEQ ID NO: 36361 - DNA, 19 bp, Artificial Sequence
  Synthetic
actgggcccagcgggagaa

SEQ ID NO: 36362 - DNA, 22 bp, Artificial Sequence
  Synthetic
cacgttcagcagacacgagaga

SEQ ID NO: 36363 - DNA, 22 bp, Artificial Sequence
  Synthetic
ccgattgatggcaaggccctat

SEQ ID NO: 36364 - DNA, 21 bp, Artificial Sequence
  Synthetic
cctacgtctccgcagacaccc

SEQ ID NO: 36365 - DNA, 20 bp, Artificial Sequence
  Synthetic
ggctctggaggccgtcctct

SEQ ID NO: 36366 - DNA, 19 bp, Artificial Sequence
  Synthetic
agagcccgctcccacttcg

SEQ ID NO: 36367 - DNA, 19 bp, Artificial Sequence
  Synthetic
cggtccgtgtagatgccgg

SEQ ID NO: 36368 - DNA, 19 bp, Artificial Sequence
  Synthetic
cgctttgccggcatccagt

SEQ ID NO: 36369 - DNA, 20 bp, Artificial Sequence
  Synthetic
accgacgattccccctcacc

SEQ ID NO: 36370 - DNA, 19 bp, Artificial Sequence
  Synthetic
ggcgcattcaccaggcagc

SEQ ID NO: 36371 - DNA, 19 bp, Artificial Sequence
  Synthetic
tccatgggacgaggcggca

SEQ ID NO: 36372 - DNA, 19 bp, Artificial Sequence
  Synthetic
gagtccgctgctaccgagc

SEQ ID NO: 36373 - DNA, 19 bp, Artificial Sequence
  Synthetic
tggctgggaatggcaggcg

SEQ ID NO: 36374 - DNA, 19 bp, Artificial Sequence
  Synthetic
ctccaccccgaccaactgc

SEQ ID NO: 36375 - DNA, 19 bp, Artificial Sequence
  Synthetic
ttggctcctcggcatgggc

SEQ ID NO: 36376 - DNA, 19 bp, Artificial Sequence
  Synthetic
tgagggggcggtcaccgat

SEQ ID NO: 36377 - DNA, 22 bp, Artificial Sequence
  Synthetic
ctcaaaatccacctggctgcct

SEQ ID NO: 36378 - DNA, 22 bp, Artificial Sequence
  Synthetic
ggacctgttgcttcagagcctt

SEQ ID NO: 36379 - DNA, 21 bp, Artificial Sequence
  Synthetic
cgggacaacggcacagaaagt

SEQ ID NO: 36380 - DNA, 20 bp, Artificial Sequence
  Synthetic
aaactgcctagagaccggag

SEQ ID NO: 36381 - DNA, 21 bp, Artificial Sequence
  Synthetic
accaagggtccacgtcgaatg

SEQ ID NO: 36382 - DNA, 19 bp, Artificial Sequence
  Synthetic
aagtctcccgagcccgacc

SEQ ID NO: 36383 - DNA, 20 bp, Artificial Sequence
  Synthetic
gctcctggtcttccgcctcc

SEQ ID NO: 36384 - DNA, 22 bp, Artificial Sequence
  Synthetic
cgcctttgaggtcctgagagac

SEQ ID NO: 36385 - DNA, 19 bp, Artificial Sequence
  Synthetic
tgtagggagcactcggggc

SEQ ID NO: 36386 - DNA, 21 bp, Artificial Sequence
  Synthetic
gggctttgtggcaccaacctc

SEQ ID NO: 36387 - DNA, 19 bp, Artificial Sequence
  Synthetic
gggatgatgggcgggacca

SEQ ID NO: 36388 - DNA, 19 bp, Artificial Sequence
  Synthetic
ttacgctgcagcacggggc

SEQ ID NO: 36389 - DNA, 19 bp, Artificial Sequence
  Synthetic
cccgatgacccgatgctcg

SEQ ID NO: 36390 - DNA, 20 bp, Artificial Sequence
  Synthetic
cccttggaactgacgggcac

SEQ ID NO: 36391 - DNA, 22 bp, Artificial Sequence
  Synthetic
gccagactctcttcagtgaccg

SEQ ID NO: 36392 - DNA, 21 bp, Artificial Sequence
  Synthetic
gttgatggcatcgtcacgcac

SEQ ID NO: 36393 - DNA, 21 bp, Artificial Sequence
  Synthetic
tggaggcatgaaacggaagca

SEQ ID NO: 36394 - DNA, 22 bp, Artificial Sequence
  Synthetic
aagcggacagagcagactgttt

SEQ ID NO: 36395 - DNA, 19 bp, Artificial Sequence
  Synthetic
gccagtggggggggtgttt

SEQ ID NO: 36396 - DNA, 21 bp, Artificial Sequence
  Synthetic
caccaccgagggaaagttggt

SEQ ID NO: 36397 - DNA, 20 bp, Artificial Sequence
  Synthetic
agagtggggctgtggatggt

SEQ ID NO: 36398 - DNA, 21 bp, Artificial Sequence
  Synthetic
gggcctgtatgaagaaagagc

SEQ ID NO: 36399 - DNA, 22 bp, Artificial Sequence
  Synthetic
ggcccaaccttgccctatacca

SEQ ID NO: 36400 - DNA, 19 bp, Artificial Sequence
  Synthetic
tttagcaggccggtggtgg

SEQ ID NO: 36401 - DNA, 21 bp, Artificial Sequence
  Synthetic
cccggcaagccaaagtaggcc

SEQ ID NO: 36402 - DNA, 21 bp, Artificial Sequence
  Synthetic
acgtctcagggcatgcttcac

SEQ ID NO: 36403 - DNA, 22 bp, Artificial Sequence
  Synthetic
gcaacggaagatgcgtgcacta

SEQ ID NO: 36404 - DNA, 21 bp, Artificial Sequence
  Synthetic
cgtctttgtggagcccaaggg

SEQ ID NO: 36405 - DNA, 19 bp, Artificial Sequence
  Synthetic
ggcttcttgcgggccaaca

SEQ ID NO: 36406 - DNA, 19 bp, Artificial Sequence
  Synthetic
atgtggtggcgccagcgtg

SEQ ID NO: 36407 - DNA, 21 bp, Artificial Sequence
  Synthetic
gcctcaccagaaggcgttcct

SEQ ID NO: 36408 - DNA, 22 bp, Artificial Sequence
  Synthetic
ccggtctcgggactgtttgaga

SEQ ID NO: 36409 - DNA, 22 bp, Artificial Sequence
  Synthetic
ccagcctcaactacgactcgtg

SEQ ID NO: 36410 - DNA, 20 bp, Artificial Sequence
  Synthetic
gtctgcgagcgttagggtcc

SEQ ID NO: 36411 - DNA, 20 bp, Artificial Sequence
  Synthetic
agccgggcttcagcatcaat

SEQ ID NO: 36412 - DNA, 22 bp, Artificial Sequence
  Synthetic
catgccaagatcgctgagacgt

SEQ ID NO: 36413 - DNA, 20 bp, Artificial Sequence
  Synthetic
tacgcggtgttcacccggga

SEQ ID NO: 36414 - DNA, 22 bp, Artificial Sequence
  Synthetic
gctatttccaaacagcaggcac

SEQ ID NO: 36415 - DNA, 22 bp, Artificial Sequence
  Synthetic
acatgcttaatccctttgccac

SEQ ID NO: 36416 - DNA, 20 bp, Artificial Sequence
  Synthetic
tgcttgctaaaaaggctgct

SEQ ID NO: 36417 - DNA, 20 bp, Artificial Sequence
  Synthetic
atttcctggctcgtgtcacg

SEQ ID NO: 36418 - DNA, 21 bp, Artificial Sequence
  Synthetic
acagtggctagaaattgtgcc

SEQ ID NO: 36419 - DNA, 20 bp, Artificial Sequence
  Synthetic
gttaggtaagggacgctgct

SEQ ID NO: 36420 - DNA, 22 bp, Artificial Sequence
  Synthetic
aaatcaatgtcagggccatcaa

SEQ ID NO: 36421 - DNA, 22 bp, Artificial Sequence
  Synthetic
caatggatggccactaacacct

SEQ ID NO: 36422 - DNA, 20 bp, Artificial Sequence
  Synthetic
gaggtaaccatggacccact

SEQ ID NO: 36423 - DNA, 22 bp, Artificial Sequence
  Synthetic
actcacaggggtgcaaccaaat

SEQ ID NO: 36424 - DNA, 24 bp, Artificial Sequence
  Synthetic
gactgttgaaaaatgcaagggaat

SEQ ID NO: 36425 - DNA, 25 bp, Artificial Sequence
  Synthetic
gctttaccattattgcacagtcttt

SEQ ID NO: 36426 - DNA, 24 bp, Artificial Sequence
  Synthetic
cagcactacagtcttgtaatgtcc

SEQ ID NO: 36427 - DNA, 21 bp, Artificial Sequence
  Synthetic
acggtcgcgatactgtcggta

SEQ ID NO: 36428 - DNA, 21 bp, Artificial Sequence
  Synthetic
ccgaccctatacccaaaccac

SEQ ID NO: 36429 - DNA, 24 bp, Artificial Sequence
  Synthetic
agaaatcttaccctttgttcccag

SEQ ID NO: 36430 - DNA, 22 bp, Artificial Sequence
  Synthetic
gtttctgcagcaggataagtgg

SEQ ID NO: 36431 - DNA, 25 bp, Artificial Sequence
  Synthetic
tggatctttactttgcgtttcagat

SEQ ID NO: 36432 - DNA, 22 bp, Artificial Sequence
  Synthetic
tggaaccgtttgccttcactga

SEQ ID NO: 36433 - DNA, 21 bp, Artificial Sequence
  Synthetic
catgtcctgtccgctgtcacc

SEQ ID NO: 36434 - DNA, 24 bp, Artificial Sequence
  Synthetic
aaatgcacatattacccagtccaa

SEQ ID NO: 36435 - DNA, 25 bp, Artificial Sequence
  Synthetic
gcctgctttataccaatatagtgca

SEQ ID NO: 36436 - DNA, 24 bp, Artificial Sequence
  Synthetic
gtgtagcacatagtttttgtgtcc

SEQ ID NO: 36437 - DNA, 20 bp, Artificial Sequence
  Synthetic
tgtgtccaggcagacaagta

SEQ ID NO: 36438 - DNA, 20 bp, Artificial Sequence
  Synthetic
gtgccggaccctgttccaat

SEQ ID NO: 36439 - DNA, 21 bp, Artificial Sequence
  Synthetic
gctgtgataaaaacctggggt

SEQ ID NO: 36440 - DNA, 25 bp, Artificial Sequence
  Synthetic
ttttgatagcaaaataaggatggcc

SEQ ID NO: 36441 - DNA, 20 bp, Artificial Sequence
  Synthetic
catcgccaggcacaacatca

SEQ ID NO: 36442 - DNA, 24 bp, Artificial Sequence
  Synthetic
aaaatcagggtacttgcatgtagt

SEQ ID NO: 36443 - DNA, 24 bp, Artificial Sequence
  Synthetic
agcatacaacagacacacacataa

SEQ ID NO: 36444 - DNA, 20 bp, Artificial Sequence
  Synthetic
taaaggctaggggacggccg

SEQ ID NO: 36445 - DNA, 22 bp, Artificial Sequence
  Synthetic
ccgcccggaaacttaacgtctt

SEQ ID NO: 36446 - DNA, 20 bp, Artificial Sequence
  Synthetic
cccactttctcgcacgggac

SEQ ID NO: 36447 - DNA, 20 bp, Artificial Sequence
  Synthetic
tgacctcggggacacgcatc

SEQ ID NO: 36448 - DNA, 22 bp, Artificial Sequence
  Synthetic
tgggtgtagaacagagacgcga

SEQ ID NO: 36449 - DNA, 22 bp, Artificial Sequence
  Synthetic
cgcaagtcttggtgtagccaga

SEQ ID NO: 36450 - DNA, 20 bp, Artificial Sequence
  Synthetic
gatgatgtcgtaggcgccgc

SEQ ID NO: 36451 - DNA, 22 bp, Artificial Sequence
  Synthetic
cggagacgtccaaccctctgta

SEQ ID NO: 36452 - DNA, 21 bp, Artificial Sequence
  Synthetic
ccaagcggtacaggagaggtg

SEQ ID NO: 36453 - DNA, 22 bp, Artificial Sequence
  Synthetic
gcttgtttggaagcttgctgca

SEQ ID NO: 36454 - DNA, 20 bp, Artificial Sequence
  Synthetic
cgcaccataccctgccagga

SEQ ID NO: 36455 - DNA, 21 bp, Artificial Sequence
  Synthetic
aggaaaggtcccctgccagat

SEQ ID NO: 36456 - DNA, 22 bp, Artificial Sequence
  Synthetic
ggggcatggaagagatggaacc

SEQ ID NO: 36457 - DNA, 22 bp, Artificial Sequence
  Synthetic
gccatcttctcgcagaccctga

SEQ ID NO: 36458 - DNA, 20 bp, Artificial Sequence
  Synthetic
gtatctgcggcggccttgtg

SEQ ID NO: 36459 - DNA, 20 bp, Artificial Sequence
  Synthetic
gccacccgtgtcagttcgtg

SEQ ID NO: 36460 - DNA, 21 bp, Artificial Sequence
  Synthetic
gcacatcgcgcatctacaccg

SEQ ID NO: 36461 - DNA, 22 bp, Artificial Sequence
  Synthetic
ggcgaagtcatcggtttcaagc

SEQ ID NO: 36462 - DNA, 22 bp, Artificial Sequence
  Synthetic
ggattctgccgataccatgccg

SEQ ID NO: 36463 - DNA, 22 bp, Artificial Sequence
  Synthetic
tgaagctgctgaccatcgtcaa

SEQ ID NO: 36464 - DNA, 18 bp, Artificial Sequence
  Synthetic
gccaaagcaaaccccgcg

SEQ ID NO: 36465 - DNA, 21 bp, Artificial Sequence
  Synthetic
gcgccagcatgtcattgaccg

SEQ ID NO: 36466 - DNA, 20 bp, Artificial Sequence
  Synthetic
cgaaatcccgcagagcgtca

SEQ ID NO: 36467 - DNA, 20 bp, Artificial Sequence
  Synthetic
ggcggaacagttgaaggcgg

SEQ ID NO: 36468 - DNA, 20 bp, Artificial Sequence
  Synthetic
gggctggtgctgtcggttac

SEQ ID NO: 36469 - DNA, 20 bp, Artificial Sequence
  Synthetic
aatgaccgaccaaccgtggg

SEQ ID NO: 36470 - DNA, 20 bp, Artificial Sequence
  Synthetic
cagcttttgtttgcgcccga

SEQ ID NO: 36471 - DNA, 18 bp, Artificial Sequence
  Synthetic
gcgcgaagtgtggctggt

SEQ ID NO: 36472 - DNA, 19 bp, Artificial Sequence
  Synthetic
ccgcacgccgcattattgc

SEQ ID NO: 36473 - DNA, 19 bp, Artificial Sequence
  Synthetic
tggctgaaacaggccgccg

SEQ ID NO: 36474 - DNA, 20 bp, Artificial Sequence
  Synthetic
tttcagacggcatcggcagt

SEQ ID NO: 36475 - DNA, 19 bp, Artificial Sequence
  Synthetic
accgcctcgcccttttcgg

SEQ ID NO: 36476 - DNA, 21 bp, Artificial Sequence
  Synthetic
cgttcctgccggtaaacaggg

SEQ ID NO: 36477 - DNA, 18 bp, Artificial Sequence
  Synthetic
cgcgccgaacgacaaacc

SEQ ID NO: 36478 - DNA, 22 bp, Artificial Sequence
  Synthetic
acgcaaaacgaacaggcgattt

SEQ ID NO: 36479 - DNA, 20 bp, Artificial Sequence
  Synthetic
tctccgccaaacacgcgatg

SEQ ID NO: 36480 - DNA, 19 bp, Artificial Sequence
  Synthetic
gcgctgcatggcaggcatt

SEQ ID NO: 36481 - DNA, 20 bp, Artificial Sequence
  Synthetic
cccgtggggcgtgattgttc

SEQ ID NO: 36482 - DNA, 19 bp, Artificial Sequence
  Synthetic
cgaaaaaggcgcgcaaggc

SEQ ID NO: 36483 - DNA, 19 bp, Artificial Sequence
  Synthetic
atgcccgaaacaggcggcg

SEQ ID NO: 36484 - DNA, 20 bp, Artificial Sequence
  Synthetic
ttcagcctggtcttggtcgc

SEQ ID NO: 36485 - DNA, 22 bp, Artificial Sequence
  Synthetic
agcgcggaaggcataaaggaag

SEQ ID NO: 36486 - DNA, 22 bp, Artificial Sequence
  Synthetic
gcatcgccaaaaccactttcgg

SEQ ID NO: 36487 - DNA, 21 bp, Artificial Sequence
  Synthetic
accagtgcaatcggcgtatgc

SEQ ID NO: 36488 - DNA, 21 bp, Artificial Sequence
  Synthetic
ggcgtttgttcaactcggcga

SEQ ID NO: 36489 - DNA, 20 bp, Artificial Sequence
  Synthetic
gttttgtggcgccagcagtg

SEQ ID NO: 36490 - DNA, 19 bp, Artificial Sequence
  Synthetic
accgctgctccgctcgagt

SEQ ID NO: 36491 - DNA, 19 bp, Artificial Sequence
  Synthetic
ttgccatggacaacgccga

SEQ ID NO: 36492 - DNA, 20 bp, Artificial Sequence
  Synthetic
gacaagggcgacgtggaaga

SEQ ID NO: 36493 - DNA, 19 bp, Artificial Sequence
  Synthetic
gcctgcgaccgttacgacc

SEQ ID NO: 36494 - DNA, 19 bp, Artificial Sequence
  Synthetic
accgccctgacgttcttgg

SEQ ID NO: 36495 - DNA, 18 bp, Artificial Sequence
  Synthetic
atggccgagcttcacccg

SEQ ID NO: 36496 - DNA, 19 bp, Artificial Sequence
  Synthetic
tgtggcagccgctcaaacg

SEQ ID NO: 36497 - DNA, 22 bp, Artificial Sequence
  Synthetic
ggcatcggtttgaacgtcgtcc

SEQ ID NO: 36498 - DNA, 20 bp, Artificial Sequence
  Synthetic
tccgtcctgaccgccgttta

SEQ ID NO: 36499 - DNA, 22 bp, Artificial Sequence
  Synthetic
cctcgggctggatcaggcatac

SEQ ID NO: 36500 - DNA, 20 bp, Artificial Sequence
  Synthetic
ggcacggtgttggcagacaa

SEQ ID NO: 36501 - DNA, 22 bp, Artificial Sequence
  Synthetic
ggaaaacgtcgtcgcccacatc

SEQ ID NO: 36502 - DNA, 22 bp, Artificial Sequence
  Synthetic
gcgcccgaaatataggcgaaca

SEQ ID NO: 36503 - DNA, 18 bp, Artificial Sequence
  Synthetic
cgccgcatcatcgacgct

SEQ ID NO: 36504 - DNA, 22 bp, Artificial Sequence
  Synthetic
ccgactatgctgtctgccggta

SEQ ID NO: 36505 - DNA, 18 bp, Artificial Sequence
  Synthetic
gcccttcctgccaaggca

SEQ ID NO: 36506 - DNA, 19 bp, Artificial Sequence
  Synthetic
caccaacgccgaaaacgcc

SEQ ID NO: 36507 - DNA, 18 bp, Artificial Sequence
  Synthetic
ggcaaaggcttcggggct

SEQ ID NO: 36508 - DNA, 19 bp, Artificial Sequence
  Synthetic
acggcacagcagggcatcg

SEQ ID NO: 36509 - DNA, 19 bp, Artificial Sequence
  Synthetic
acggcctgcggcaaattcc

SEQ ID NO: 36510 - DNA, 21 bp, Artificial Sequence
  Synthetic
cgcgcttgttccaaaaggtgt

SEQ ID NO: 36511 - DNA, 19 bp, Artificial Sequence
  Synthetic
gcgcaaacctctgccgcat

SEQ ID NO: 36512 - DNA, 18 bp, Artificial Sequence
  Synthetic
cgtgttcacgccgcacct

SEQ ID NO: 36513 - DNA, 20 bp, Artificial Sequence
  Synthetic
tccgacctgggaacactggt

SEQ ID NO: 36514 - DNA, 19 bp, Artificial Sequence
  Synthetic
cggcctcgccttccaaacg

SEQ ID NO: 36515 - DNA, 22 bp, Artificial Sequence
  Synthetic
ttcgagatgaaaagcggtatcg

SEQ ID NO: 36516 - DNA, 20 bp, Artificial Sequence
  Synthetic
tgcccctgtgctcccaagta

SEQ ID NO: 36517 - DNA, 20 bp, Artificial Sequence
  Synthetic
cttcccctgcctcgaaacgc

SEQ ID NO: 36518 - DNA, 20 bp, Artificial Sequence
  Synthetic
tggcggtcaaagtcgaaccc

SEQ ID NO: 36519 - DNA, 19 bp, Artificial Sequence
  Synthetic
cgtttcaagctggggcgcg

SEQ ID NO: 36520 - DNA, 19 bp, Artificial Sequence
  Synthetic
catggtcgtcggcttggct

SEQ ID NO: 36521 - DNA, 21 bp, Artificial Sequence
  Synthetic
gcgatgctggatttgggcttg

SEQ ID NO: 36522 - DNA, 19 bp, Artificial Sequence
  Synthetic
aacgtccgaccatcgcacc

SEQ ID NO: 36523 - DNA, 19 bp, Artificial Sequence
  Synthetic
ccagcatttcgcacaccgc

SEQ ID NO: 36524 - DNA, 21 bp, Artificial Sequence
  Synthetic
gcggggcagcccatattgatg

SEQ ID NO: 36525 - DNA, 21 bp, Artificial Sequence
  Synthetic
cggcggtttgtttgaggacgg

SEQ ID NO: 36526 - DNA, 21 bp, Artificial Sequence
  Synthetic
tacccttcccgatagccgcac

SEQ ID NO: 36527 - DNA, 20 bp, Artificial Sequence
  Synthetic
ttcgccatatcgtccagcgg

SEQ ID NO: 36528 - DNA, 20 bp, Artificial Sequence
  Synthetic
agttcagatacaccggcgcg

SEQ ID NO: 36529 - DNA, 22 bp, Artificial Sequence
  Synthetic
cgtcggcgtattcctcgtcatg

SEQ ID NO: 36530 - DNA, 20 bp, Artificial Sequence
  Synthetic
gtggttatcgcccgtcgcaa

SEQ ID NO: 36531 - DNA, 22 bp, Artificial Sequence
  Synthetic
ccgattaccactgtgaaccgca

SEQ ID NO: 36532 - DNA, 20 bp, Artificial Sequence
  Synthetic
aaaccctcgaacatgccgcc

SEQ ID NO: 36533 - DNA, 20 bp, Artificial Sequence
  Synthetic
acctccccctaccggcacac

SEQ ID NO: 36534 - DNA, 20 bp, Artificial Sequence
  Synthetic
atctgccacgacatcgcctc

SEQ ID NO: 36535 - DNA, 19 bp, Artificial Sequence
  Synthetic
gcgcccaactgtccgacct

SEQ ID NO: 36536 - DNA, 21 bp, Artificial Sequence
  Synthetic
aaccctgaagaggatcagcgc

SEQ ID NO: 36537 - DNA, 22 bp, Artificial Sequence
  Synthetic
gtcgtcctataccccgccaaac

SEQ ID NO: 36538 - DNA, 21 bp, Artificial Sequence
  Synthetic
ggactggacatacacccggct

SEQ ID NO: 36539 - DNA, 22 bp, Artificial Sequence
  Synthetic
tgattggcagccgatcgaacaa

SEQ ID NO: 36540 - DNA, 17 bp, Artificial Sequence
  Synthetic
aacgttgtcgccggcgt

SEQ ID NO: 36541 - DNA, 19 bp, Artificial Sequence
  Synthetic
cccgaccgcatcctctgca

SEQ ID NO: 36542 - DNA, 20 bp, Artificial Sequence
  Synthetic
cttgcgggccgataaattcg

SEQ ID NO: 36543 - DNA, 22 bp, Artificial Sequence
  Synthetic
gcgaaaaaaccgtcttgtgcga

SEQ ID NO: 36544 - DNA, 18 bp, Artificial Sequence
  Synthetic
gctgcacgcctgcggaaa

SEQ ID NO: 36545 - DNA, 19 bp, Artificial Sequence
  Synthetic
cgaccggtttggatgcggt

SEQ ID NO: 36546 - DNA, 18 bp, Artificial Sequence
  Synthetic
cgccgcctgctcaatgca

SEQ ID NO: 36547 - DNA, 22 bp, Artificial Sequence
  Synthetic
cgatttacgagggcagcatcga

SEQ ID NO: 36548 - DNA, 18 bp, Artificial Sequence
  Synthetic
gcctgcgcaaaccggtca

SEQ ID NO: 36549 - DNA, 18 bp, Artificial Sequence
  Synthetic
acagttcttcgccgccgc

SEQ ID NO: 36550 - DNA, 18 bp, Artificial Sequence
  Synthetic
ttgccgcactcgatgccg

SEQ ID NO: 36551 - DNA, 19 bp, Artificial Sequence
  Synthetic
gtggcactgagcggacgtt

SEQ ID NO: 36552 - DNA, 21 bp, Artificial Sequence
  Synthetic
cctccaaccttgccgttgtcg

SEQ ID NO: 36553 - DNA, 22 bp, Artificial Sequence
  Synthetic
ggaagaagcggcggaaaaagtg

SEQ ID NO: 36554 - DNA, 19 bp, Artificial Sequence
  Synthetic
agctcggggctgtatcggg

SEQ ID NO: 36555 - DNA, 19 bp, Artificial Sequence
  Synthetic
acgcgctggcaaccctctc

SEQ ID NO: 36556 - DNA, 19 bp, Artificial Sequence
  Synthetic
accgcattcgccaccaccg

SEQ ID NO: 36557 - DNA, 19 bp, Artificial Sequence
  Synthetic
tcggcttcaaccacggcac

SEQ ID NO: 36558 - DNA, 19 bp, Artificial Sequence
  Synthetic
agaagccgcgggcagcaag

SEQ ID NO: 36559 - DNA, 19 bp, Artificial Sequence
  Synthetic
tccgcgaactcgaagcgtt

SEQ ID NO: 36560 - DNA, 21 bp, Artificial Sequence
  Synthetic
cgtcgaccagaccatcgccat

SEQ ID NO: 36561 - DNA, 22 bp, Artificial Sequence
  Synthetic
gctgcgatttcgaaccgtttgc

SEQ ID NO: 36562 - DNA, 21 bp, Artificial Sequence
  Synthetic
gcacatccaacagcagggtca

SEQ ID NO: 36563 - DNA, 19 bp, Artificial Sequence
  Synthetic
tcgcccgcatcttccgcac

SEQ ID NO: 36564 - DNA, 20 bp, Artificial Sequence
  Synthetic
gatggtttccagcggcgaga

SEQ ID NO: 36565 - DNA, 19 bp, Artificial Sequence
  Synthetic
cggtgggtttcgcgcttga

SEQ ID NO: 36566 - DNA, 19 bp, Artificial Sequence
  Synthetic
aaggccgtctgaagccgcc

SEQ ID NO: 36567 - DNA, 19 bp, Artificial Sequence
  Synthetic
gcctgtcgttgagcgcgtt

SEQ ID NO: 36568 - DNA, 18 bp, Artificial Sequence
  Synthetic
gcggcgtggaagcgtcta

SEQ ID NO: 36569 - DNA, 21 bp, Artificial Sequence
  Synthetic
ctccgaatccgtcgccttcaa

SEQ ID NO: 36570 - DNA, 20 bp, Artificial Sequence
  Synthetic
aggacttggcaggcgaagac

SEQ ID NO: 36571 - DNA, 18 bp, Artificial Sequence
  Synthetic
aaacgcgggctgctgctg

SEQ ID NO: 36572 - DNA, 18 bp, Artificial Sequence
  Synthetic
tacgccaatcggtgcgcc

SEQ ID NO: 36573 - DNA, 21 bp, Artificial Sequence
  Synthetic
aagcgtaactcaaggcaatgt

SEQ ID NO: 36574 - DNA, 20 bp, Artificial Sequence
  Synthetic
aaacacgccaaagcagaagt

SEQ ID NO: 36575 - DNA, 18 bp, Artificial Sequence
  Synthetic
acaggccgttgagcagcg

SEQ ID NO: 36576 - DNA, 19 bp, Artificial Sequence
  Synthetic
tggtgcgtcctgcccgttc

SEQ ID NO: 36577 - DNA, 19 bp, Artificial Sequence
  Synthetic
tccagccgtccgcgtatcc

SEQ ID NO: 36578 - DNA, 20 bp, Artificial Sequence
  Synthetic
cgtcgaagcgggcaacattg

SEQ ID NO: 36579 - DNA, 20 bp, Artificial Sequence
  Synthetic
tgctctgcccctgtttcagg

SEQ ID NO: 36580 - DNA, 18 bp, Artificial Sequence
  Synthetic
accagcttgccgccgaat

SEQ ID NO: 36581 - DNA, 21 bp, Artificial Sequence
  Synthetic
gacggctacgggctgaatcag

SEQ ID NO: 36582 - DNA, 20 bp, Artificial Sequence
  Synthetic
gccgtaccgctgaccttcct

SEQ ID NO: 36583 - DNA, 20 bp, Artificial Sequence
  Synthetic
tggcaaccttcaacagccgc

SEQ ID NO: 36584 - DNA, 18 bp, Artificial Sequence
  Synthetic
cgtgatgcccacccgcaa

SEQ ID NO: 36585 - DNA, 21 bp, Artificial Sequence
  Synthetic
aaaagccctcttcaatgacgg

SEQ ID NO: 36586 - DNA, 20 bp, Artificial Sequence
  Synthetic
gaaaggactcgatttgcgcc

SEQ ID NO: 36587 - DNA, 21 bp, Artificial Sequence
  Synthetic
tggcaatccaaaactcacgat

SEQ ID NO: 36588 - DNA, 19 bp, Artificial Sequence
  Synthetic
cagccagaagtcgtcggca

SEQ ID NO: 36589 - DNA, 19 bp, Artificial Sequence
  Synthetic
accggcctcacaccgtcca

SEQ ID NO: 36590 - DNA, 20 bp, Artificial Sequence
  Synthetic
atcaggcaacccagtgcctc

SEQ ID NO: 36591 - DNA, 19 bp, Artificial Sequence
  Synthetic
aacctaccccggcggcatg

SEQ ID NO: 36592 - DNA, 20 bp, Artificial Sequence
  Synthetic
tcctgcttcagacggcattt

SEQ ID NO: 36593 - DNA, 24 bp, Artificial Sequence
  Synthetic
aaagcattatgccaaatctgcaaa

SEQ ID NO: 36594 - DNA, 19 bp, Artificial Sequence
  Synthetic
tcaacaccggcagcgcagg

SEQ ID NO: 36595 - DNA, 22 bp, Artificial Sequence
  Synthetic
gcgcagatacgccaatgcttcc

SEQ ID NO: 36596 - DNA, 18 bp, Artificial Sequence
  Synthetic
accggcaggcgcaaaacc

SEQ ID NO: 36597 - DNA, 21 bp, Artificial Sequence
  Synthetic
ccgcttcttgattttccgccg

SEQ ID NO: 36598 - DNA, 21 bp, Artificial Sequence
  Synthetic
gtaatcgcgccggtttaacgc

SEQ ID NO: 36599 - DNA, 20 bp, Artificial Sequence
  Synthetic
ccccaaagtttgcggccgta

SEQ ID NO: 36600 - DNA, 21 bp, Artificial Sequence
  Synthetic
cgaggttgaagacatggccgc

SEQ ID NO: 36601 - DNA, 18 bp, Artificial Sequence
  Synthetic
gcgtttttcggctcgggc

SEQ ID NO: 36602 - DNA, 18 bp, Artificial Sequence
  Synthetic
cgccgtttccgtccgcta

SEQ ID NO: 36603 - DNA, 21 bp, Artificial Sequence
  Synthetic
cgatgctcaaacgcaactggc

SEQ ID NO: 36604 - DNA, 22 bp, Artificial Sequence
  Synthetic
aggcgatgaaacaatccgcgaa

SEQ ID NO: 36605 - DNA, 18 bp, Artificial Sequence
  Synthetic
cgccttcatgctgccggt

SEQ ID NO: 36606 - DNA, 19 bp, Artificial Sequence
  Synthetic
tatcgccctgagtgccgcc

SEQ ID NO: 36607 - DNA, 21 bp, Artificial Sequence
  Synthetic
ggattgtgttccttcggcggt

SEQ ID NO: 36608 - DNA, 19 bp, Artificial Sequence
  Synthetic
tcgacatcctgcggctggg

SEQ ID NO: 36609 - DNA, 22 bp, Artificial Sequence
  Synthetic
gcctgacttcggacgacatcaa

SEQ ID NO: 36610 - DNA, 19 bp, Artificial Sequence
  Synthetic
tcaaactcgccgccggctg

SEQ ID NO: 36611 - DNA, 20 bp, Artificial Sequence
  Synthetic
gcccgagttcgaccgcgata

SEQ ID NO: 36612 - DNA, 22 bp, Artificial Sequence
  Synthetic
cgaaactgaatcccgttgccgg

SEQ ID NO: 36613 - DNA, 21 bp, Artificial Sequence
  Synthetic
atccttcgtgcaggataccgc

SEQ ID NO: 36614 - DNA, 18 bp, Artificial Sequence
  Synthetic
cttcgcgggcttggtcga

SEQ ID NO: 36615 - DNA, 19 bp, Artificial Sequence
  Synthetic
acgaaatggcgcacgtcgg

SEQ ID NO: 36616 - DNA, 22 bp, Artificial Sequence
  Synthetic
gtgtcataatgcggcgttggtc

SEQ ID NO: 36617 - DNA, 20 bp, Artificial Sequence
  Synthetic
cgtaaaccgccgcactggag

SEQ ID NO: 36618 - DNA, 19 bp, Artificial Sequence
  Synthetic
aagccgccgccgaactctc

SEQ ID NO: 36619 - DNA, 22 bp, Artificial Sequence
  Synthetic
ggcgatggtgcatacccaatcg

SEQ ID NO: 36620 - DNA, 22 bp, Artificial Sequence
  Synthetic
ggcgcggatttggtctttgtca

SEQ ID NO: 36621 - DNA, 22 bp, Artificial Sequence
  Synthetic
ccgtttcaaaccttgcgacacg

SEQ ID NO: 36622 - DNA, 19 bp, Artificial Sequence
  Synthetic
aacaatgccgaccacgcct

SEQ ID NO: 36623 - DNA, 19 bp, Artificial Sequence
  Synthetic
aacgtggcaggcgaggttt

SEQ ID NO: 36624 - DNA, 19 bp, Artificial Sequence
  Synthetic
tccggcttttccttcggcg

SEQ ID NO: 36625 - DNA, 20 bp, Artificial Sequence
  Synthetic
tcgtttccgccatccacacg

SEQ ID NO: 36626 - DNA, 22 bp, Artificial Sequence
  Synthetic
cccaacagcgtaaacaccctgt

SEQ ID NO: 36627 - DNA, 22 bp, Artificial Sequence
  Synthetic
cgcaaagaattacgcacctggc

SEQ ID NO: 36628 - DNA, 19 bp, Artificial Sequence
  Synthetic
acgccggcactcttgaccg

SEQ ID NO: 36629 - DNA, 20 bp, Artificial Sequence
  Synthetic
ttgtcgccgaaagccaacat

SEQ ID NO: 36630 - DNA, 21 bp, Artificial Sequence
  Synthetic
acaacgccgtttttgccttcg

SEQ ID NO: 36631 - DNA, 19 bp, Artificial Sequence
  Synthetic
gccgcagataaccccgacg

SEQ ID NO: 36632 - DNA, 20 bp, Artificial Sequence
  Synthetic
gcgcgtgtcgttcagcactt

SEQ ID NO: 36633 - DNA, 21 bp, Artificial Sequence
  Synthetic
ccaattcgtcggccgccttag

SEQ ID NO: 36634 - DNA, 19 bp, Artificial Sequence
  Synthetic
tcacgcgcattcccctgcc

SEQ ID NO: 36635 - DNA, 22 bp, Artificial Sequence
  Synthetic
gctttgggaatcaggcgcacat

SEQ ID NO: 36636 - DNA, 22 bp, Artificial Sequence
  Synthetic
ccgatgccgaacgaaatacgga

SEQ ID NO: 36637 - DNA, 19 bp, Artificial Sequence
  Synthetic
tatgggcagggcgggttgc

SEQ ID NO: 36638 - DNA, 20 bp, Artificial Sequence
  Synthetic
tggagaaacggccatacagc

SEQ ID NO: 36639 - DNA, 19 bp, Artificial Sequence
  Synthetic
atgatgatgcagccgccga

SEQ ID NO: 36640 - DNA, 22 bp, Artificial Sequence
  Synthetic
cgccaaaatccaagccgtttgc

SEQ ID NO: 36641 - DNA, 18 bp, Artificial Sequence
  Synthetic
gcgtgcgttgccgaaagc

SEQ ID NO: 36642 - DNA, 20 bp, Artificial Sequence
  Synthetic
tttcaatcgccgttcccgcc

SEQ ID NO: 36643 - DNA, 19 bp, Artificial Sequence
  Synthetic
gcaggttcggcagcttcgg

SEQ ID NO: 36644 - DNA, 19 bp, Artificial Sequence
  Synthetic
cgccgacacgccgtcaatg

SEQ ID NO: 36645 - DNA, 21 bp, Artificial Sequence
  Synthetic
accatactcatgcgcgatgcc

SEQ ID NO: 36646 - DNA, 19 bp, Artificial Sequence
  Synthetic
cgtccatcacggcggcaaa

SEQ ID NO: 36647 - DNA, 22 bp, Artificial Sequence
  Synthetic
ccgcaaacttaatcacgccctg

SEQ ID NO: 36648 - DNA, 18 bp, Artificial Sequence
  Synthetic
attgccgtccgccgtcga

SEQ ID NO: 36649 - DNA, 19 bp, Artificial Sequence
  Synthetic
ttccacactgctcggcgcg

SEQ ID NO: 36650 - DNA, 18 bp, Artificial Sequence
  Synthetic
cccgagcgaggcgacatt

SEQ ID NO: 36651 - DNA, 19 bp, Artificial Sequence
  Synthetic
cccgacattgcccaggctt

SEQ ID NO: 36652 - DNA, 22 bp, Artificial Sequence
  Synthetic
cctgactgtatgccgggtcttg

SEQ ID NO: 36653 - DNA, 21 bp, Artificial Sequence
  Synthetic
gacatcattgccgccattgcc

SEQ ID NO: 36654 - DNA, 20 bp, Artificial Sequence
  Synthetic
ggttcggtgatgcggggcta

SEQ ID NO: 36655 - DNA, 20 bp, Artificial Sequence
  Synthetic
cggggcttttgctgcctttg

SEQ ID NO: 36656 - DNA, 19 bp, Artificial Sequence
  Synthetic
atcggcctgtgttcggcgg

SEQ ID NO: 36657 - DNA, 20 bp, Artificial Sequence
  Synthetic
acaccaataggcgctttccc

SEQ ID NO: 36658 - DNA, 21 bp, Artificial Sequence
  Synthetic
gtccctttggcttcaatcaca

SEQ ID NO: 36659 - DNA, 19 bp, Artificial Sequence
  Synthetic
atcgggggcaggtcaaacg

SEQ ID NO: 36660 - DNA, 19 bp, Artificial Sequence
  Synthetic
cccccttatgacgctgccg

SEQ ID NO: 36661 - DNA, 19 bp, Artificial Sequence
  Synthetic
aaaccgaccgctggctggc

SEQ ID NO: 36662 - DNA, 18 bp, Artificial Sequence
  Synthetic
ctggtggcgggtgctgtt

SEQ ID NO: 36663 - DNA, 21 bp, Artificial Sequence
  Synthetic
ggccgctacgacatcgtcaat

SEQ ID NO: 36664 - DNA, 21 bp, Artificial Sequence
  Synthetic
cctcgtcaaaatcaggatcgg

SEQ ID NO: 36665 - DNA, 22 bp, Artificial Sequence
  Synthetic
gcgaatccatcggtatggctgc

SEQ ID NO: 36666 - DNA, 20 bp, Artificial Sequence
  Synthetic
gcaacacgaagacggccaca

SEQ ID NO: 36667 - DNA, 20 bp, Artificial Sequence
  Synthetic
agcatcggcgtttcagacgg

SEQ ID NO: 36668 - DNA, 20 bp, Artificial Sequence
  Synthetic
cgagcgtggcgatgatgtcg

SEQ ID NO: 36669 - DNA, 22 bp, Artificial Sequence
  Synthetic
ccttctttgtcggcatcgagga

SEQ ID NO: 36670 - DNA, 19 bp, Artificial Sequence
  Synthetic
aacacaccgcctccgccac

SEQ ID NO: 36671 - DNA, 20 bp, Artificial Sequence
  Synthetic
gcggcaatggaggaagcagc

SEQ ID NO: 36672 - DNA, 19 bp, Artificial Sequence
  Synthetic
ggcgcgctgatgaccgaag

SEQ ID NO: 36673 - DNA, 21 bp, Artificial Sequence
  Synthetic
ggtaacggaaccgaacaggcg

SEQ ID NO: 36674 - DNA, 19 bp, Artificial Sequence
  Synthetic
tcatccggccttgcctggc

SEQ ID NO: 36675 - DNA, 18 bp, Artificial Sequence
  Synthetic
tcagcttcggcgttgccc

SEQ ID NO: 36676 - DNA, 22 bp, Artificial Sequence
  Synthetic
ccgcccagcacaaaatactcca

SEQ ID NO: 36677 - DNA, 22 bp, Artificial Sequence
  Synthetic
catgccgtctgaaacccaaacc

SEQ ID NO: 36678 - DNA, 22 bp, Artificial Sequence
  Synthetic
gcatgagcattgccgacatcaa

SEQ ID NO: 36679 - DNA, 18 bp, Artificial Sequence
  Synthetic
ttgcgcgacttggggcag

SEQ ID NO: 36680 - DNA, 19 bp, Artificial Sequence
  Synthetic
tcctcggcgaagggcagtc

SEQ ID NO: 36681 - DNA, 19 bp, Artificial Sequence
  Synthetic
agcggcgcgtggaacaagg

SEQ ID NO: 36682 - DNA, 19 bp, Artificial Sequence
  Synthetic
atgcagaagctgccgcccg

SEQ ID NO: 36683 - DNA, 21 bp, Artificial Sequence
  Synthetic
caaacactacggctcgctggt

SEQ ID NO: 36684 - DNA, 20 bp, Artificial Sequence
  Synthetic
gccgcagcagcatccgtatg

SEQ ID NO: 36685 - DNA, 22 bp, Artificial Sequence
  Synthetic
cctgctggaagccgattcttcc

SEQ ID NO: 36686 - DNA, 19 bp, Artificial Sequence
  Synthetic
caacatcccgccgcacaac

SEQ ID NO: 36687 - DNA, 19 bp, Artificial Sequence
  Synthetic
ccctgcgcatcaccttcgg

SEQ ID NO: 36688 - DNA, 20 bp, Artificial Sequence
  Synthetic
gccgacaaagcctacaccgc

SEQ ID NO: 36689 - DNA, 20 bp, Artificial Sequence
  Synthetic
ggttggcaacgatttcggcg

SEQ ID NO: 36690 - DNA, 19 bp, Artificial Sequence
  Synthetic
acggggctgtcttggttgc

SEQ ID NO: 36691 - DNA, 21 bp, Artificial Sequence
  Synthetic
agctgaccgcctttgtcgaag

SEQ ID NO: 36692 - DNA, 21 bp, Artificial Sequence
  Synthetic
gcaagtcttcgatgctgccgc

SEQ ID NO: 36693 - DNA, 21 bp, Artificial Sequence
  Synthetic
gcaagaatgcgccccgtatgc

SEQ ID NO: 36694 - DNA, 18 bp, Artificial Sequence
  Synthetic
aagccgaccgcgtgttgg

SEQ ID NO: 36695 - DNA, 22 bp, Artificial Sequence
  Synthetic
acaagacctgccggaaaatcca

SEQ ID NO: 36696 - DNA, 21 bp, Artificial Sequence
  Synthetic
gcgcgatttggtgcccgaatt

SEQ ID NO: 36697 - DNA, 21 bp, Artificial Sequence
  Synthetic
ggacaaattgcacagggttct

SEQ ID NO: 36698 - DNA, 20 bp, Artificial Sequence
  Synthetic
cggtcaaacgcagcggcata

SEQ ID NO: 36699 - DNA, 19 bp, Artificial Sequence
  Synthetic
acacggcatcggcacttcc

SEQ ID NO: 36700 - DNA, 22 bp, Artificial Sequence
  Synthetic
gggcagggattggttttgggta

SEQ ID NO: 36701 - DNA, 20 bp, Artificial Sequence
  Synthetic
cggattggacttcgggcagg

SEQ ID NO: 36702 - DNA, 19 bp, Artificial Sequence
  Synthetic
tgatggcggcggcaatcgg

SEQ ID NO: 36703 - DNA, 22 bp, Artificial Sequence
  Synthetic
ccacagcaacatagaatgcggc

SEQ ID NO: 36704 - DNA, 21 bp, Artificial Sequence
  Synthetic
cggcgagaaattcggtggtca

SEQ ID NO: 36705 - DNA, 20 bp, Artificial Sequence
  Synthetic
gtatgccttgtagcccgcgt

SEQ ID NO: 36706 - DNA, 18 bp, Artificial Sequence
  Synthetic
ccgaaagcggcgtcgtca

SEQ ID NO: 36707 - DNA, 22 bp, Artificial Sequence
  Synthetic
cgaaatcatcaacgacgacggc

SEQ ID NO: 36708 - DNA, 23 bp, Artificial Sequence
  Synthetic
gggtttgatgataggtttcgctt

SEQ ID NO: 36709 - DNA, 19 bp, Artificial Sequence
  Synthetic
tgggctattacggccgcgc

SEQ ID NO: 36710 - DNA, 20 bp, Artificial Sequence
  Synthetic
ttgcacgccgatttcgtggg

SEQ ID NO: 36711 - DNA, 20 bp, Artificial Sequence
  Synthetic
ccgaagtcgttggcggcaaa

SEQ ID NO: 36712 - DNA, 19 bp, Artificial Sequence
  Synthetic
gaaccaacaaggctgcggc

SEQ ID NO: 36713 - DNA, 19 bp, Artificial Sequence
  Synthetic
gcccgcgtccatccacatg

SEQ ID NO: 36714 - DNA, 19 bp, Artificial Sequence
  Synthetic
tgaacgcggcgagttggaa

SEQ ID NO: 36715 - DNA, 22 bp, Artificial Sequence
  Synthetic
agtgcatattgaggcgcggatg

SEQ ID NO: 36716 - DNA, 21 bp, Artificial Sequence
  Synthetic
ctgcgtttttcaagcgaggca

SEQ ID NO: 36717 - DNA, 21 bp, Artificial Sequence
  Synthetic
cgggaatccggaacccaaacg

SEQ ID NO: 36718 - DNA, 20 bp, Artificial Sequence
  Synthetic
tcaaggctggcgcaaggttt

SEQ ID NO: 36719 - DNA, 19 bp, Artificial Sequence
  Synthetic
tcgcccacatcgcccaatc

SEQ ID NO: 36720 - DNA, 19 bp, Artificial Sequence
  Synthetic
gcggcgtgggcaaaaccac

SEQ ID NO: 36721 - DNA, 18 bp, Artificial Sequence
  Synthetic
cgacacacgcgccaacct

SEQ ID NO: 36722 - DNA, 21 bp, Artificial Sequence
  Synthetic
gcaggcataccgcgacgtatt

SEQ ID NO: 36723 - DNA, 18 bp, Artificial Sequence
  Synthetic
aatgctgccactgccggg

SEQ ID NO: 36724 - DNA, 19 bp, Artificial Sequence
  Synthetic
gcggctggcacaaatcgcc

SEQ ID NO: 36725 - DNA, 20 bp, Artificial Sequence
  Synthetic
acgacgaagcggacgcattg

SEQ ID NO: 36726 - DNA, 19 bp, Artificial Sequence
  Synthetic
acgggcaaggcagccgatg

SEQ ID NO: 36727 - DNA, 22 bp, Artificial Sequence
  Synthetic
cgatgcggttttcactttcggc

SEQ ID NO: 36728 - DNA, 20 bp, Artificial Sequence
  Synthetic
gcttcaaccgccctgctctc

SEQ ID NO: 36729 - DNA, 21 bp, Artificial Sequence
  Synthetic
tgtctatccaaccggtgacag

SEQ ID NO: 36730 - DNA, 20 bp, Artificial Sequence
  Synthetic
ccggaatttcaggttgctgc

SEQ ID NO: 36731 - DNA, 20 bp, Artificial Sequence
  Synthetic
gaggatgagccgaaagaagc

SEQ ID NO: 36732 - DNA, 19 bp, Artificial Sequence
  Synthetic
ttcggctccaacaccgccc

SEQ ID NO: 36733 - DNA, 22 bp, Artificial Sequence
  Synthetic
ccgatgacttggatgtgcggat

SEQ ID NO: 36734 - DNA, 20 bp, Artificial Sequence
  Synthetic
gcctttgagggcttcggcaa

SEQ ID NO: 36735 - DNA, 21 bp, Artificial Sequence
  Synthetic
tcggaaaccgtctgccttgtc

SEQ ID NO: 36736 - DNA, 21 bp, Artificial Sequence
  Synthetic
gcttcctcatcggcggtgtac

SEQ ID NO: 36737 - DNA, 18 bp, Artificial Sequence
  Synthetic
ttacgcgcgggtatgggc

SEQ ID NO: 36738 - DNA, 19 bp, Artificial Sequence
  Synthetic
tgaccgatgccgtcaacgc

SEQ ID NO: 36739 - DNA, 19 bp, Artificial Sequence
  Synthetic
cgcgcgcaggactttacca

SEQ ID NO: 36740 - DNA, 18 bp, Artificial Sequence
  Synthetic
acgggctggacaacgcct

SEQ ID NO: 36741 - DNA, 21 bp, Artificial Sequence
  Synthetic
cggcttcgcggtaggtttcac

SEQ ID NO: 36742 - DNA, 22 bp, Artificial Sequence
  Synthetic
ccgttgacgaggacttttccgt

SEQ ID NO: 36743 - DNA, 20 bp, Artificial Sequence
  Synthetic
gccggtcagtgaaacggcag

SEQ ID NO: 36744 - DNA, 21 bp, Artificial Sequence
  Synthetic
aaggggaaaaaaccggcagga

SEQ ID NO: 36745 - DNA, 19 bp, Artificial Sequence
  Synthetic
tgccgctgcggagtacgac

SEQ ID NO: 36746 - DNA, 19 bp, Artificial Sequence
  Synthetic
gacctgcttctgcctccgc

SEQ ID NO: 36747 - DNA, 21 bp, Artificial Sequence
  Synthetic
gccttatgttgccgacagcgt

SEQ ID NO: 36748 - DNA, 20 bp, Artificial Sequence
  Synthetic
agtgcttcgggcagttggtt

SEQ ID NO: 36749 - DNA, 20 bp, Artificial Sequence
  Synthetic
atcgggcgtttagtttccgt

SEQ ID NO: 36750 - DNA, 20 bp, Artificial Sequence
  Synthetic
cgttcgtagctgtcgggctg

SEQ ID NO: 36751 - DNA, 20 bp, Artificial Sequence
  Synthetic
ccgaatgcagtaagtcggca

SEQ ID NO: 36752 - DNA, 20 bp, Artificial Sequence
  Synthetic
aatatttcgggcgcgggggc

SEQ ID NO: 36753 - DNA, 21 bp, Artificial Sequence
  Synthetic
taaggagcgcggtgttttggc

SEQ ID NO: 36754 - DNA, 22 bp, Artificial Sequence
  Synthetic
cgatttgtccgaaaacgccgaa

SEQ ID NO: 36755 - DNA, 18 bp, Artificial Sequence
  Synthetic
tgcatacgaggcacgccg

SEQ ID NO: 36756 - DNA, 20 bp, Artificial Sequence
  Synthetic
ggctcgcaggaactcatgct

SEQ ID NO: 36757 - DNA, 22 bp, Artificial Sequence
  Synthetic
ccgcgttaccctcgacaaacac

SEQ ID NO: 36758 - DNA, 18 bp, Artificial Sequence
  Synthetic
ccacgcgcatcatccgca

SEQ ID NO: 36759 - DNA, 21 bp, Artificial Sequence
  Synthetic
gaaacgtttcggctaccgcac

SEQ ID NO: 36760 - DNA, 21 bp, Artificial Sequence
  Synthetic
acagcatcgtcgtcaacggag

SEQ ID NO: 36761 - DNA, 22 bp, Artificial Sequence
  Synthetic
gacatgtggcaacaggcaggca

SEQ ID NO: 36762 - DNA, 19 bp, Artificial Sequence
  Synthetic
agacgatgcctgccgtgcc

SEQ ID NO: 36763 - DNA, 20 bp, Artificial Sequence
  Synthetic
ggaaagggcgatggcttcga

SEQ ID NO: 36764 - DNA, 21 bp, Artificial Sequence
  Synthetic
gcggctacggtaataacgccg

SEQ ID NO: 36765 - DNA, 20 bp, Artificial Sequence
  Synthetic
attgtaggctgcggtcagat

SEQ ID NO: 36766 - DNA, 20 bp, Artificial Sequence
  Synthetic
gcaggagcatcccgatccgc

SEQ ID NO: 36767 - DNA, 22 bp, Artificial Sequence
  Synthetic
caaacacctgctggttgccaat

SEQ ID NO: 36768 - DNA, 21 bp, Artificial Sequence
  Synthetic
ccgtagagtctggcgatgccg

SEQ ID NO: 36769 - DNA, 19 bp, Artificial Sequence
  Synthetic
agcgcgtccaaaccctgcg

SEQ ID NO: 36770 - DNA, 19 bp, Artificial Sequence
  Synthetic
cgagcagggtgcggatgac

SEQ ID NO: 36771 - DNA, 22 bp, Artificial Sequence
  Synthetic
cggtattcgtgcacccagcttt

SEQ ID NO: 36772 - DNA, 20 bp, Artificial Sequence
  Synthetic
gagagcttggcgacggactg

SEQ ID NO: 36773 - DNA, 20 bp, Artificial Sequence
  Synthetic
ttgcggtttgtcggtttgcg

SEQ ID NO: 36774 - DNA, 21 bp, Artificial Sequence
  Synthetic
gcggcttggtaaaggtaggcg

SEQ ID NO: 36775 - DNA, 19 bp, Artificial Sequence
  Synthetic
gggggccagcagtatcagc

SEQ ID NO: 36776 - DNA, 22 bp, Artificial Sequence
  Synthetic
ccgccgatgtgttgattttggg

SEQ ID NO: 36777 - DNA, 21 bp, Artificial Sequence
  Synthetic
ggtaccggttcgaccatcaat

SEQ ID NO: 36778 - DNA, 18 bp, Artificial Sequence
  Synthetic
tacacgatgccgcccgct

SEQ ID NO: 36779 - DNA, 20 bp, Artificial Sequence
  Synthetic
cgtgcctgttgttgtgtact

SEQ ID NO: 36780 - DNA, 20 bp, Artificial Sequence
  Synthetic
attgtgatgatgcgcgtggt

SEQ ID NO: 36781 - DNA, 22 bp, Artificial Sequence
  Synthetic
tgtccggtattgagcgcggata

SEQ ID NO: 36782 - DNA, 22 bp, Artificial Sequence
  Synthetic
cattgcgtgaaacataatccgc

SEQ ID NO: 36783 - DNA, 20 bp, Artificial Sequence
  Synthetic
cggcaaaggcagcggttgaa

SEQ ID NO: 36784 - DNA, 20 bp, Artificial Sequence
  Synthetic
gggttagggagagggcattg

SEQ ID NO: 36785 - DNA, 20 bp, Artificial Sequence
  Synthetic
tccgcaaatcaaagccgact

SEQ ID NO: 36786 - DNA, 21 bp, Artificial Sequence
  Synthetic
ggcgaccagggttttgccttc

SEQ ID NO: 36787 - DNA, 18 bp, Artificial Sequence
  Synthetic
aggcactgcatgagcggg

SEQ ID NO: 36788 - DNA, 22 bp, Artificial Sequence
  Synthetic
cggatggcgcgcaaaaaaagac

SEQ ID NO: 36789 - DNA, 20 bp, Artificial Sequence
  Synthetic
gcctcattgggcatgcgcta

SEQ ID NO: 36790 - DNA, 19 bp, Artificial Sequence
  Synthetic
acccttgcggacggaagcc

SEQ ID NO: 36791 - DNA, 22 bp, Artificial Sequence
  Synthetic
catagcttccggtttggtttct

SEQ ID NO: 36792 - DNA, 22 bp, Artificial Sequence
  Synthetic
ccggtttattcgcctcctgctt

SEQ ID NO: 36793 - DNA, 20 bp, Artificial Sequence
  Synthetic
acctgctgtcccaactgctg

SEQ ID NO: 36794 - DNA, 20 bp, Artificial Sequence
  Synthetic
caccgatgtcctgagccgtc

SEQ ID NO: 36795 - DNA, 19 bp, Artificial Sequence
  Synthetic
agtccgtgccgcattgccg

SEQ ID NO: 36796 - DNA, 20 bp, Artificial Sequence
  Synthetic
gcagacccgtaccgttgtgg

SEQ ID NO: 36797 - DNA, 22 bp, Artificial Sequence
  Synthetic
cccaatgaggcttcgtgggttt

SEQ ID NO: 36798 - DNA, 20 bp, Artificial Sequence
  Synthetic
atctagattcccgcctgcgc

SEQ ID NO: 36799 - DNA, 19 bp, Artificial Sequence
  Synthetic
tcgagccagaacacggcgg

SEQ ID NO: 36800 - DNA, 22 bp, Artificial Sequence
  Synthetic
ggaattcgcccaatgagtccca

SEQ ID NO: 36801 - DNA, 22 bp, Artificial Sequence
  Synthetic
caatgcgtggacgtaggcgacg

SEQ ID NO: 36802 - DNA, 19 bp, Artificial Sequence
  Synthetic
aaggcgggcgcttcggaac

SEQ ID NO: 36803 - DNA, 20 bp, Artificial Sequence
  Synthetic
tgttggccaagggcttcagc

SEQ ID NO: 36804 - DNA, 22 bp, Artificial Sequence
  Synthetic
gcgaaaaaggcgacgtatgacg

SEQ ID NO: 36805 - DNA, 19 bp, Artificial Sequence
  Synthetic
tggggttatgccggtgcgg

SEQ ID NO: 36806 - DNA, 18 bp, Artificial Sequence
  Synthetic
atccgaagccgcgatgcg

SEQ ID NO: 36807 - DNA, 18 bp, Artificial Sequence
  Synthetic
tccccttggcgcgtttcg

SEQ ID NO: 36808 - DNA, 21 bp, Artificial Sequence
  Synthetic
gttgtcagggaatggggcagg

SEQ ID NO: 36809 - DNA, 19 bp, Artificial Sequence
  Synthetic
tggtttgacggcaggacgg

SEQ ID NO: 36810 - DNA, 21 bp, Artificial Sequence
  Synthetic
cgcctaagaaacggatggcgg

SEQ ID NO: 36811 - DNA, 20 bp, Artificial Sequence
  Synthetic
gcgcaacatccggaatcggc

SEQ ID NO: 36812 - DNA, 19 bp, Artificial Sequence
  Synthetic
tgggtgcgatgagcgaggc

SEQ ID NO: 36813 - DNA, 19 bp, Artificial Sequence
  Synthetic
agactgcctgcgcgacaaa

SEQ ID NO: 36814 - DNA, 19 bp, Artificial Sequence
  Synthetic
gcgggcgtgtgcaatgaca

SEQ ID NO: 36815 - DNA, 20 bp, Artificial Sequence
  Synthetic
gccccgcggttcagaaactg

SEQ ID NO: 36816 - DNA, 19 bp, Artificial Sequence
  Synthetic
tttcaggcggcgggcttcc

SEQ ID NO: 36817 - DNA, 22 bp, Artificial Sequence
  Synthetic
gcctttgtccgcaacaagcatt

SEQ ID NO: 36818 - DNA, 20 bp, Artificial Sequence
  Synthetic
ctcgagaacagcgcgtcgcc

SEQ ID NO: 36819 - DNA, 19 bp, Artificial Sequence
  Synthetic
caaacaacccggaccccga

SEQ ID NO: 36820 - DNA, 22 bp, Artificial Sequence
  Synthetic
gaaacacggcgcggatatttcc

SEQ ID NO: 36821 - DNA, 21 bp, Artificial Sequence
  Synthetic
accggataccgcgaacacaat

SEQ ID NO: 36822 - DNA, 20 bp, Artificial Sequence
  Synthetic
cgtctttggcggcgggattt

SEQ ID NO: 36823 - DNA, 19 bp, Artificial Sequence
  Synthetic
caagtgtaggcgcggcgta

SEQ ID NO: 36824 - DNA, 21 bp, Artificial Sequence
  Synthetic
gacgcggctttttcctgcaat

SEQ ID NO: 36825 - DNA, 20 bp, Artificial Sequence
  Synthetic
ggcagtctatcaggccggca

SEQ ID NO: 36826 - DNA, 19 bp, Artificial Sequence
  Synthetic
cgggattgcctttgcacgc

SEQ ID NO: 36827 - DNA, 22 bp, Artificial Sequence
  Synthetic
ggtgtaccggttgtaacgccag

SEQ ID NO: 36828 - DNA, 19 bp, Artificial Sequence
  Synthetic
taaaggcggacgcggtcgc

SEQ ID NO: 36829 - DNA, 19 bp, Artificial Sequence
  Synthetic
acgggcgaacgttcggacg

SEQ ID NO: 36830 - DNA, 20 bp, Artificial Sequence
  Synthetic
ggtcgatgacttcctgcgcg

SEQ ID NO: 36831 - DNA, 19 bp, Artificial Sequence
  Synthetic
tcacccgcgccgagtacgt

SEQ ID NO: 36832 - DNA, 19 bp, Artificial Sequence
  Synthetic
tgcccgggcttcttcacgc

SEQ ID NO: 36833 - DNA, 19 bp, Artificial Sequence
  Synthetic
gtggtagccggtgccgtag

SEQ ID NO: 36834 - DNA, 18 bp, Artificial Sequence
  Synthetic
gtcgcctgcggttttggc

SEQ ID NO: 36835 - DNA, 19 bp, Artificial Sequence
  Synthetic
gccgataaaggcgcggtcg

SEQ ID NO: 36836 - DNA, 22 bp, Artificial Sequence
  Synthetic
gcaggcgtagtcttaggaggtg

SEQ ID NO: 36837 - DNA, 20 bp, Artificial Sequence
  Synthetic
gaagttgccgactacttcgc

SEQ ID NO: 36838 - DNA, 19 bp, Artificial Sequence
  Synthetic
cgatttggctggcaaggcg

SEQ ID NO: 36839 - DNA, 22 bp, Artificial Sequence
  Synthetic
ccgcctttgacgttgaaggaga

SEQ ID NO: 36840 - DNA, 22 bp, Artificial Sequence
  Synthetic
ggaaaagcggttgtcttcggca

SEQ ID NO: 36841 - DNA, 22 bp, Artificial Sequence
  Synthetic
ccgcgtggaaaaaaatcgtcca

SEQ ID NO: 36842 - DNA, 20 bp, Artificial Sequence
  Synthetic
ggacgcgaccgggaaattgc

SEQ ID NO: 36843 - DNA, 22 bp, Artificial Sequence
  Synthetic
ccctgatgcggtttgattcccg

SEQ ID NO: 36844 - DNA, 18 bp, Artificial Sequence
  Synthetic
aaaaaccgaccgcgccgc

SEQ ID NO: 36845 - DNA, 22 bp, Artificial Sequence
  Synthetic
cgggtttttcagcagctcaacc

SEQ ID NO: 36846 - DNA, 20 bp, Artificial Sequence
  Synthetic
aaacgggtgtggctgtcgcc

SEQ ID NO: 36847 - DNA, 19 bp, Artificial Sequence
  Synthetic
tgcgccgcactgttgtctt

SEQ ID NO: 36848 - DNA, 21 bp, Artificial Sequence
  Synthetic
cctcacatggttgagggtctt

SEQ ID NO: 36849 - DNA, 18 bp, Artificial Sequence
  Synthetic
tttggcgcctgcgtggac

SEQ ID NO: 36850 - DNA, 20 bp, Artificial Sequence
  Synthetic
gcgtatcggccgagcatcag

SEQ ID NO: 36851 - DNA, 19 bp, Artificial Sequence
  Synthetic
gcgggcgtttgacgacgac

SEQ ID NO: 36852 - DNA, 21 bp, Artificial Sequence
  Synthetic
cggcatgtggatggatcgata

SEQ ID NO: 36853 - DNA, 20 bp, Artificial Sequence
  Synthetic
gaagagggaaggggcggaac

SEQ ID NO: 36854 - DNA, 19 bp, Artificial Sequence
  Synthetic
gctttggaagtcgtgccgc

SEQ ID NO: 36855 - DNA, 22 bp, Artificial Sequence
  Synthetic
tggattacggggatgtgggtca

SEQ ID NO: 36856 - DNA, 19 bp, Artificial Sequence
  Synthetic
gcattgacacgcgaaccgc

SEQ ID NO: 36857 - DNA, 19 bp, Artificial Sequence
  Synthetic
cgtctgctccggctgaaca

SEQ ID NO: 36858 - DNA, 20 bp, Artificial Sequence
  Synthetic
gtttggtttccgccgcaacg

SEQ ID NO: 36859 - DNA, 18 bp, Artificial Sequence
  Synthetic
ccgtgggatgccgccaaa

SEQ ID NO: 36860 - DNA, 20 bp, Artificial Sequence
  Synthetic
tggctggataagggcgttgc

SEQ ID NO: 36861 - DNA, 22 bp, Artificial Sequence
  Synthetic
gatggaaaataggcgcaacggc

SEQ ID NO: 36862 - DNA, 18 bp, Artificial Sequence
  Synthetic
accgcttttcctgccgcg

SEQ ID NO: 36863 - DNA, 22 bp, Artificial Sequence
  Synthetic
gctcctagtacgagaggaccgg

SEQ ID NO: 36864 - DNA, 21 bp, Artificial Sequence
  Synthetic
ggcaagcctttcaacaatccg

SEQ ID NO: 36865 - DNA, 21 bp, Artificial Sequence
  Synthetic
aacagacggcatcagaagcgt

SEQ ID NO: 36866 - DNA, 20 bp, Artificial Sequence
  Synthetic
ccatttttcgcgcacggtca

SEQ ID NO: 36867 - DNA, 19 bp, Artificial Sequence
  Synthetic
cgcagggggattcggcact

SEQ ID NO: 36868 - DNA, 20 bp, Artificial Sequence
  Synthetic
gtatcgctgcggatgaggcc

SEQ ID NO: 36869 - DNA, 18 bp, Artificial Sequence
  Synthetic
agcaacgccgcttcgtcg

SEQ ID NO: 36870 - DNA, 19 bp, Artificial Sequence
  Synthetic
aaagacgcgcccgccacag

SEQ ID NO: 36871 - DNA, 19 bp, Artificial Sequence
  Synthetic
tatgccccggtgcgaacgg

SEQ ID NO: 36872 - DNA, 20 bp, Artificial Sequence
  Synthetic
cagggaaggaaaccgtcggc

SEQ ID NO: 36873 - DNA, 20 bp, Artificial Sequence
  Synthetic
gccggttatatctgcggcgg

SEQ ID NO: 36874 - DNA, 19 bp, Artificial Sequence
  Synthetic
cggtcggcgttgacggtaa

SEQ ID NO: 36875 - DNA, 21 bp, Artificial Sequence
  Synthetic
tacagactctgggcggctcgg

SEQ ID NO: 36876 - DNA, 19 bp, Artificial Sequence
  Synthetic
tgcgcggcaaagtgctcaa

SEQ ID NO: 36877 - DNA, 21 bp, Artificial Sequence
  Synthetic
gcctgcctattcgcccgaatc

SEQ ID NO: 36878 - DNA, 21 bp, Artificial Sequence
  Synthetic
cgaagcggacgagctcgaaga

SEQ ID NO: 36879 - DNA, 18 bp, Artificial Sequence
  Synthetic
acggcaatacctccgccg

SEQ ID NO: 36880 - DNA, 22 bp, Artificial Sequence
  Synthetic
gcacaatgtccgcatcccgaat

SEQ ID NO: 36881 - DNA, 20 bp, Artificial Sequence
  Synthetic
gggaagcgttgggcgtgaac

SEQ ID NO: 36882 - DNA, 21 bp, Artificial Sequence
  Synthetic
cgggtaacgcaggtttggtgc

SEQ ID NO: 36883 - DNA, 22 bp, Artificial Sequence
  Synthetic
agctgcaggctgaagatttccg

SEQ ID NO: 36884 - DNA, 18 bp, Artificial Sequence
  Synthetic
cacgcgcgcatttctgcc

SEQ ID NO: 36885 - DNA, 20 bp, Artificial Sequence
  Synthetic
cgatgtcttcgggcgcaagg

SEQ ID NO: 36886 - DNA, 20 bp, Artificial Sequence
  Synthetic
gggattgctttgccggtcgg

SEQ ID NO: 36887 - DNA, 20 bp, Artificial Sequence
  Synthetic
ttttcccgtccatccgcctg

SEQ ID NO: 36888 - DNA, 22 bp, Artificial Sequence
  Synthetic
gtgcggcatcttacgaactcga

SEQ ID NO: 36889 - DNA, 19 bp, Artificial Sequence
  Synthetic
cgcgaagaggcaaaaggcg

SEQ ID NO: 36890 - DNA, 19 bp, Artificial Sequence
  Synthetic
agcgcgctgagttcgtctt

SEQ ID NO: 36891 - DNA, 20 bp, Artificial Sequence
  Synthetic
ttagcgtgcaactgcctgcg

SEQ ID NO: 36892 - DNA, 20 bp, Artificial Sequence
  Synthetic
cgacgacgaccgctacctct

SEQ ID NO: 36893 - DNA, 21 bp, Artificial Sequence
  Synthetic
cgaggcaggctttttacgcgg

SEQ ID NO: 36894 - DNA, 19 bp, Artificial Sequence
  Synthetic
gcgttgccgggatttgccc

SEQ ID NO: 36895 - DNA, 19 bp, Artificial Sequence
  Synthetic
gctggatgctgcccgaagg

SEQ ID NO: 36896 - DNA, 20 bp, Artificial Sequence
  Synthetic
aaatcctcaaaggcggcggc

SEQ ID NO: 36897 - DNA, 20 bp, Artificial Sequence
  Synthetic
cttggagtcagttcccggcc

SEQ ID NO: 36898 - DNA, 21 bp, Artificial Sequence
  Synthetic
cgcatccacctgctgaatccc

SEQ ID NO: 36899 - DNA, 20 bp, Artificial Sequence
  Synthetic
ttgacgttccacgcgtgaaa

SEQ ID NO: 36900 - DNA, 20 bp, Artificial Sequence
  Synthetic
gcggattttgccgatggcct

SEQ ID NO: 36901 - DNA, 21 bp, Artificial Sequence
  Synthetic
gggcgcggatttcgatatcga

SEQ ID NO: 36902 - DNA, 22 bp, Artificial Sequence
  Synthetic
cgtaaccgtcgacgtattcggc

SEQ ID NO: 36903 - DNA, 22 bp, Artificial Sequence
  Synthetic
actccatcgacgcactgatacg

SEQ ID NO: 36904 - DNA, 21 bp, Artificial Sequence
  Synthetic
tgccggtcgcaatacctttga

SEQ ID NO: 36905 - DNA, 21 bp, Artificial Sequence
  Synthetic
aggcattacgctgcaacttgc

SEQ ID NO: 36906 - DNA, 20 bp, Artificial Sequence
  Synthetic
ggacgagggcgagaaagcgc

SEQ ID NO: 36907 - DNA, 21 bp, Artificial Sequence
  Synthetic
ccgatctgcctgccattctgc

SEQ ID NO: 36908 - DNA, 20 bp, Artificial Sequence
  Synthetic
gcggaggggacaaagatgcc

SEQ ID NO: 36909 - DNA, 18 bp, Artificial Sequence
  Synthetic
gcaggcgcacgcaggatt

SEQ ID NO: 36910 - DNA, 21 bp, Artificial Sequence
  Synthetic
gccctgatgaacggcggagaa

SEQ ID NO: 36911 - DNA, 20 bp, Artificial Sequence
  Synthetic
caggcgttggaaatggcgga

SEQ ID NO: 36912 - DNA, 20 bp, Artificial Sequence
  Synthetic
ccgctggacgatgccaacac

SEQ ID NO: 36913 - DNA, 18 bp, Artificial Sequence
  Synthetic
accgaacgcgctgccgat

SEQ ID NO: 36914 - DNA, 19 bp, Artificial Sequence
  Synthetic
tgcaacacacgtccgacgg

SEQ ID NO: 36915 - DNA, 19 bp, Artificial Sequence
  Synthetic
gcctctccggcggcatcaa

SEQ ID NO: 36916 - DNA, 19 bp, Artificial Sequence
  Synthetic
tggcaggcaaccgaccacg

SEQ ID NO: 36917 - DNA, 19 bp, Artificial Sequence
  Synthetic
ctggcgttgaagcagcagc

SEQ ID NO: 36918 - DNA, 21 bp, Artificial Sequence
  Synthetic
ggttggacacggtgttggagc

SEQ ID NO: 36919 - DNA, 19 bp, Artificial Sequence
  Synthetic
gaatgcggtcagcgtgtgc

SEQ ID NO: 36920 - DNA, 22 bp, Artificial Sequence
  Synthetic
gccgttttgttcctgctgaacc

SEQ ID NO: 36921 - DNA, 19 bp, Artificial Sequence
  Synthetic
cggcaagcgcgatatgggc

SEQ ID NO: 36922 - DNA, 20 bp, Artificial Sequence
  Synthetic
cggtttcgacatcacgccca

SEQ ID NO: 36923 - DNA, 21 bp, Artificial Sequence
  Synthetic
catcatccatccggcaggctc

SEQ ID NO: 36924 - DNA, 19 bp, Artificial Sequence
  Synthetic
gcgttcggcggcatcatcg

SEQ ID NO: 36925 - DNA, 22 bp, Artificial Sequence
  Synthetic
gtcgccatcgttaccgataccg

SEQ ID NO: 36926 - DNA, 21 bp, Artificial Sequence
  Synthetic
gctgaccgccattgtgttcgt

SEQ ID NO: 36927 - DNA, 19 bp, Artificial Sequence
  Synthetic
ttccgtcatcgccaccgcc

SEQ ID NO: 36928 - DNA, 22 bp, Artificial Sequence
  Synthetic
ccgccgatgcctgtatcaactt

SEQ ID NO: 36929 - DNA, 23 bp, Artificial Sequence
  Synthetic
caaatcaaacgcataagttcgct

SEQ ID NO: 36930 - DNA, 23 bp, Artificial Sequence
  Synthetic
ctcctaattcatctttgacggca

SEQ ID NO: 36931 - DNA, 20 bp, Artificial Sequence
  Synthetic
aacgtggcggcatcggattg

SEQ ID NO: 36932 - DNA, 20 bp, Artificial Sequence
  Synthetic
tgtgtttttaccgccacacg

SEQ ID NO: 36933 - DNA, 21 bp, Artificial Sequence
  Synthetic
agatgccgccgattatgatga

SEQ ID NO: 36934 - DNA, 21 bp, Artificial Sequence
  Synthetic
gcaataacgcttcggtcggta

SEQ ID NO: 36935 - DNA, 21 bp, Artificial Sequence
  Synthetic
gcttcaaacatttcacgcgaa

SEQ ID NO: 36936 - DNA, 20 bp, Artificial Sequence
  Synthetic
aatggcgcgaaaaggctaaa

SEQ ID NO: 36937 - DNA, 22 bp, Artificial Sequence
  Synthetic
gctatcacgccaatctcggtat

SEQ ID NO: 36938 - DNA, 18 bp, Artificial Sequence
  Synthetic
gcaacctgcgcctgcgtt

SEQ ID NO: 36939 - DNA, 22 bp, Artificial Sequence
  Synthetic
ggggtaaattcgcctccctgtt

SEQ ID NO: 36940 - DNA, 19 bp, Artificial Sequence
  Synthetic
gatgcgatggggctcaggg

SEQ ID NO: 36941 - DNA, 19 bp, Artificial Sequence
  Synthetic
aatacgtccgcccgccgtg

SEQ ID NO: 36942 - DNA, 20 bp, Artificial Sequence
  Synthetic
gaaggcggtttcgaccagga

SEQ ID NO: 36943 - DNA, 18 bp, Artificial Sequence
  Synthetic
tccaagccctgcaacgcg

SEQ ID NO: 36944 - DNA, 19 bp, Artificial Sequence
  Synthetic
ttctacggccccgccctgt

SEQ ID NO: 36945 - DNA, 20 bp, Artificial Sequence
  Synthetic
gcaaaacggcgcgcatttcg

SEQ ID NO: 36946 - DNA, 21 bp, Artificial Sequence
  Synthetic
ggcgttgttcagcggtctgta

SEQ ID NO: 36947 - DNA, 20 bp, Artificial Sequence
  Synthetic
cgcgcatacaatggcgtgtc

SEQ ID NO: 36948 - DNA, 21 bp, Artificial Sequence
  Synthetic
gtgcgtgatgttttccgtcgg

SEQ ID NO: 36949 - DNA, 19 bp, Artificial Sequence
  Synthetic
gccgcatcgttgatgtgcc

SEQ ID NO: 36950 - DNA, 20 bp, Artificial Sequence
  Synthetic
gcatgcccaacgaggcttcg

SEQ ID NO: 36951 - DNA, 20 bp, Artificial Sequence
  Synthetic
tggctgatgatggcggcaac

SEQ ID NO: 36952 - DNA, 22 bp, Artificial Sequence
  Synthetic
tgatggacacctcgttccacca

SEQ ID NO: 36953 - DNA, 18 bp, Artificial Sequence
  Synthetic
acgctgcgtgtcggtgct

SEQ ID NO: 36954 - DNA, 18 bp, Artificial Sequence
  Synthetic
aaacgccgccgacatcga

SEQ ID NO: 36955 - DNA, 20 bp, Artificial Sequence
  Synthetic
cccgacaacatcaccaccga

SEQ ID NO: 36956 - DNA, 19 bp, Artificial Sequence
  Synthetic
tgccgcggttacttcgtgt

SEQ ID NO: 36957 - DNA, 19 bp, Artificial Sequence
  Synthetic
ctgtctatcggcgaccgcg

SEQ ID NO: 36958 - DNA, 19 bp, Artificial Sequence
  Synthetic
tgatgctgggacgcgcgtc

SEQ ID NO: 36959 - DNA, 20 bp, Artificial Sequence
  Synthetic
ccgctttgctggtggacgat

SEQ ID NO: 36960 - DNA, 21 bp, Artificial Sequence
  Synthetic
tgggtttgggtgcgagtttga

SEQ ID NO: 36961 - DNA, 18 bp, Artificial Sequence
  Synthetic
tggacggctgcggcttga

SEQ ID NO: 36962 - DNA, 21 bp, Artificial Sequence
  Synthetic
gcgacatcgaattgctggcgg

SEQ ID NO: 36963 - DNA, 22 bp, Artificial Sequence
  Synthetic
ggtttgcaaggcttcagcaaca

SEQ ID NO: 36964 - DNA, 21 bp, Artificial Sequence
  Synthetic
gcgacaacccgcgtttggaaa

SEQ ID NO: 36965 - DNA, 20 bp, Artificial Sequence
  Synthetic
ccgccgcgatggaagtttcc

SEQ ID NO: 36966 - DNA, 20 bp, Artificial Sequence
  Synthetic
attgacggcaaaggtcagga

SEQ ID NO: 36967 - DNA, 20 bp, Artificial Sequence
  Synthetic
taaggggcggttggctgttc

SEQ ID NO: 36968 - DNA, 20 bp, Artificial Sequence
  Synthetic
gggaagagccggacggacag

SEQ ID NO: 36969 - DNA, 20 bp, Artificial Sequence
  Synthetic
cggcaaacaatacgcacggc

SEQ ID NO: 36970 - DNA, 19 bp, Artificial Sequence
  Synthetic
gccttgtcctgccgcatct

SEQ ID NO: 36971 - DNA, 19 bp, Artificial Sequence
  Synthetic
tgttcagcgttttgcccgc

SEQ ID NO: 36972 - DNA, 19 bp, Artificial Sequence
  Synthetic
tgacggtgttgcctgccgc

SEQ ID NO: 36973 - DNA, 22 bp, Artificial Sequence
  Synthetic
gtcgagcctgtgaaaatcacgc

SEQ ID NO: 36974 - DNA, 19 bp, Artificial Sequence
  Synthetic
acgacggttcggatgccgg

SEQ ID NO: 36975 - DNA, 19 bp, Artificial Sequence
  Synthetic
gcgtccagggtcagcttgg

SEQ ID NO: 36976 - DNA, 19 bp, Artificial Sequence
  Synthetic
acgatgccgcacactgccg

SEQ ID NO: 36977 - DNA, 19 bp, Artificial Sequence
  Synthetic
tcgggcatcaccagcctga

SEQ ID NO: 36978 - DNA, 21 bp, Artificial Sequence
  Synthetic
cgtccgcttccaagccgaaat

SEQ ID NO: 36979 - DNA, 19 bp, Artificial Sequence
  Synthetic
tggcggctgatgtcgagcg

SEQ ID NO: 36980 - DNA, 20 bp, Artificial Sequence
  Synthetic
cgggcgcactctatccgatg

SEQ ID NO: 36981 - DNA, 19 bp, Artificial Sequence
  Synthetic
tgccaagtgcagacggccg

SEQ ID NO: 36982 - DNA, 20 bp, Artificial Sequence
  Synthetic
ttcaggtggacgtggtggct

SEQ ID NO: 36983 - DNA, 19 bp, Artificial Sequence
  Synthetic
agggttgggctggggcttg

SEQ ID NO: 36984 - DNA, 20 bp, Artificial Sequence
  Synthetic
tggtatccggttgttcgcac

SEQ ID NO: 36985 - DNA, 20 bp, Artificial Sequence
  Synthetic
ccagcaatttgcggcgcaac

SEQ ID NO: 36986 - DNA, 22 bp, Artificial Sequence
  Synthetic
ccacgcgtgtttccctgtcatc

SEQ ID NO: 36987 - DNA, 22 bp, Artificial Sequence
  Synthetic
gtggtggcggtagtgtcatagg

SEQ ID NO: 36988 - DNA, 20 bp, Artificial Sequence
  Synthetic
cgcggtcggaatgttcgtcc

SEQ ID NO: 36989 - DNA, 20 bp, Artificial Sequence
  Synthetic
cccgcgtttttcgtccaccc

SEQ ID NO: 36990 - DNA, 19 bp, Artificial Sequence
  Synthetic
ccggctgccaagcgtttgg

SEQ ID NO: 36991 - DNA, 20 bp, Artificial Sequence
  Synthetic
gggcttccagtgcggcaaat

SEQ ID NO: 36992 - DNA, 21 bp, Artificial Sequence
  Synthetic
acgatgccgtctgaaaagccg

SEQ ID NO: 36993 - DNA, 18 bp, Artificial Sequence
  Synthetic
ggcgcggtgtggaaacga

SEQ ID NO: 36994 - DNA, 22 bp, Artificial Sequence
  Synthetic
ccaagtccaaatccaagccgga

SEQ ID NO: 36995 - DNA, 19 bp, Artificial Sequence
  Synthetic
actgcggctgtcccagtcc

SEQ ID NO: 36996 - DNA, 22 bp, Artificial Sequence
  Synthetic
gccggccgatgatgaaaatgct

SEQ ID NO: 36997 - DNA, 22 bp, Artificial Sequence
  Synthetic
cgccgaacctgaaaacaacaca

SEQ ID NO: 36998 - DNA, 22 bp, Artificial Sequence
  Synthetic
cgtttgtctgcctgctttgtgt

SEQ ID NO: 36999 - DNA, 21 bp, Artificial Sequence
  Synthetic
gcttaaccgccgtcgtcaacg

SEQ ID NO: 37000 - DNA, 22 bp, Artificial Sequence
  Synthetic
cgcaaccattgttttgggcgac

SEQ ID NO: 37001 - DNA, 20 bp, Artificial Sequence
  Synthetic
gatgcggcaactgcgatgga

SEQ ID NO: 37002 - DNA, 20 bp, Artificial Sequence
  Synthetic
ccttccaaagacggcagcca

SEQ ID NO: 37003 - DNA, 19 bp, Artificial Sequence
  Synthetic
caactgcttcatcggcgcg

SEQ ID NO: 37004 - DNA, 19 bp, Artificial Sequence
  Synthetic
tggtcgcccgtcggtttgc

SEQ ID NO: 37005 - DNA, 21 bp, Artificial Sequence
  Synthetic
cccatgctgtcatctcaccgg

SEQ ID NO: 37006 - DNA, 23 bp, Artificial Sequence
  Synthetic
gggttatggttaatatccgcaca

SEQ ID NO: 37007 - DNA, 19 bp, Artificial Sequence
  Synthetic
cggggtgcataccgacagc

SEQ ID NO: 37008 - DNA, 20 bp, Artificial Sequence
  Synthetic
catcgattatgccgcaccgc

SEQ ID NO: 37009 - DNA, 22 bp, Artificial Sequence
  Synthetic
cttccgtgcagactgtcccaaa

SEQ ID NO: 37010 - DNA, 19 bp, Artificial Sequence
  Synthetic
cgcataccgctccctgtcc

SEQ ID NO: 37011 - DNA, 24 bp, Artificial Sequence
  Synthetic
caaatgccgtctgaaaattggttt

SEQ ID NO: 37012 - DNA, 21 bp, Artificial Sequence
  Synthetic
gacggcatctgtacggtgtcc

SEQ ID NO: 37013 - DNA, 22 bp, Artificial Sequence
  Synthetic
ggatgacgggggtcagttcaag

SEQ ID NO: 37014 - DNA, 20 bp, Artificial Sequence
  Synthetic
tgtgggcttcggggtctttg

SEQ ID NO: 37015 - DNA, 23 bp, Artificial Sequence
  Synthetic
gtactgcatatctggtctttggc

SEQ ID NO: 37016 - DNA, 21 bp, Artificial Sequence
  Synthetic
gctcgccgagccgattcaaac

SEQ ID NO: 37017 - DNA, 22 bp, Artificial Sequence
  Synthetic
atcatcggcaaactcaccgcta

SEQ ID NO: 37018 - DNA, 21 bp, Artificial Sequence
  Synthetic
cgcacgagcagaaaccgaatc

SEQ ID NO: 37019 - DNA, 19 bp, Artificial Sequence
  Synthetic
cgcctgtccgcacccaatt

SEQ ID NO: 37020 - DNA, 18 bp, Artificial Sequence
  Synthetic
ctacgaccaggcgcgcaa

SEQ ID NO: 37021 - DNA, 22 bp, Artificial Sequence
  Synthetic
caggcagtgatgcaaaacagcc

SEQ ID NO: 37022 - DNA, 18 bp, Artificial Sequence
  Synthetic
agaagccgcacccgcaca

SEQ ID NO: 37023 - DNA, 18 bp, Artificial Sequence
  Synthetic
gctgcaaagcgtcagccg

SEQ ID NO: 37024 - DNA, 22 bp, Artificial Sequence
  Synthetic
ccgtctgaaaaccttggagcga

SEQ ID NO: 37025 - DNA, 19 bp, Artificial Sequence
  Synthetic
atgaagctgcggacgggcg

SEQ ID NO: 37026 - DNA, 19 bp, Artificial Sequence
  Synthetic
ggcgcagttttccgccctt

SEQ ID NO: 37027 - DNA, 21 bp, Artificial Sequence
  Synthetic
acgtcgcctttttgaaacgcg

SEQ ID NO: 37028 - DNA, 19 bp, Artificial Sequence
  Synthetic
ctcgtctgccgtcatcgcc

SEQ ID NO: 37029 - DNA, 21 bp, Artificial Sequence
  Synthetic
ttttcggcaaacagttcggcg

SEQ ID NO: 37030 - DNA, 19 bp, Artificial Sequence
  Synthetic
cgtaggttgtgccgtcggg

SEQ ID NO: 37031 - DNA, 21 bp, Artificial Sequence
  Synthetic
tgaccgcctctcttgcctaca

SEQ ID NO: 37032 - DNA, 18 bp, Artificial Sequence
  Synthetic
ggcagggttcggcgtgtt

SEQ ID NO: 37033 - DNA, 22 bp, Artificial Sequence
  Synthetic
tggctgcctgattcgatggaag

SEQ ID NO: 37034 - DNA, 20 bp, Artificial Sequence
  Synthetic
gcggagtttttgggcgtgac

SEQ ID NO: 37035 - DNA, 19 bp, Artificial Sequence
  Synthetic
aaccgcctcgtccgtgtcg

SEQ ID NO: 37036 - DNA, 22 bp, Artificial Sequence
  Synthetic
ctttgacaccattgtgccgctg

SEQ ID NO: 37037 - DNA, 22 bp, Artificial Sequence
  Synthetic
gggtgctgaaaaaactggcgga

SEQ ID NO: 37038 - DNA, 19 bp, Artificial Sequence
  Synthetic
tgtgtgtggggacttgggc

SEQ ID NO: 37039 - DNA, 20 bp, Artificial Sequence
  Synthetic
cggcaagccaccatgagacg

SEQ ID NO: 37040 - DNA, 18 bp, Artificial Sequence
  Synthetic
agccgaggaatccgccga

SEQ ID NO: 37041 - DNA, 20 bp, Artificial Sequence
  Synthetic
tgaagcccaccctacagccc

SEQ ID NO: 37042 - DNA, 21 bp, Artificial Sequence
  Synthetic
tgacggctttgttcaggtcgg

SEQ ID NO: 37043 - DNA, 19 bp, Artificial Sequence
  Synthetic
atcgcctgccgcagacttt

SEQ ID NO: 37044 - DNA, 22 bp, Artificial Sequence
  Synthetic
gcattcaatgcggtaggcgagt

SEQ ID NO: 37045 - DNA, 18 bp, Artificial Sequence
  Synthetic
gcgcggcggaatccttca

SEQ ID NO: 37046 - DNA, 22 bp, Artificial Sequence
  Synthetic
cacctgcttacccaagtggacg

SEQ ID NO: 37047 - DNA, 20 bp, Artificial Sequence
  Synthetic
ggatttggggcgtcgtgtcc

SEQ ID NO: 37048 - DNA, 20 bp, Artificial Sequence
  Synthetic
gttgtcgaatttgccgcccg

SEQ ID NO: 37049 - DNA, 21 bp, Artificial Sequence
  Synthetic
gcggcgttttcttcgttgacc

SEQ ID NO: 37050 - DNA, 20 bp, Artificial Sequence
  Synthetic
ttgcgttcgatgcaggggat

SEQ ID NO: 37051 - DNA, 19 bp, Artificial Sequence
  Synthetic
tcttgttcgtccgccgccg

SEQ ID NO: 37052 - DNA, 19 bp, Artificial Sequence
  Synthetic
cgatgggcgtgctgctgat

SEQ ID NO: 37053 - DNA, 22 bp, Artificial Sequence
  Synthetic
cccttggaagacgaccgtgaaa

SEQ ID NO: 37054 - DNA, 22 bp, Artificial Sequence
  Synthetic
gcggctcaattccaaaagtccg

SEQ ID NO: 37055 - DNA, 20 bp, Artificial Sequence
  Synthetic
ggcacttgggcgctcacttc

SEQ ID NO: 37056 - DNA, 21 bp, Artificial Sequence
  Synthetic
cggcgttttccggtttgacct

SEQ ID NO: 37057 - DNA, 19 bp, Artificial Sequence
  Synthetic
tgcctgcggtcagcaccac

SEQ ID NO: 37058 - DNA, 22 bp, Artificial Sequence
  Synthetic
gcttcgcggctgagtttttgtc

SEQ ID NO: 37059 - DNA, 18 bp, Artificial Sequence
  Synthetic
cgcgtgctggtggtcgat

SEQ ID NO: 37060 - DNA, 19 bp, Artificial Sequence
  Synthetic
gcatcaggccgctgtcgag

SEQ ID NO: 37061 - DNA, 20 bp, Artificial Sequence
  Synthetic
tgggagattgcagcttggcg

SEQ ID NO: 37062 - DNA, 22 bp, Artificial Sequence
  Synthetic
cctgccattggtagtggaggtg

SEQ ID NO: 37063 - DNA, 21 bp, Artificial Sequence
  Synthetic
gccgccatattgccctcaaac

SEQ ID NO: 37064 - DNA, 20 bp, Artificial Sequence
  Synthetic
cggcaacccagaccaaaccc

SEQ ID NO: 37065 - DNA, 20 bp, Artificial Sequence
  Synthetic
tacggtgctcggctcggtac

SEQ ID NO: 37066 - DNA, 18 bp, Artificial Sequence
  Synthetic
cgccgccgatgatgcagt

SEQ ID NO: 37067 - DNA, 21 bp, Artificial Sequence
  Synthetic
gttacccgtaccgatggtggc

SEQ ID NO: 37068 - DNA, 18 bp, Artificial Sequence
  Synthetic
gctgtcggcggttttggc

SEQ ID NO: 37069 - DNA, 20 bp, Artificial Sequence
  Synthetic
aaaaacagtgcggtcggtga

SEQ ID NO: 37070 - DNA, 18 bp, Artificial Sequence
  Synthetic
gaggatgtgccgccggtt

SEQ ID NO: 37071 - DNA, 20 bp, Artificial Sequence
  Synthetic
gtttggcggccaacgtttcg

SEQ ID NO: 37072 - DNA, 19 bp, Artificial Sequence
  Synthetic
tggcggtacccggttcgat

SEQ ID NO: 37073 - DNA, 21 bp, Artificial Sequence
  Synthetic
tgcgcgaattaagggaggagg

SEQ ID NO: 37074 - DNA, 21 bp, Artificial Sequence
  Synthetic
gcgcaccggggtaatcaaagg

SEQ ID NO: 37075 - DNA, 19 bp, Artificial Sequence
  Synthetic
tgccgctgctgctgaaggg

SEQ ID NO: 37076 - DNA, 19 bp, Artificial Sequence
  Synthetic
cgcatcggtgccgtccaat

SEQ ID NO: 37077 - DNA, 19 bp, Artificial Sequence
  Synthetic
caaaatcagcgggcgcacg

SEQ ID NO: 37078 - DNA, 20 bp, Artificial Sequence
  Synthetic
atccacgccagttggtagcc

SEQ ID NO: 37079 - DNA, 22 bp, Artificial Sequence
  Synthetic
acgtggtcaaagtgaaggtgct

SEQ ID NO: 37080 - DNA, 21 bp, Artificial Sequence
  Synthetic
cagcacgacgtgaaccaaagc

SEQ ID NO: 37081 - DNA, 21 bp, Artificial Sequence
  Synthetic
gcgttttatcggtgcgggaac

SEQ ID NO: 37082 - DNA, 22 bp, Artificial Sequence
  Synthetic
gctcaccgtccccaaagaaacc

SEQ ID NO: 37083 - DNA, 22 bp, Artificial Sequence
  Synthetic
cccaaacacaggttttcagctg

SEQ ID NO: 37084 - DNA, 19 bp, Artificial Sequence
  Synthetic
cgccgcattgtccgggtta

SEQ ID NO: 37085 - DNA, 21 bp, Artificial Sequence
  Synthetic
tcgccgatacagaccacgtct

SEQ ID NO: 37086 - DNA, 20 bp, Artificial Sequence
  Synthetic
atggaggcggcggtaaagac

SEQ ID NO: 37087 - DNA, 19 bp, Artificial Sequence
  Synthetic
gccgtctgaaaggaggcgc

SEQ ID NO: 37088 - DNA, 19 bp, Artificial Sequence
  Synthetic
cggacggattgcctgccag

SEQ ID NO: 37089 - DNA, 20 bp, Artificial Sequence
  Synthetic
gtacacgcggcttttggtgg

SEQ ID NO: 37090 - DNA, 22 bp, Artificial Sequence
  Synthetic
gtagccggttttgagcagggta

SEQ ID NO: 37091 - DNA, 22 bp, Artificial Sequence
  Synthetic
cgcgcagtgtatccaatgccgt

SEQ ID NO: 37092 - DNA, 19 bp, Artificial Sequence
  Synthetic
ggcaacgccgtaccggttt

SEQ ID NO: 37093 - DNA, 19 bp, Artificial Sequence
  Synthetic
acacagcgggcgaatacgg

SEQ ID NO: 37094 - DNA, 19 bp, Artificial Sequence
  Synthetic
ggcttgggcaacggcttcg

SEQ ID NO: 37095 - DNA, 19 bp, Artificial Sequence
  Synthetic
accaccgcttcggcatcgg

SEQ ID NO: 37096 - DNA, 20 bp, Artificial Sequence
  Synthetic
aatgcttgccgtcgcgatga

SEQ ID NO: 37097 - DNA, 22 bp, Artificial Sequence
  Synthetic
cgcctttgaccaagtctgtcca

SEQ ID NO: 37098 - DNA, 20 bp, Artificial Sequence
  Synthetic
ccgaaaccctcaaagccgcc

SEQ ID NO: 37099 - DNA, 19 bp, Artificial Sequence
  Synthetic
gtggagcgcaaagtcgtgc

SEQ ID NO: 37100 - DNA, 20 bp, Artificial Sequence
  Synthetic
ttttcagcctcgtttcccca

SEQ ID NO: 37101 - DNA, 21 bp, Artificial Sequence
  Synthetic
gctttggctaatgtcggaaga

SEQ ID NO: 37102 - DNA, 19 bp, Artificial Sequence
  Synthetic
atcctgtcccgccccaacc

SEQ ID NO: 37103 - DNA, 19 bp, Artificial Sequence
  Synthetic
aagccctttctgcccgccg

SEQ ID NO: 37104 - DNA, 18 bp, Artificial Sequence
  Synthetic
tccgttcccgcgcattcg

SEQ ID NO: 37105 - DNA, 18 bp, Artificial Sequence
  Synthetic
cagccacgccacgatgct

SEQ ID NO: 37106 - DNA, 22 bp, Artificial Sequence
  Synthetic
cggcattttcagcaacaacggg

SEQ ID NO: 37107 - DNA, 20 bp, Artificial Sequence
  Synthetic
acacgcgtattatggcagca

SEQ ID NO: 37108 - DNA, 20 bp, Artificial Sequence
  Synthetic
cctcatccgaacccgcacag

SEQ ID NO: 37109 - DNA, 20 bp, Artificial Sequence
  Synthetic
gccccaaatctccgtcgtcg

SEQ ID NO: 37110 - DNA, 21 bp, Artificial Sequence
  Synthetic
gtggtaggtgaggtcggcaac

SEQ ID NO: 37111 - DNA, 21 bp, Artificial Sequence
  Synthetic
ggcatgcctaacaagccgaca

SEQ ID NO: 37112 - DNA, 19 bp, Artificial Sequence
  Synthetic
atcgggatagagcgtgcgc

SEQ ID NO: 37113 - DNA, 19 bp, Artificial Sequence
  Synthetic
caccgtcggcgaccaactt

SEQ ID NO: 37114 - DNA, 18 bp, Artificial Sequence
  Synthetic
tcatcagcggcatgggcg

SEQ ID NO: 37115 - DNA, 18 bp, Artificial Sequence
  Synthetic
gtggtcggcgtgggcatt

SEQ ID NO: 37116 - DNA, 19 bp, Artificial Sequence
  Synthetic
ggtcaaacgcccagccgaa

SEQ ID NO: 37117 - DNA, 20 bp, Artificial Sequence
  Synthetic
ggctgatttcgccgctgacg

SEQ ID NO: 37118 - DNA, 21 bp, Artificial Sequence
  Synthetic
atcggcaagccggttttgcag

SEQ ID NO: 37119 - DNA, 19 bp, Artificial Sequence
  Synthetic
cacgaagcccccgtccatg

SEQ ID NO: 37120 - DNA, 18 bp, Artificial Sequence
  Synthetic
cgtcaacatggcgcacgc

SEQ ID NO: 37121 - DNA, 22 bp, Artificial Sequence
  Synthetic
gcgcgattttccagaccacgac

SEQ ID NO: 37122 - DNA, 18 bp, Artificial Sequence
  Synthetic
tgtgtggcacgggcagga

SEQ ID NO: 37123 - DNA, 18 bp, Artificial Sequence
  Synthetic
aagcacgccgcccgtttg

SEQ ID NO: 37124 - DNA, 21 bp, Artificial Sequence
  Synthetic
gtcaaaccggccatcacttgc

SEQ ID NO: 37125 - DNA, 20 bp, Artificial Sequence
  Synthetic
gcagtccgacgcgttccaac

SEQ ID NO: 37126 - DNA, 22 bp, Artificial Sequence
  Synthetic
gccatactgctttccaccagcg

SEQ ID NO: 37127 - DNA, 21 bp, Artificial Sequence
  Synthetic
cttggaagggggctggcaata

SEQ ID NO: 37128 - DNA, 18 bp, Artificial Sequence
  Synthetic
acgcggcggatggaaagc

SEQ ID NO: 37129 - DNA, 22 bp, Artificial Sequence
  Synthetic
gtgcggattgtcgggttctttg

SEQ ID NO: 37130 - DNA, 20 bp, Artificial Sequence
  Synthetic
gggaaaggaaaagccgggca

SEQ ID NO: 37131 - DNA, 18 bp, Artificial Sequence
  Synthetic
tgcgctttaccccggtgg

SEQ ID NO: 37132 - DNA, 20 bp, Artificial Sequence
  Synthetic
cttcgaggaagtagccgccg

SEQ ID NO: 37133 - DNA, 21 bp, Artificial Sequence
  Synthetic
gcagctatgttcagacggcat

SEQ ID NO: 37134 - DNA, 19 bp, Artificial Sequence
  Synthetic
ttaccgccgcctccctgac

SEQ ID NO: 37135 - DNA, 20 bp, Artificial Sequence
  Synthetic
cgcacatggaacaaggcggg

SEQ ID NO: 37136 - DNA, 22 bp, Artificial Sequence
  Synthetic
caccaacgccatcgaaaccaag

SEQ ID NO: 37137 - DNA, 21 bp, Artificial Sequence
  Synthetic
cgcgtgcagcttatggaggac

SEQ ID NO: 37138 - DNA, 18 bp, Artificial Sequence
  Synthetic
attccccatcaccgcgcg

SEQ ID NO: 37139 - DNA, 18 bp, Artificial Sequence
  Synthetic
gcgccacggcaagaaacg

SEQ ID NO: 37140 - DNA, 20 bp, Artificial Sequence
  Synthetic
tctcggcttgtcaaccgttt

SEQ ID NO: 37141 - DNA, 18 bp, Artificial Sequence
  Synthetic
ttccggaccgcccaaacg

SEQ ID NO: 37142 - DNA, 20 bp, Artificial Sequence
  Synthetic
acgctttcagacggcatccg

SEQ ID NO: 37143 - DNA, 21 bp, Artificial Sequence
  Synthetic
gctgcgggactttttggaacg

SEQ ID NO: 37144 - DNA, 19 bp, Artificial Sequence
  Synthetic
tgcgccaaacaccaaagcg

SEQ ID NO: 37145 - DNA, 21 bp, Artificial Sequence
  Synthetic
gggtgcttggaaaaatgccgc

SEQ ID NO: 37146 - DNA, 19 bp, Artificial Sequence
  Synthetic
catcagtacgccgcctgca

SEQ ID NO: 37147 - DNA, 20 bp, Artificial Sequence
  Synthetic
gcgccgccgactttaccatt

SEQ ID NO: 37148 - DNA, 21 bp, Artificial Sequence
  Synthetic
cgccaaactgattgtggcgca

SEQ ID NO: 37149 - DNA, 19 bp, Artificial Sequence
  Synthetic
aacggaatcgagccggccg

SEQ ID NO: 37150 - DNA, 20 bp, Artificial Sequence
  Synthetic
ccgtccaccacgcatcgtaa

SEQ ID NO: 37151 - DNA, 21 bp, Artificial Sequence
  Synthetic
cgccttcatccacctcagtcc

SEQ ID NO: 37152 - DNA, 18 bp, Artificial Sequence
  Synthetic
gacaagatgggcgcgggt

SEQ ID NO: 37153 - DNA, 19 bp, Artificial Sequence
  Synthetic
cgcttccggcatcggcaag

SEQ ID NO: 37154 - DNA, 19 bp, Artificial Sequence
  Synthetic
tcccgaactgctcagcggc

SEQ ID NO: 37155 - DNA, 19 bp, Artificial Sequence
  Synthetic
tgcacgtcttcctgccgcc

SEQ ID NO: 37156 - DNA, 20 bp, Artificial Sequence
  Synthetic
cgacggcctcatcaacccaa

SEQ ID NO: 37157 - DNA, 20 bp, Artificial Sequence
  Synthetic
gcgagacggtgagcgtgaat

SEQ ID NO: 37158 - DNA, 22 bp, Artificial Sequence
  Synthetic
ccccacaagccaaagaacaggc

SEQ ID NO: 37159 - DNA, 22 bp, Artificial Sequence
  Synthetic
gcggcatcatctcgattgccga

SEQ ID NO: 37160 - DNA, 21 bp, Artificial Sequence
  Synthetic
cgcccattccgatcatgtcgc

SEQ ID NO: 37161 - DNA, 19 bp, Artificial Sequence
  Synthetic
ggatgcccgccgtcagaag

SEQ ID NO: 37162 - DNA, 20 bp, Artificial Sequence
  Synthetic
ctgccgccgatgatgatggc

SEQ ID NO: 37163 - DNA, 21 bp, Artificial Sequence
  Synthetic
ggcagcctttcagacggcatc

SEQ ID NO: 37164 - DNA, 18 bp, Artificial Sequence
  Synthetic
aaaacctcggcagcgggc

SEQ ID NO: 37165 - DNA, 20 bp, Artificial Sequence
  Synthetic
cagggttcgactggcggttt

SEQ ID NO: 37166 - DNA, 20 bp, Artificial Sequence
  Synthetic
ccgccgaatatcgcgaatgc

SEQ ID NO: 37167 - DNA, 22 bp, Artificial Sequence
  Synthetic
cctgtcgctcaaacccgtttca

SEQ ID NO: 37168 - DNA, 20 bp, Artificial Sequence
  Synthetic
acgggccgtcaaacaaggtg

SEQ ID NO: 37169 - DNA, 21 bp, Artificial Sequence
  Synthetic
actgcaatacgtcgccttcga

SEQ ID NO: 37170 - DNA, 21 bp, Artificial Sequence
  Synthetic
cagcagccacggtttttcgtg

SEQ ID NO: 37171 - DNA, 18 bp, Artificial Sequence
  Synthetic
tggtaaccgcctgcctgc

SEQ ID NO: 37172 - DNA, 21 bp, Artificial Sequence
  Synthetic
acgatatggcggtcaacagcg

SEQ ID NO: 37173 - DNA, 21 bp, Artificial Sequence
  Synthetic
tgacggcggtacacaaggttc

SEQ ID NO: 37174 - DNA, 22 bp, Artificial Sequence
  Synthetic
gctgaaccttgcccatttggac

SEQ ID NO: 37175 - DNA, 19 bp, Artificial Sequence
  Synthetic
aagcgggtcggtatggcgg

SEQ ID NO: 37176 - DNA, 21 bp, Artificial Sequence
  Synthetic
aatgtccgcctcgctcaacat

SEQ ID NO: 37177 - DNA, 19 bp, Artificial Sequence
  Synthetic
accgcccaaaccgccttgg

SEQ ID NO: 37178 - DNA, 19 bp, Artificial Sequence
  Synthetic
acaccccgcccgaacagga

SEQ ID NO: 37179 - DNA, 21 bp, Artificial Sequence
  Synthetic
cctctggttcctcatccgtag

SEQ ID NO: 37180 - DNA, 20 bp, Artificial Sequence
  Synthetic
cgcttccagtctcggactaa

SEQ ID NO: 37181 - DNA, 23 bp, Artificial Sequence
  Synthetic
atgatgtttccgtatgctccttt

SEQ ID NO: 37182 - DNA, 25 bp, Artificial Sequence
  Synthetic
cttttgtttccatctttgtccacat

SEQ ID NO: 37183 - DNA, 20 bp, Artificial Sequence
  Synthetic
agctgggcctctgagcaata

SEQ ID NO: 37184 - DNA, 24 bp, Artificial Sequence
  Synthetic
gctctattgatcagcctttcagat

SEQ ID NO: 37185 - DNA, 24 bp, Artificial Sequence
  Synthetic
acctccactaaaggattctggtaa

SEQ ID NO: 37186 - DNA, 25 bp, Artificial Sequence
  Synthetic
ttatcaccatatgtgtcctttgtca

SEQ ID NO: 37187 - DNA, 24 bp, Artificial Sequence
  Synthetic
gcttctaacggtactttgcaaaga

SEQ ID NO: 37188 - DNA, 25 bp, Artificial Sequence
  Synthetic
cattcacagtttaacatggaatgca

SEQ ID NO: 37189 - DNA, 21 bp, Artificial Sequence
  Synthetic
tttccgcaagttcgacaatca

SEQ ID NO: 37190 - DNA, 20 bp, Artificial Sequence
  Synthetic
gctcctgtggtgttgcaaat

SEQ ID NO: 37191 - DNA, 22 bp, Artificial Sequence
  Synthetic
cctcattctcaatgtcctgcag

SEQ ID NO: 37192 - DNA, 20 bp, Artificial Sequence
  Synthetic
ggagccacgtcttctccaat

SEQ ID NO: 37193 - DNA, 20 bp, Artificial Sequence
  Synthetic
tcaaagtcacccccctcggt

SEQ ID NO: 37194 - DNA, 20 bp, Artificial Sequence
  Synthetic
ccctttactcggaccgggga

SEQ ID NO: 37195 - DNA, 21 bp, Artificial Sequence
  Synthetic
aggagaggcaggatcaccgac

SEQ ID NO: 37196 - DNA, 20 bp, Artificial Sequence
  Synthetic
tgcaggtttactgtgcagca

SEQ ID NO: 37197 - DNA, 21 bp, Artificial Sequence
  Synthetic
tttgcctgtttttgttgtgcc

SEQ ID NO: 37198 - DNA, 22 bp, Artificial Sequence
  Synthetic
gccatgccttttgtttacacac

SEQ ID NO: 37199 - DNA, 20 bp, Artificial Sequence
  Synthetic
cgctttcctgggtatggcgc

SEQ ID NO: 37200 - DNA, 25 bp, Artificial Sequence
  Synthetic
gcaataatgtccaaaaaatcggggt

SEQ ID NO: 37201 - DNA, 20 bp, Artificial Sequence
  Synthetic
gcggcgtatgtatgctagga

SEQ ID NO: 37202 - DNA, 20 bp, Artificial Sequence
  Synthetic
taccccagtgctctcccaag

SEQ ID NO: 37203 - DNA, 23 bp, Artificial Sequence
  Synthetic
acacacacaaacatgcggaatta

SEQ ID NO: 37204 - DNA, 18 bp, Artificial Sequence
  Synthetic
aaatcccccacgccctgc

SEQ ID NO: 37205 - DNA, 21 bp, Artificial Sequence
  Synthetic
tggctaaccccaaccatccca

SEQ ID NO: 37206 - DNA, 22 bp, Artificial Sequence
  Synthetic
gatcacacaaccaggctcgtgt

SEQ ID NO: 37207 - DNA, 22 bp, Artificial Sequence
  Synthetic
actctagagtgataggcctggt

SEQ ID NO: 37208 - DNA, 21 bp, Artificial Sequence
  Synthetic
accagaggccaaggacctaca

SEQ ID NO: 37209 - DNA, 23 bp, Artificial Sequence
  Synthetic
acatagaagagctacgtgacaca

SEQ ID NO: 37210 - DNA, 18 bp, Artificial Sequence
  Synthetic
gccgagacgcgcaacaac

SEQ ID NO: 37211 - DNA, 24 bp, Artificial Sequence
  Synthetic
aaccactagcctaacatttttgga

SEQ ID NO: 37212 - DNA, 21 bp, Artificial Sequence
  Synthetic
gcggtttccaatgtgaaagga

SEQ ID NO: 37213 - DNA, 20 bp, Artificial Sequence
  Synthetic
caagcagtggatgaggcggc

SEQ ID NO: 37214 - DNA, 20 bp, Artificial Sequence
  Synthetic
gcctagcgttgactggaaca

SEQ ID NO: 37215 - DNA, 20 bp, Artificial Sequence
  Synthetic
ccaggtgtagctcatgctgc

SEQ ID NO: 37216 - DNA, 21 bp, Artificial Sequence
  Synthetic
acgaacatcagtgccccgaag

SEQ ID NO: 37217 - DNA, 20 bp, Artificial Sequence
  Synthetic
atgtggctccgactgcatcg

SEQ ID NO: 37218 - DNA, 22 bp, Artificial Sequence
  Synthetic
ccgcaaataaggaagcgagggt

SEQ ID NO: 37219 - DNA, 25 bp, Artificial Sequence
  Synthetic
gtcttatccaaatctggtagaggtc

SEQ ID NO: 37220 - DNA, 19 bp, Artificial Sequence
  Synthetic
actcacatcggcggggtcg

SEQ ID NO: 37221 - DNA, 24 bp, Artificial Sequence
  Synthetic
gcaaatcctgtaatgtcacattgc

SEQ ID NO: 37222 - DNA, 20 bp, Artificial Sequence
  Synthetic
tcgtgacaacttgagctgga

SEQ ID NO: 37223 - DNA, 20 bp, Artificial Sequence
  Synthetic
tgctgagcacttcctgacaa

SEQ ID NO: 37224 - DNA, 21 bp, Artificial Sequence
  Synthetic
ttcactccatgaccaccttct

SEQ ID NO: 37225 - DNA, 20 bp, Artificial Sequence
  Synthetic
gttgctttacaggtaccgca

SEQ ID NO: 37226 - DNA, 25 bp, Artificial Sequence
  Synthetic
gcattagccaaaaatgactttgact

SEQ ID NO: 37227 - DNA, 22 bp, Artificial Sequence
  Synthetic
cggaggtagagggttgggtgaa

SEQ ID NO: 37228 - DNA, 21 bp, Artificial Sequence
  Synthetic
tcctgttcccacttcagaagg

SEQ ID NO: 37229 - DNA, 20 bp, Artificial Sequence
  Synthetic
gaagccccaacaccagaacc

SEQ ID NO: 37230 - DNA, 25 bp, Artificial Sequence
  Synthetic
cctcctgtaaatctctttcaaaggt

SEQ ID NO: 37231 - DNA, 20 bp, Artificial Sequence
  Synthetic
ggctgcaccaaatcctgtgt

SEQ ID NO: 37232 - DNA, 20 bp, Artificial Sequence
  Synthetic
ggcgccaagtttcttaccag

SEQ ID NO: 37233 - DNA, 21 bp, Artificial Sequence
  Synthetic
cattctcttcctcccaacagc

SEQ ID NO: 37234 - DNA, 21 bp, Artificial Sequence
  Synthetic
gtgtattgggcgtcttgaaca

SEQ ID NO: 37235 - DNA, 24 bp, Artificial Sequence
  Synthetic
agcaattagattcccattggatcg

SEQ ID NO: 37236 - DNA, 24 bp, Artificial Sequence
  Synthetic
aacctccttctatgaatccagcta

SEQ ID NO: 37237 - DNA, 19 bp, Artificial Sequence
  Synthetic
tctgaccaccgcccgggaa

SEQ ID NO: 37238 - DNA, 20 bp, Artificial Sequence
  Synthetic
aggtgcagccgaaccagttg

SEQ ID NO: 37239 - DNA, 22 bp, Artificial Sequence
  Synthetic
gctcaactcggccctatctctg

SEQ ID NO: 37240 - DNA, 21 bp, Artificial Sequence
  Synthetic
gcagccgcgtttaggacaatg

SEQ ID NO: 37241 - DNA, 21 bp, Artificial Sequence
  Synthetic
gcacccacacgtggatgatgg

SEQ ID NO: 37242 - DNA, 21 bp, Artificial Sequence
  Synthetic
ggccaccgttaattcgcggag

SEQ ID NO: 37243 - DNA, 19 bp, Artificial Sequence
  Synthetic
gggcacatgatcgggccac

SEQ ID NO: 37244 - DNA, 22 bp, Artificial Sequence
  Synthetic
ccacgccgtatgctcttgacat

SEQ ID NO: 37245 - DNA, 20 bp, Artificial Sequence
  Synthetic
tggcttctggacactgcgtc

SEQ ID NO: 37246 - DNA, 22 bp, Artificial Sequence
  Synthetic
cggtgaaagacatcaacgtggc

SEQ ID NO: 37247 - DNA, 22 bp, Artificial Sequence
  Synthetic
ggcgcatatgacaccaaccact

SEQ ID NO: 37248 - DNA, 21 bp, Artificial Sequence
  Synthetic
aggagttttgcctgcagccag

SEQ ID NO: 37249 - DNA, 20 bp, Artificial Sequence
  Synthetic
agctgactggccgaggagtt

SEQ ID NO: 37250 - DNA, 21 bp, Artificial Sequence
  Synthetic
cccacacctgaggggggtcat

SEQ ID NO: 37251 - DNA, 20 bp, Artificial Sequence
  Synthetic
cacgttgtcctcaccgctga

SEQ ID NO: 37252 - DNA, 20 bp, Artificial Sequence
  Synthetic
gtgcagtcccggagctttgc

SEQ ID NO: 37253 - DNA, 22 bp, Artificial Sequence
  Synthetic
tcggcgcgtacatgatgatgtt

SEQ ID NO: 37254 - DNA, 22 bp, Artificial Sequence
  Synthetic
gatgagcttagcgcgtacagct

SEQ ID NO: 37255 - DNA, 20 bp, Artificial Sequence
  Synthetic
cacagagtccccgaagccac

SEQ ID NO: 37256 - DNA, 22 bp, Artificial Sequence
  Synthetic
aaacacaaactttgggcattcc

SEQ ID NO: 37257 - DNA, 21 bp, Artificial Sequence
  Synthetic
acacacagcctccaaaacatc

SEQ ID NO: 37258 - DNA, 20 bp, Artificial Sequence
  Synthetic
acactgttggtgagcaggtc

SEQ ID NO: 37259 - DNA, 25 bp, Artificial Sequence
  Synthetic
cgatagtgacttgatcaatgcacat

SEQ ID NO: 37260 - DNA, 24 bp, Artificial Sequence
  Synthetic
tcaccataggattagcactttgtg

SEQ ID NO: 37261 - DNA, 20 bp, Artificial Sequence
  Synthetic
tgcctgctgacaacaatggt

SEQ ID NO: 37262 - DNA, 22 bp, Artificial Sequence
  Synthetic
tcttcagcatgagcaagcattt

SEQ ID NO: 37263 - DNA, 23 bp, Artificial Sequence
  Synthetic
cacaccacattaagaactcgctt

SEQ ID NO: 37264 - DNA, 20 bp, Artificial Sequence
  Synthetic
ttgtaaggtgagctccgtca

SEQ ID NO: 37265 - DNA, 23 bp, Artificial Sequence
  Synthetic
tgggaagaatgtgacagatagct

SEQ ID NO: 37266 - DNA, 21 bp, Artificial Sequence
  Synthetic
cggtagttttcacgtcacact

SEQ ID NO: 37267 - DNA, 23 bp, Artificial Sequence
  Synthetic
ttgctgaaaaggtgtcgacataa

SEQ ID NO: 37268 - DNA, 25 bp, Artificial Sequence
  Synthetic
ccagatgagtgaaacattgtgactt

SEQ ID NO: 37269 - DNA, 20 bp, Artificial Sequence
  Synthetic
acgagtgacaccatcctgaa

SEQ ID NO: 37270 - DNA, 25 bp, Artificial Sequence
  Synthetic
gaaccctctagcaaattagtgtcat

SEQ ID NO: 37271 - DNA, 22 bp, Artificial Sequence
  Synthetic
agacacatctaaagcacccaca

SEQ ID NO: 37272 - DNA, 22 bp, Artificial Sequence
  Synthetic
aaaaaggtacacaaagcagcct

SEQ ID NO: 37273 - DNA, 24 bp, Artificial Sequence
  Synthetic
ttgtacttcattgccacaaggtta

SEQ ID NO: 37274 - DNA, 20 bp, Artificial Sequence
  Synthetic
aggcccacatggaaatagct

SEQ ID NO: 37275 - DNA, 25 bp, Artificial Sequence
  Synthetic
gcatcaatactactcttaggaggca

SEQ ID NO: 37276 - DNA, 22 bp, Artificial Sequence
  Synthetic
tcctcagatcttgcctgtttgt

SEQ ID NO: 37277 - DNA, 23 bp, Artificial Sequence
  Synthetic
gtttaacagctgagttggctctt

SEQ ID NO: 37278 - DNA, 21 bp, Artificial Sequence
  Synthetic
tgaagacgtactgtagcagct

SEQ ID NO: 37279 - DNA, 20 bp, Artificial Sequence
  Synthetic
aagtcatggacagcaaccgc

SEQ ID NO: 37280 - DNA, 22 bp, Artificial Sequence
  Synthetic
ggatggtatgtctggtcccaat

SEQ ID NO: 37281 - DNA, 23 bp, Artificial Sequence
  Synthetic
ttagtgcagctactgaaaagcat

SEQ ID NO: 37282 - DNA, 22 bp, Artificial Sequence
  Synthetic
gcgagctctattctttgcacta

SEQ ID NO: 37283 - DNA, 24 bp, Artificial Sequence
  Synthetic
ggagaaatgtttacgcaggtaagc

SEQ ID NO: 37284 - DNA, 23 bp, Artificial Sequence
  Synthetic
gggtaagcatcaatagccagtga

SEQ ID NO: 37285 - DNA, 24 bp, Artificial Sequence
  Synthetic
tgaaatgacatggtcatagcagca

SEQ ID NO: 37286 - DNA, 20 bp, Artificial Sequence
  Synthetic
tctgctgcgaaaagcttgag

SEQ ID NO: 37287 - DNA, 24 bp, Artificial Sequence
  Synthetic
tcatcaaagactacaatgtcagca

SEQ ID NO: 37288 - DNA, 25 bp, Artificial Sequence
  Synthetic
tgtagaacattttgaagcattgagc

SEQ ID NO: 37289 - DNA, 21 bp, Artificial Sequence
  Synthetic
gtgacgaatagcttcttcgcg

SEQ ID NO: 37290 - DNA, 21 bp, Artificial Sequence
  Synthetic
ggacgaacacgactctgtctg

SEQ ID NO: 37291 - DNA, 23 bp, Artificial Sequence
  Synthetic
actctcagtaggtttcttggcaa

SEQ ID NO: 37292 - DNA, 22 bp, Artificial Sequence
  Synthetic
gcgagctcgagaaagtcagttt

SEQ ID NO: 37293 - DNA, 25 bp, Artificial Sequence
  Synthetic
agtcaattgtaaccttgaccacttt

SEQ ID NO: 37294 - DNA, 22 bp, Artificial Sequence
  Synthetic
gaatcgacaagtagtgtgccag

SEQ ID NO: 37295 - DNA, 22 bp, Artificial Sequence
  Synthetic
tgcttccgatgatgatgcattt

SEQ ID NO: 37296 - DNA, 20 bp, Artificial Sequence
  Synthetic
aataggctgcagctgacgtg

SEQ ID NO: 37297 - DNA, 20 bp, Artificial Sequence
  Synthetic
tcaggggagaaaggcacatt

SEQ ID NO: 37298 - DNA, 20 bp, Artificial Sequence
  Synthetic
ttacacccccaaaagcgcaa

SEQ ID NO: 37299 - DNA, 25 bp, Artificial Sequence
  Synthetic
ttgaactatcagcacctaaagacat

SEQ ID NO: 37300 - DNA, 21 bp, Artificial Sequence
  Synthetic
gcatcagcgagtgtcacctta

SEQ ID NO: 37301 - DNA, 23 bp, Artificial Sequence
  Synthetic
aatcgccttgttaaattggttgg

SEQ ID NO: 37302 - DNA, 23 bp, Artificial Sequence
  Synthetic
ggttgcagaggatcataaactgt

SEQ ID NO: 37303 - DNA, 24 bp, Artificial Sequence
  Synthetic
gcaacaactagtcatgcaacaaag

SEQ ID NO: 37304 - DNA, 23 bp, Artificial Sequence
  Synthetic
gccatcttttattgagcgcaatt

SEQ ID NO: 37305 - DNA, 23 bp, Artificial Sequence
  Synthetic
agtctttaacacctgagtgccta

SEQ ID NO: 37306 - DNA, 23 bp, Artificial Sequence
  Synthetic
ccaggctaggaataggaaaccta

SEQ ID NO: 37307 - DNA, 22 bp, Artificial Sequence
  Synthetic
gccattcgcaagtgaccacgaa

SEQ ID NO: 37308 - DNA, 22 bp, Artificial Sequence
  Synthetic
tgcaacccatacgatgccttct

SEQ ID NO: 37309 - DNA, 20 bp, Artificial Sequence
  Synthetic
cgccagtggggaatgtccag

SEQ ID NO: 37310 - DNA, 21 bp, Artificial Sequence
  Synthetic
accatccagatgaggcagatg

SEQ ID NO: 37311 - DNA, 23 bp, Artificial Sequence
  Synthetic
cactagatgtccgtgatggtact

SEQ ID NO: 37312 - DNA, 22 bp, Artificial Sequence
  Synthetic
gcatggcttctctcctggattt

SEQ ID NO: 37313 - DNA, 20 bp, Artificial Sequence
  Synthetic
ttggccttgtggtaaatgcg

SEQ ID NO: 37314 - DNA, 20 bp, Artificial Sequence
  Synthetic
caacgtgaccttcacctcca

SEQ ID NO: 37315 - DNA, 21 bp, Artificial Sequence
  Synthetic
gcctgaacaacctagaagggt

SEQ ID NO: 37316 - DNA, 23 bp, Artificial Sequence
  Synthetic
ttagcattcgagcaagaacagaa

SEQ ID NO: 37317 - DNA, 22 bp, Artificial Sequence
  Synthetic
agtgtgattagtgcttgcaagt

SEQ ID NO: 37318 - DNA, 20 bp, Artificial Sequence
  Synthetic
aagatctcagagcctgggtc

SEQ ID NO: 37319 - DNA, 21 bp, Artificial Sequence
  Synthetic
cagcttttgtcgggtaatggt

SEQ ID NO: 37320 - DNA, 23 bp, Artificial Sequence
  Synthetic
gcttcatcttctgctattccact

SEQ ID NO: 37321 - DNA, 21 bp, Artificial Sequence
  Synthetic
ccaacaacagtatgtggcgtc

SEQ ID NO: 37322 - DNA, 22 bp, Artificial Sequence
  Synthetic
tcaactgaacttcttgctgtgc

SEQ ID NO: 37323 - DNA, 24 bp, Artificial Sequence
  Synthetic
acttaacagtccattcacctgttt

SEQ ID NO: 37324 - DNA, 21 bp, Artificial Sequence
  Synthetic
ccgaaagacagagctacagca

SEQ ID NO: 37325 - DNA, 24 bp, Artificial Sequence
  Synthetic
ggtccaataggctcaataacaaca

SEQ ID NO: 37326 - DNA, 20 bp, Artificial Sequence
  Synthetic
tagctctgttaaaggcccgc

SEQ ID NO: 37327 - DNA, 21 bp, Artificial Sequence
  Synthetic
acctttgttagggtctcccat

SEQ ID NO: 37328 - DNA, 23 bp, Artificial Sequence
  Synthetic
ggactggcgatatactttcgttt

SEQ ID NO: 37329 - DNA, 20 bp, Artificial Sequence
  Synthetic
gtcggtcaagtctgcctgat

SEQ ID NO: 37330 - DNA, 21 bp, Artificial Sequence
  Synthetic
cctccgcttcctcgtcttcgt

SEQ ID NO: 37331 - DNA, 20 bp, Artificial Sequence
  Synthetic
tacttcagcgccaccaagag

SEQ ID NO: 37332 - DNA, 24 bp, Artificial Sequence
  Synthetic
cccttgaaggatatgttccaatgt

SEQ ID NO: 37333 - DNA, 22 bp, Artificial Sequence
  Synthetic
gtgaaagcaggtaggcaattgt

SEQ ID NO: 37334 - DNA, 23 bp, Artificial Sequence
  Synthetic
ggcctttcttctttgttgctgtt

SEQ ID NO: 37335 - DNA, 23 bp, Artificial Sequence
  Synthetic
aaaccatctgcatttctcgtctt

SEQ ID NO: 37336 - DNA, 21 bp, Artificial Sequence
  Synthetic
tctcacccattttccgtctct

SEQ ID NO: 37337 - DNA, 21 bp, Artificial Sequence
  Synthetic
cttcaaatgctgcagaatggc

SEQ ID NO: 37338 - DNA, 25 bp, Artificial Sequence
  Synthetic
agttgcaatatgcttatcgaccttt

SEQ ID NO: 37339 - DNA, 23 bp, Artificial Sequence
  Synthetic
gttccaggagtattagctactgc

SEQ ID NO: 37340 - DNA, 24 bp, Artificial Sequence
  Synthetic
cacttctgaacaagatttggcttg

SEQ ID NO: 37341 - DNA, 25 bp, Artificial Sequence
  Synthetic
tctttatctttttgagttcgtgcca

SEQ ID NO: 37342 - DNA, 24 bp, Artificial Sequence
  Synthetic
cttctttatcctcatcgtcaagct

SEQ ID NO: 37343 - DNA, 25 bp, Artificial Sequence
  Synthetic
ttcatatttagagcctggatttccc

SEQ ID NO: 37344 - DNA, 22 bp, Artificial Sequence
  Synthetic
ccaatgtgggcaatgattgact

SEQ ID NO: 37345 - DNA, 21 bp, Artificial Sequence
  Synthetic
gggacgatatagggagcttca

SEQ ID NO: 37346 - DNA, 23 bp, Artificial Sequence
  Synthetic
ccaaaatttcctatcggggtacg

SEQ ID NO: 37347 - DNA, 23 bp, Artificial Sequence
  Synthetic
ccttgtaaaacgtaaggtgcttg

SEQ ID NO: 37348 - DNA, 20 bp, Artificial Sequence
  Synthetic
aaggtctcgtgaaaccgcta

SEQ ID NO: 37349 - DNA, 24 bp, Artificial Sequence
  Synthetic
ggacaaggttatctggatactcct

SEQ ID NO: 37350 - DNA, 20 bp, Artificial Sequence
  Synthetic
gaagttgtcccagtcgcctc

SEQ ID NO: 37351 - DNA, 23 bp, Artificial Sequence
  Synthetic
actgacaagatcgcaacacttac

SEQ ID NO: 37352 - DNA, 22 bp, Artificial Sequence
  Synthetic
ctggggcatattcttcaccatc

SEQ ID NO: 37353 - DNA, 25 bp, Artificial Sequence
  Synthetic
ccatagatgattttgaggtgaaggc

SEQ ID NO: 37354 - DNA, 21 bp, Artificial Sequence
  Synthetic
taccggcatcttgttgtgcag

SEQ ID NO: 37355 - DNA, 22 bp, Artificial Sequence
  Synthetic
aggtactaacgacaaagcgaca

SEQ ID NO: 37356 - DNA, 22 bp, Artificial Sequence
  Synthetic
agcgtaagaaaggccatttgag

SEQ ID NO: 37357 - DNA, 21 bp, Artificial Sequence
  Synthetic
ggttccatgtgtaggctggtc

SEQ ID NO: 37358 - DNA, 21 bp, Artificial Sequence
  Synthetic
gggaggtgaaatctggcaaac

SEQ ID NO: 37359 - DNA, 24 bp, Artificial Sequence
  Synthetic
cccataaattccaagaaccaccta

SEQ ID NO: 37360 - DNA, 20 bp, Artificial Sequence
  Synthetic
taccatctgcttgtcgctct

SEQ ID NO: 37361 - DNA, 21 bp, Artificial Sequence
  Synthetic
gccgtgtttatctgtcactgt

SEQ ID NO: 37362 - DNA, 21 bp, Artificial Sequence
  Synthetic
gttctgcaaagaggcgttcaa

SEQ ID NO: 37363 - DNA, 21 bp, Artificial Sequence
  Synthetic
ctgataaagtcctgccagacg

SEQ ID NO: 37364 - DNA, 23 bp, Artificial Sequence
  Synthetic
ttcccatatcatcacctctggat

SEQ ID NO: 37365 - DNA, 22 bp, Artificial Sequence
  Synthetic
atgacaaatcaaagccactgct

SEQ ID NO: 37366 - DNA, 25 bp, Artificial Sequence
  Synthetic
cgtcatagtcagttgtaattgcctt

SEQ ID NO: 37367 - DNA, 23 bp, Artificial Sequence
  Synthetic
gcttgactctgatcaatgccata

SEQ ID NO: 37368 - DNA, 25 bp, Artificial Sequence
  Synthetic
ccttcctcgatactacctttttgag

SEQ ID NO: 37369 - DNA, 22 bp, Artificial Sequence
  Synthetic
agtaacagaacgtttgaagcga

SEQ ID NO: 37370 - DNA, 22 bp, Artificial Sequence
  Synthetic
aaagccgctgaaaaagctatgc

SEQ ID NO: 37371 - DNA, 23 bp, Artificial Sequence
  Synthetic
cggacaagtgaaacaatcctgaa

SEQ ID NO: 37372 - DNA, 20 bp, Artificial Sequence
  Synthetic
ccgtccccattgaagcaaca

SEQ ID NO: 37373 - DNA, 22 bp, Artificial Sequence
  Synthetic
gagctgtgatggatggtgattg

SEQ ID NO: 37374 - DNA, 21 bp, Artificial Sequence
  Synthetic
tgaagatcgcgctctgctaaa

SEQ ID NO: 37375 - DNA, 21 bp, Artificial Sequence
  Synthetic
aaagcagccactaattccgtt

SEQ ID NO: 37376 - DNA, 20 bp, Artificial Sequence
  Synthetic
gtacgccttgtcttgatgca

SEQ ID NO: 37377 - DNA, 20 bp, Artificial Sequence
  Synthetic
agcttgcggtgactgtttct

SEQ ID NO: 37378 - DNA, 22 bp, Artificial Sequence
  Synthetic
ccagacggtaaatcttcgacaa

SEQ ID NO: 37379 - DNA, 21 bp, Artificial Sequence
  Synthetic
cgtggcttaatcgtcgtttct

SEQ ID NO: 37380 - DNA, 24 bp, Artificial Sequence
  Synthetic
gaactactcgataacccatgcaaa

SEQ ID NO: 37381 - DNA, 20 bp, Artificial Sequence
  Synthetic
tgcatgttggtagaatgccc

SEQ ID NO: 37382 - DNA, 23 bp, Artificial Sequence
  Synthetic
ggctgaataaatgctcgatttgg

SEQ ID NO: 37383 - DNA, 24 bp, Artificial Sequence
  Synthetic
tcaacgtgatctaatgctttttgc

SEQ ID NO: 37384 - DNA, 20 bp, Artificial Sequence
  Synthetic
gcatcaagatgataggcgca

SEQ ID NO: 37385 - DNA, 20 bp, Artificial Sequence
  Synthetic
gacagccttttccaagggca

SEQ ID NO: 37386 - DNA, 24 bp, Artificial Sequence
  Synthetic
cttttaagaaatcagccgcggtta

SEQ ID NO: 37387 - DNA, 20 bp, Artificial Sequence
  Synthetic
cccccaatgcttccaggaat

SEQ ID NO: 37388 - DNA, 20 bp, Artificial Sequence
  Synthetic
tgacctgcaaagtgtcctgg

SEQ ID NO: 37389 - DNA, 22 bp, Artificial Sequence
  Synthetic
ggcgtgttgtccttaatgcagc

SEQ ID NO: 37390 - DNA, 25 bp, Artificial Sequence
  Synthetic
ccgtttttatgactgaaatctcacc

SEQ ID NO: 37391 - DNA, 25 bp, Artificial Sequence
  Synthetic
gctaaaaaattagcctcaccatcaa

SEQ ID NO: 37392 - DNA, 21 bp, Artificial Sequence
  Synthetic
tggtctaggatttgccaaggt

SEQ ID NO: 37393 - DNA, 25 bp, Artificial Sequence
  Synthetic
ccatctaaaccttaccctatcagga

SEQ ID NO: 37394 - DNA, 23 bp, Artificial Sequence
  Synthetic
ccttagccatgttaaaaccagga

SEQ ID NO: 37395 - DNA, 22 bp, Artificial Sequence
  Synthetic
cgattgggatgacagaaccttt

SEQ ID NO: 37396 - DNA, 20 bp, Artificial Sequence
  Synthetic
ggcagcaacaggttatgtca

SEQ ID NO: 37397 - DNA, 20 bp, Artificial Sequence
  Synthetic
atcaccacggagcagagtac

SEQ ID NO: 37398 - DNA, 25 bp, Artificial Sequence
  Synthetic
ccatttggataaagaagaagccatc

SEQ ID NO: 37399 - DNA, 23 bp, Artificial Sequence
  Synthetic
tccctcgattgattgatgaactg

SEQ ID NO: 37400 - DNA, 25 bp, Artificial Sequence
  Synthetic
gtggacgattgatagttgatggtaa

SEQ ID NO: 37401 - DNA, 21 bp, Artificial Sequence
  Synthetic
tggaagcccatttgaccatct

SEQ ID NO: 37402 - DNA, 24 bp, Artificial Sequence
  Synthetic
cgttgtctatattgaagctgccaa

SEQ ID NO: 37403 - DNA, 20 bp, Artificial Sequence
  Synthetic
ggattgtccacacagcacca

SEQ ID NO: 37404 - DNA, 25 bp, Artificial Sequence
  Synthetic
tcttcctaataaagagccacaatgg

SEQ ID NO: 37405 - DNA, 22 bp, Artificial Sequence
  Synthetic
tctgcgaaaaaacctgaagacg

SEQ ID NO: 37406 - DNA, 23 bp, Artificial Sequence
  Synthetic
cgcttagcttaatgacacactca

SEQ ID NO: 37407 - DNA, 22 bp, Artificial Sequence
  Synthetic
aaggcatcgctgggtagctatg

SEQ ID NO: 37408 - DNA, 21 bp, Artificial Sequence
  Synthetic
agggccatcgctcaacggata

SEQ ID NO: 37409 - DNA, 20 bp, Artificial Sequence
  Synthetic
accgaagctgtggatgacac

SEQ ID NO: 37410 - DNA, 21 bp, Artificial Sequence
  Synthetic
aatgggtgagagcgtgccttt

SEQ ID NO: 37411 - DNA, 20 bp, Artificial Sequence
  Synthetic
tagctcagctgggagagcgc

SEQ ID NO: 37412 - DNA, 20 bp, Artificial Sequence
  Synthetic
tgttcttcaaggtgaacgcc

SEQ ID NO: 37413 - DNA, 20 bp, Artificial Sequence
  Synthetic
tcgacgttcttgcaacagca

SEQ ID NO: 37414 - DNA, 23 bp, Artificial Sequence
  Synthetic
gtgaaattatcgtgggtgatgct

SEQ ID NO: 37415 - DNA, 25 bp, Artificial Sequence
  Synthetic
gttttcgtttttgtccgtaatgaca

SEQ ID NO: 37416 - DNA, 22 bp, Artificial Sequence
  Synthetic
gcaatcttaccatcgcttgaca

SEQ ID NO: 37417 - DNA, 23 bp, Artificial Sequence
  Synthetic
tgacacgtgacttgatagcattt

SEQ ID NO: 37418 - DNA, 21 bp, Artificial Sequence
  Synthetic
gttggaaaaagcgcacacttc

SEQ ID NO: 37419 - DNA, 24 bp, Artificial Sequence
  Synthetic
agcaacttgattggcaatctcata

SEQ ID NO: 37420 - DNA, 24 bp, Artificial Sequence
  Synthetic
ctcgtatcttctgtctcatcgaca

SEQ ID NO: 37421 - DNA, 21 bp, Artificial Sequence
  Synthetic
tccgtttcaccagccttaact

SEQ ID NO: 37422 - DNA, 24 bp, Artificial Sequence
  Synthetic
gcgcatcaaaacctgttaagagac

SEQ ID NO: 37423 - DNA, 23 bp, Artificial Sequence
  Synthetic
ggcgtattgtttgagaaaagctg

SEQ ID NO: 37424 - DNA, 25 bp, Artificial Sequence
  Synthetic
ggattgtcattgagcctttcttgaa

SEQ ID NO: 37425 - DNA, 20 bp, Artificial Sequence
  Synthetic
gcgttacatggcagatgctg

SEQ ID NO: 37426 - DNA, 24 bp, Artificial Sequence
  Synthetic
gatgttgaaaacaataccgcgatc

SEQ ID NO: 37427 - DNA, 20 bp, Artificial Sequence
  Synthetic
ttggctgcttttaacagggc

SEQ ID NO: 37428 - DNA, 23 bp, Artificial Sequence
  Synthetic
tggaaaggtaacagttgcacttg

SEQ ID NO: 37429 - DNA, 24 bp, Artificial Sequence
  Synthetic
tcagttcttgagtacacagctttc

SEQ ID NO: 37430 - DNA, 20 bp, Artificial Sequence
  Synthetic
gcagtcgatcagtcagggtt

SEQ ID NO: 37431 - DNA, 20 bp, Artificial Sequence
  Synthetic
gatggctcaggcatatgctg

SEQ ID NO: 37432 - DNA, 20 bp, Artificial Sequence
  Synthetic
caaaacgtagtcccgcatca

SEQ ID NO: 37433 - DNA, 21 bp, Artificial Sequence
  Synthetic
gcctgggcctctctagcagta

SEQ ID NO: 37434 - DNA, 22 bp, Artificial Sequence
  Synthetic
cgggcagatgcatcacagcaaa

SEQ ID NO: 37435 - DNA, 21 bp, Artificial Sequence
  Synthetic
tcaaccgcagcacaaaatggc

SEQ ID NO: 37436 - DNA, 22 bp, Artificial Sequence
  Synthetic
gtccaaccctcattggcaacga

SEQ ID NO: 37437 - DNA, 22 bp, Artificial Sequence
  Synthetic
gggctcgtaaacctctggttcg

SEQ ID NO: 37438 - DNA, 22 bp, Artificial Sequence
  Synthetic
gtccgggctcattggtgtttga

SEQ ID NO: 37439 - DNA, 20 bp, Artificial Sequence
  Synthetic
gcagctggatcccttcgctg

SEQ ID NO: 37440 - DNA, 19 bp, Artificial Sequence
  Synthetic
cgcagtcttcacgccggac

SEQ ID NO: 37441 - DNA, 22 bp, Artificial Sequence
  Synthetic
tccacgtcatcatgccacaact

SEQ ID NO: 37442 - DNA, 21 bp, Artificial Sequence
  Synthetic
cctccacatccactcaggtgc

SEQ ID NO: 37443 - DNA, 20 bp, Artificial Sequence
  Synthetic
ttgtagaagcgggtggcgag

SEQ ID NO: 37444 - DNA, 22 bp, Artificial Sequence
  Synthetic
gctggttgagacacggttccat

SEQ ID NO: 37445 - DNA, 22 bp, Artificial Sequence
  Synthetic
gtggattggggccagaatgaca

SEQ ID NO: 37446 - DNA, 21 bp, Artificial Sequence
  Synthetic
caacatcaccagaccgccagt

SEQ ID NO: 37447 - DNA, 20 bp, Artificial Sequence
  Synthetic
tatgtgtagccggccttggt

SEQ ID NO: 37448 - DNA, 24 bp, Artificial Sequence
  Synthetic
ctaggactgccataacaaatgaca

SEQ ID NO: 37449 - DNA, 20 bp, Artificial Sequence
  Synthetic
ctgaaaaccttgtgcagcgg

SEQ ID NO: 37450 - DNA, 21 bp, Artificial Sequence
  Synthetic
aggtgcacaatcaacaagacg

SEQ ID NO: 37451 - DNA, 23 bp, Artificial Sequence
  Synthetic
gcgaatgtagcatcacgtctaac

SEQ ID NO: 37452 - DNA, 25 bp, Artificial Sequence
  Synthetic
tgtaagaacttcatgtagaccttcc

SEQ ID NO: 37453 - DNA, 24 bp, Artificial Sequence
  Synthetic
ggcataatccaaaacaaacaacca

SEQ ID NO: 37454 - DNA, 25 bp, Artificial Sequence
  Synthetic
tcatttatcgatggtacaacacaca

SEQ ID NO: 37455 - DNA, 24 bp, Artificial Sequence
  Synthetic
ccttcaaaagagtcaacaccatca

SEQ ID NO: 37456 - DNA, 24 bp, Artificial Sequence
  Synthetic
acaaacacctttatgtgagtcacg

SEQ ID NO: 37457 - DNA, 25 bp, Artificial Sequence
  Synthetic
gcataacaagcacaacgataatcag

SEQ ID NO: 37458 - DNA, 21 bp, Artificial Sequence
  Synthetic
atcagaaccaacatgagcacc

SEQ ID NO: 37459 - DNA, 23 bp, Artificial Sequence
  Synthetic
aattcagcagcactcaccttaaa

SEQ ID NO: 37460 - DNA, 25 bp, Artificial Sequence
  Synthetic
gatccattagcaatagcatcctcat

SEQ ID NO: 37461 - DNA, 22 bp, Artificial Sequence
  Synthetic
accagcttgtagacgaattgtg

SEQ ID NO: 37462 - DNA, 25 bp, Artificial Sequence
  Synthetic
acctaataggatccaaacaaccaat

SEQ ID NO: 37463 - DNA, 21 bp, Artificial Sequence
  Synthetic
catggattgctcgtgttccat

SEQ ID NO: 37464 - DNA, 23 bp, Artificial Sequence
  Synthetic
ttgccaagagatgcataaactct

SEQ ID NO: 37465 - DNA, 23 bp, Artificial Sequence
  Synthetic
attcagctgtgtcatagtaggga

SEQ ID NO: 37466 - DNA, 20 bp, Artificial Sequence
  Synthetic
tagagcccaacaccatggct

SEQ ID NO: 37467 - DNA, 22 bp, Artificial Sequence
  Synthetic
aacaaaactcatgtggtccctt

SEQ ID NO: 37468 - DNA, 20 bp, Artificial Sequence
  Synthetic
tggtgcacgtaaaggttgga

SEQ ID NO: 37469 - DNA, 21 bp, Artificial Sequence
  Synthetic
acatccatacccaaccaacca

SEQ ID NO: 37470 - DNA, 23 bp, Artificial Sequence
  Synthetic
aggttgcttgtcataacagtacc

SEQ ID NO: 37471 - DNA, 25 bp, Artificial Sequence
  Synthetic
tgtaaaaaccaagttgtcaacatcg

SEQ ID NO: 37472 - DNA, 20 bp, Artificial Sequence
  Synthetic
taaggttgagaggacgggcc

SEQ ID NO: 37473 - DNA, 25 bp, Artificial Sequence
  Synthetic
cagaataaaaaccatcctgcaatcc

SEQ ID NO: 37474 - DNA, 20 bp, Artificial Sequence
  Synthetic
cgtcctgctatacggcttga

SEQ ID NO: 37475 - DNA, 24 bp, Artificial Sequence
  Synthetic
caacagaaataatgagccaaaccc

SEQ ID NO: 37476 - DNA, 25 bp, Artificial Sequence
  Synthetic
gacatttagtacttcagctggaaca

SEQ ID NO: 37477 - DNA, 24 bp, Artificial Sequence
  Synthetic
ccgtaaacctggagagagatgatt

SEQ ID NO: 37478 - DNA, 21 bp, Artificial Sequence
  Synthetic
caccttccttagcaacccaaa

SEQ ID NO: 37479 - DNA, 23 bp, Artificial Sequence
  Synthetic
ccaaagtaacagcagcaacaaga

SEQ ID NO: 37480 - DNA, 22 bp, Artificial Sequence
  Synthetic
cgcagcctgattaggaatcaat

SEQ ID NO: 37481 - DNA, 20 bp, Artificial Sequence
  Synthetic
ttcctcacaatctgtcgcct

SEQ ID NO: 37482 - DNA, 21 bp, Artificial Sequence
  Synthetic
cgcgtcaggtctgtaaaactg

SEQ ID NO: 37483 - DNA, 21 bp, Artificial Sequence
  Synthetic
aaataatgcagcagccacact

SEQ ID NO: 37484 - DNA, 20 bp, Artificial Sequence
  Synthetic
ttcttgaaggtgccagctgg

SEQ ID NO: 37485 - DNA, 21 bp, Artificial Sequence
  Synthetic
agggttgggtagtcggagtgt

SEQ ID NO: 37486 - DNA, 21 bp, Artificial Sequence
  Synthetic
attttgaatgtcaggtgggca

SEQ ID NO: 37487 - DNA, 20 bp, Artificial Sequence
  Synthetic
cagcagggcctgtaggatct

SEQ ID NO: 37488 - DNA, 22 bp, Artificial Sequence
  Synthetic
tgtcacctgaaccattgctaac

SEQ ID NO: 37489 - DNA, 23 bp, Artificial Sequence
  Synthetic
cagacttgtcttgctgtaaagca

SEQ ID NO: 37490 - DNA, 23 bp, Artificial Sequence
  Synthetic
agatgaaaccatagagccacttg

SEQ ID NO: 37491 - DNA, 21 bp, Artificial Sequence
  Synthetic
tgctgcacaagtgaatgtcac

SEQ ID NO: 37492 - DNA, 25 bp, Artificial Sequence
  Synthetic
tgatattacattaccccccagtaca

SEQ ID NO: 37493 - DNA, 25 bp, Artificial Sequence
  Synthetic
ccactatgaaattcaacaagaggga

SEQ ID NO: 37494 - DNA, 23 bp, Artificial Sequence
  Synthetic
agcaggattttccacatcatcaa

SEQ ID NO: 37495 - DNA, 25 bp, Artificial Sequence
  Synthetic
atcgcctaaaatccaaatttccaaa

SEQ ID NO: 37496 - DNA, 21 bp, Artificial Sequence
  Synthetic
tcaccaacactctcaaggaca

SEQ ID NO: 37497 - DNA, 22 bp, Artificial Sequence
  Synthetic
tcgaattggctttgaatgtcct

SEQ ID NO: 37498 - DNA, 20 bp, Artificial Sequence
  Synthetic
ggcggtgaggtatcaagtcc

SEQ ID NO: 37499 - DNA, 22 bp, Artificial Sequence
  Synthetic
cttcctcaatgtctgccaaaga

SEQ ID NO: 37500 - DNA, 21 bp, Artificial Sequence
  Synthetic
acaacccttgaacagcaaact

SEQ ID NO: 37501 - DNA, 25 bp, Artificial Sequence
  Synthetic
tgtggatctttaaagtggtaagcac

SEQ ID NO: 37502 - DNA, 24 bp, Artificial Sequence
  Synthetic
cagatttccaatcttcctgatcca

SEQ ID NO: 37503 - DNA, 24 bp, Artificial Sequence
  Synthetic
acctgaatgatatttggtgggaaa

SEQ ID NO: 37504 - DNA, 21 bp, Artificial Sequence
  Synthetic
cttcccaatggcagtgtactc

SEQ ID NO: 37505 - DNA, 25 bp, Artificial Sequence
  Synthetic
tctgatctaggatcatccactgatg

SEQ ID NO: 37506 - DNA, 25 bp, Artificial Sequence
  Synthetic
gccagataatttagagttcgatggt

SEQ ID NO: 37507 - DNA, 20 bp, Artificial Sequence
  Synthetic
gatgaaaccaaggccccacc

SEQ ID NO: 37508 - DNA, 22 bp, Artificial Sequence
  Synthetic
agggcatagctgcaggaaaatt

SEQ ID NO: 37509 - DNA, 25 bp, Artificial Sequence
  Synthetic
aaatctcttttggtcaacttctcct

SEQ ID NO: 37510 - DNA, 25 bp, Artificial Sequence
  Synthetic
gaaaataactaatagctggacccca

SEQ ID NO: 37511 - DNA, 20 bp, Artificial Sequence
  Synthetic
ccgggaagtttttgagcgaa

SEQ ID NO: 37512 - DNA, 21 bp, Artificial Sequence
  Synthetic
ggcatagtcacgttcaatgct

SEQ ID NO: 37513 - DNA, 24 bp, Artificial Sequence
  Synthetic
gcctctagtttgtttctctggtac

SEQ ID NO: 37514 - DNA, 24 bp, Artificial Sequence
  Synthetic
tgtcctcaacatatttctcgaggt

SEQ ID NO: 37515 - DNA, 21 bp, Artificial Sequence
  Synthetic
aacacctttgatctggaaccg

SEQ ID NO: 37516 - DNA, 20 bp, Artificial Sequence
  Synthetic
atgtcctagaaacgcaggcg

SEQ ID NO: 37517 - DNA, 20 bp, Artificial Sequence
  Synthetic
atctgccatttctgcaagca

SEQ ID NO: 37518 - DNA, 20 bp, Artificial Sequence
  Synthetic
ccataaaccccaccccaaag

SEQ ID NO: 37519 - DNA, 20 bp, Artificial Sequence
  Synthetic
gatggttgctcgtttcccaa

SEQ ID NO: 37520 - DNA, 24 bp, Artificial Sequence
  Synthetic
tctcttctggcataaaagaagcaa

SEQ ID NO: 37521 - DNA, 23 bp, Artificial Sequence
  Synthetic
gcaatctgcatgaggaagcatac

SEQ ID NO: 37522 - DNA, 21 bp, Artificial Sequence
  Synthetic
tccatcgtgacaacttgagct

SEQ ID NO: 37523 - DNA, 21 bp, Artificial Sequence
  Synthetic
tgctgagcacttcctgacaat

SEQ ID NO: 37524 - DNA, 19 bp, Artificial Sequence
  Synthetic
cgacacgcgcgtggaacag

SEQ ID NO: 37525 - DNA, 19 bp, Artificial Sequence
  Synthetic
agagctccgagcgcgatcc

SEQ ID NO: 37526 - DNA, 19 bp, Artificial Sequence
  Synthetic
ggaagccatccgccctctc

SEQ ID NO: 37527 - DNA, 20 bp, Artificial Sequence
  Synthetic
cgaagtcccgcctcatgggc

SEQ ID NO: 37528 - DNA, 19 bp, Artificial Sequence
  Synthetic
tcggcagagtcttgccgcc

SEQ ID NO: 37529 - DNA, 21 bp, Artificial Sequence
  Synthetic
gctctgcctcccgtctctctc

SEQ ID NO: 37530 - DNA, 20 bp, Artificial Sequence
  Synthetic
tacccgggaggccggagaag

SEQ ID NO: 37531 - DNA, 19 bp, Artificial Sequence
  Synthetic
tggaaacacggcctgcgtc

SEQ ID NO: 37532 - DNA, 21 bp, Artificial Sequence
  Synthetic
tctctcgcttaccgttcatca

SEQ ID NO: 37533 - DNA, 22 bp, Artificial Sequence
  Synthetic
ctacttacttttttgcgcgtgg

SEQ ID NO: 37534 - DNA, 20 bp, Artificial Sequence
  Synthetic
gggtgcagtggctaagaagg

SEQ ID NO: 37535 - DNA, 20 bp, Artificial Sequence
  Synthetic
gaaatctccggcggggaatt

SEQ ID NO: 37536 - DNA, 20 bp, Artificial Sequence
  Synthetic
cgagagatgccaaactccga

SEQ ID NO: 37537 - DNA, 24 bp, Artificial Sequence
  Synthetic
ccgtcacgctaaatatgaatatgc

SEQ ID NO: 37538 - DNA, 21 bp, Artificial Sequence
  Synthetic
ggccacgagtacattcatgtt

SEQ ID NO: 37539 - DNA, 20 bp, Artificial Sequence
  Synthetic
tacggaacaaggccaaaccg

SEQ ID NO: 37540 - DNA, 23 bp, Artificial Sequence
  Synthetic
cataagcattttttggcgtcact

SEQ ID NO: 37541 - DNA, 21 bp, Artificial Sequence
  Synthetic
atagcctatggagtagcgcaa

SEQ ID NO: 37542 - DNA, 22 bp, Artificial Sequence
  Synthetic
gcccttgtaggatcacgagcca

SEQ ID NO: 37543 - DNA, 21 bp, Artificial Sequence
  Synthetic
gcgcgtctctctgtgcctcat

SEQ ID NO: 37544 - DNA, 20 bp, Artificial Sequence
  Synthetic
gctggtccggcagctctagg

SEQ ID NO: 37545 - DNA, 21 bp, Artificial Sequence
  Synthetic
cggcgttggtacgtttcccac

SEQ ID NO: 37546 - DNA, 20 bp, Artificial Sequence
  Synthetic
tacgcaccccacgcatacac

SEQ ID NO: 37547 - DNA, 21 bp, Artificial Sequence
  Synthetic
gccagataccttggagtctct

SEQ ID NO: 37548 - DNA, 25 bp, Artificial Sequence
  Synthetic
gaacttgccataggtttttcaaact

SEQ ID NO: 37549 - DNA, 22 bp, Artificial Sequence
  Synthetic
tgtaaatgtgaggccctatggg

SEQ ID NO: 37550 - DNA, 23 bp, Artificial Sequence
  Synthetic
tggttttctgtaattcgttgcct

SEQ ID NO: 37551 - DNA, 23 bp, Artificial Sequence
  Synthetic
actttcctgagtccactctagga

SEQ ID NO: 37552 - DNA, 22 bp, Artificial Sequence
  Synthetic
tgtctcccttgaaacaagcttt

SEQ ID NO: 37553 - DNA, 21 bp, Artificial Sequence
  Synthetic
gtagatggatggtgaatgccc

SEQ ID NO: 37554 - DNA, 23 bp, Artificial Sequence
  Synthetic
gcatttctttccattgcgaatgc

SEQ ID NO: 37555 - DNA, 20 bp, Artificial Sequence
  Synthetic
tcaatgaaaccggcaatggc

SEQ ID NO: 37556 - DNA, 20 bp, Artificial Sequence
  Synthetic
tccgatccgtcaggaccagc

SEQ ID NO: 37557 - DNA, 20 bp, Artificial Sequence
  Synthetic
acggggcctccctccgttag

SEQ ID NO: 37558 - DNA, 21 bp, Artificial Sequence
  Synthetic
ccgcttggttttccgtgtcac

SEQ ID NO: 37559 - DNA, 22 bp, Artificial Sequence
  Synthetic
cctcgccttgcaaactccgtta

SEQ ID NO: 37560 - DNA, 19 bp, Artificial Sequence
  Synthetic
acggcgtctgcgtctccct

SEQ ID NO: 37561 - DNA, 22 bp, Artificial Sequence
  Synthetic
cccggtatggatctcacggtca

SEQ ID NO: 37562 - DNA, 25 bp, Artificial Sequence
  Synthetic
tcactgtcataaaaaagacacacca

SEQ ID NO: 37563 - DNA, 22 bp, Artificial Sequence
  Synthetic
gatatgtttctgcctggggaaa

SEQ ID NO: 37564 - DNA, 21 bp, Artificial Sequence
  Synthetic
acgagaaggtttgtctcaggg

SEQ ID NO: 37565 - DNA, 23 bp, Artificial Sequence
  Synthetic
ggctaagaaggctgtcagttctt

SEQ ID NO: 37566 - DNA, 23 bp, Artificial Sequence
  Synthetic
ccaaggtacgcctaaggttaaat

SEQ ID NO: 37567 - DNA, 21 bp, Artificial Sequence
  Synthetic
cgacaacgtttcctgtaagct

SEQ ID NO: 37568 - DNA, 20 bp, Artificial Sequence
  Synthetic
cttttctccgccttcccgat

SEQ ID NO: 37569 - DNA, 20 bp, Artificial Sequence
  Synthetic
taacgccacagcctgttctt

SEQ ID NO: 37570 - DNA, 20 bp, Artificial Sequence
  Synthetic
cactgaagcaaagcaccctg

SEQ ID NO: 37571 - DNA, 22 bp, Artificial Sequence
  Synthetic
tgcgaaaaagagttgggattcc

SEQ ID NO: 37572 - DNA, 20 bp, Artificial Sequence
  Synthetic
ttatcgcgagcgctgaacat

SEQ ID NO: 37573 - DNA, 18 bp, Artificial Sequence
  Synthetic
atctgccgcgtggaagcc

SEQ ID NO: 37574 - DNA, 22 bp, Artificial Sequence
  Synthetic
agctctgttctctcccactcca

SEQ ID NO: 37575 - DNA, 19 bp, Artificial Sequence
  Synthetic
acggcgcgcgcatagactc

SEQ ID NO: 37576 - DNA, 19 bp, Artificial Sequence
  Synthetic
acgttcgacgccagacggc

SEQ ID NO: 37577 - DNA, 24 bp, Artificial Sequence
  Synthetic
actgctttgtccatgttatttgga

SEQ ID NO: 37578 - DNA, 24 bp, Artificial Sequence
  Synthetic
tccacaatatcaagtgcaagatcc

SEQ ID NO: 37579 - DNA, 21 bp, Artificial Sequence
  Synthetic
accagtctcgtgacatttcct

SEQ ID NO: 37580 - DNA, 22 bp, Artificial Sequence
  Synthetic
gactcgaaccgtgttaccattc

SEQ ID NO: 37581 - DNA, 21 bp, Artificial Sequence
  Synthetic
tgtgagctgtctagttggtct

SEQ ID NO: 37582 - DNA, 20 bp, Artificial Sequence
  Synthetic
tgttgtcacgctgtagctgc

SEQ ID NO: 37583 - DNA, 21 bp, Artificial Sequence
  Synthetic
ttcttctagcacttcaaccgc

SEQ ID NO: 37584 - DNA, 23 bp, Artificial Sequence
  Synthetic
cacaatgcaagcaataccatacc

SEQ ID NO: 37585 - DNA, 25 bp, Artificial Sequence
  Synthetic
ccatctgagttaaactaaactgtgc

SEQ ID NO: 37586 - DNA, 20 bp, Artificial Sequence
  Synthetic
tctccatcctcgtcctctgt

SEQ ID NO: 37587 - DNA, 20 bp, Artificial Sequence
  Synthetic
cactacatccgtccactgca

SEQ ID NO: 37588 - DNA, 21 bp, Artificial Sequence
  Synthetic
gcaggaacagaaggaaacact

SEQ ID NO: 37589 - DNA, 20 bp, Artificial Sequence
  Synthetic
ggcaccgatacatcgccatt

SEQ ID NO: 37590 - DNA, 24 bp, Artificial Sequence
  Synthetic
ggaggagtacagcctacaatacat

SEQ ID NO: 37591 - DNA, 20 bp, Artificial Sequence
  Synthetic
tacgtttgggggtgactgac

SEQ ID NO: 37592 - DNA, 24 bp, Artificial Sequence
  Synthetic
caccctaatagtacatattgggcg

SEQ ID NO: 37593 - DNA, 20 bp, Artificial Sequence
  Synthetic
atccatggatgtcctgggtg

SEQ ID NO: 37594 - DNA, 22 bp, Artificial Sequence
  Synthetic
gtggaagtgttggtacgttacc

SEQ ID NO: 37595 - DNA, 21 bp, Artificial Sequence
  Synthetic
tgcatgtgtgttttggcatgt

SEQ ID NO: 37596 - DNA, 22 bp, Artificial Sequence
  Synthetic
ctatgctcccatctctgctaca

SEQ ID NO: 37597 - DNA, 25 bp, Artificial Sequence
  Synthetic
cctcaaagctatgttgtaactgtgt

SEQ ID NO: 37598 - DNA, 21 bp, Artificial Sequence
  Synthetic
accatcatccaccttgctaca

SEQ ID NO: 37599 - DNA, 23 bp, Artificial Sequence
  Synthetic
ccctcatagcttactgcagaaga

SEQ ID NO: 37600 - DNA, 25 bp, Artificial Sequence
  Synthetic
ggtggatgatacagtaacaaacagt

SEQ ID NO: 37601 - DNA, 23 bp, Artificial Sequence
  Synthetic
cacaatggttgcaagtttacagg

SEQ ID NO: 37602 - DNA, 23 bp, Artificial Sequence
  Synthetic
tggtgaaaaggttaacgttgtgt

SEQ ID NO: 37603 - DNA, 24 bp, Artificial Sequence
  Synthetic
gcgacaaacctatattccagtctt

SEQ ID NO: 37604 - DNA, 22 bp, Artificial Sequence
  Synthetic
ggaatgtccagcctcatctgca

SEQ ID NO: 37605 - DNA, 20 bp, Artificial Sequence
  Synthetic
ttgtgccatgcctgtttggt

SEQ ID NO: 37606 - DNA, 22 bp, Artificial Sequence
  Synthetic
gtccctagcattgcatcctttc

SEQ ID NO: 37607 - DNA, 25 bp, Artificial Sequence
  Synthetic
cctttattcttgagatgtggacaca

SEQ ID NO: 37608 - DNA, 21 bp, Artificial Sequence
  Synthetic
ccttcaccacctgctgtgatt

SEQ ID NO: 37609 - DNA, 23 bp, Artificial Sequence
  Synthetic
gtgtcaaggttgctatgatcgtt

SEQ ID NO: 37610 - DNA, 21 bp, Artificial Sequence
  Synthetic
aaaagaccttcaagcgctgaa

SEQ ID NO: 37611 - DNA, 24 bp, Artificial Sequence
  Synthetic
caattcatccacacattctgcttc

SEQ ID NO: 37612 - DNA, 23 bp, Artificial Sequence
  Synthetic
accgtaacccaattatcagagca

SEQ ID NO: 37613 - DNA, 23 bp, Artificial Sequence
  Synthetic
acaatttaaaaaagcagccgcat

SEQ ID NO: 37614 - DNA, 25 bp, Artificial Sequence
  Synthetic
gttttgcatcaacactcatcatgtt

SEQ ID NO: 37615 - DNA, 25 bp, Artificial Sequence
  Synthetic
catcagcattctaattgcttgcata

SEQ ID NO: 37616 - DNA, 22 bp, Artificial Sequence
  Synthetic
tgtcgtctgttttccggttggt

SEQ ID NO: 37617 - DNA, 20 bp, Artificial Sequence
  Synthetic
atcagtcagagggtcgatgg

SEQ ID NO: 37618 - DNA, 24 bp, Artificial Sequence
  Synthetic
aaataaggatgtcctgtgcatgaa

SEQ ID NO: 37619 - DNA, 25 bp, Artificial Sequence
  Synthetic
atagtcagtaccttccattggaatg

SEQ ID NO: 37620 - DNA, 23 bp, Artificial Sequence
  Synthetic
ttttctgcagtaggacatttcgt

SEQ ID NO: 37621 - DNA, 21 bp, Artificial Sequence
  Synthetic
gcctcatctgccaggcctacc

SEQ ID NO: 37622 - DNA, 20 bp, Artificial Sequence
  Synthetic
gaaacacggacacccaaagt

SEQ ID NO: 37623 - DNA, 23 bp, Artificial Sequence
  Synthetic
aagctggatttgtaagtgcttct

SEQ ID NO: 37624 - DNA, 25 bp, Artificial Sequence
  Synthetic
ccatatctttaaggcaatcaggcaa

SEQ ID NO: 37625 - DNA, 24 bp, Artificial Sequence
  Synthetic
cccctgttttacagactgtctagc

SEQ ID NO: 37626 - DNA, 23 bp, Artificial Sequence
  Synthetic
gtccatgggtatcacaactatgg

SEQ ID NO: 37627 - DNA, 20 bp, Artificial Sequence
  Synthetic
tgcaaaaccattcgccacct

SEQ ID NO: 37628 - DNA, 21 bp, Artificial Sequence
  Synthetic
agctgaacccaatccagtgaa

SEQ ID NO: 37629 - DNA, 23 bp, Artificial Sequence
  Synthetic
tccagtagtgtcatctggtttct

SEQ ID NO: 37630 - DNA, 20 bp, Artificial Sequence
  Synthetic
gggtctggaggaagggagta

SEQ ID NO: 37631 - DNA, 20 bp, Artificial Sequence
  Synthetic
tagaagcgcctgtcaatggc

SEQ ID NO: 37632 - DNA, 20 bp, Artificial Sequence
  Synthetic
taggcatgcctgtgtatggt

SEQ ID NO: 37633 - DNA, 20 bp, Artificial Sequence
  Synthetic
gcactgcaccacattgacct

SEQ ID NO: 37634 - DNA, 20 bp, Artificial Sequence
  Synthetic
tccttggggtgtaaagctgc

SEQ ID NO: 37635 - DNA, 20 bp, Artificial Sequence
  Synthetic
tctggattacaccccacagc

SEQ ID NO: 37636 - DNA, 25 bp, Artificial Sequence
  Synthetic
tgattatggccatatgatccacagt

SEQ ID NO: 37637 - DNA, 22 bp, Artificial Sequence
  Synthetic
ccaagttacagctaggggagac

SEQ ID NO: 37638 - DNA, 25 bp, Artificial Sequence
  Synthetic
ctctgatgtcaatattctagctccc

SEQ ID NO: 37639 - DNA, 20 bp, Artificial Sequence
  Synthetic
ggttgcctgtaagcacttcc

SEQ ID NO: 37640 - DNA, 24 bp, Artificial Sequence
  Synthetic
gttcaatctttggtttgctctgtt

SEQ ID NO: 37641 - DNA, 20 bp, Artificial Sequence
  Synthetic
gttcccctgctgatctcgga

SEQ ID NO: 37642 - DNA, 23 bp, Artificial Sequence
  Synthetic
ttggcgaaaaaaacaccgtaatc

SEQ ID NO: 37643 - DNA, 21 bp, Artificial Sequence
  Synthetic
ggatttacagccttgccctgg

SEQ ID NO: 37644 - DNA, 20 bp, Artificial Sequence
  Synthetic
tgtaaacagccgctcgcctc

SEQ ID NO: 37645 - DNA, 21 bp, Artificial Sequence
  Synthetic
tgaactatcctccacaagccg

SEQ ID NO: 37646 - DNA, 20 bp, Artificial Sequence
  Synthetic
ctccacaggtgcatggctgc

SEQ ID NO: 37647 - DNA, 22 bp, Artificial Sequence
  Synthetic
gcatcgttctccaacagcagct

SEQ ID NO: 37648 - DNA, 22 bp, Artificial Sequence
  Synthetic
gtccaccgttgatcccatcaca

SEQ ID NO: 37649 - DNA, 21 bp, Artificial Sequence
  Synthetic
gggatctgggcggtaacatcg

SEQ ID NO: 37650 - DNA, 20 bp, Artificial Sequence
  Synthetic
cgtagagcacgtcaccgagc

SEQ ID NO: 37651 - DNA, 21 bp, Artificial Sequence
  Synthetic
tgcccgctcttgagagggaat

SEQ ID NO: 37652 - DNA, 21 bp, Artificial Sequence
  Synthetic
gagcgcaccactgtttttccc

SEQ ID NO: 37653 - DNA, 22 bp, Artificial Sequence
  Synthetic
tcccacctacatcggcatcctc

SEQ ID NO: 37654 - DNA, 20 bp, Artificial Sequence
  Synthetic
cgtggagaagggctgctgtc

SEQ ID NO: 37655 - DNA, 22 bp, Artificial Sequence
  Synthetic
ggcacaacatcaacggctttga

SEQ ID NO: 37656 - DNA, 21 bp, Artificial Sequence
  Synthetic
gcgatcttgccgtgcgcttac

SEQ ID NO: 37657 - DNA, 22 bp, Artificial Sequence
  Synthetic
acgcgctgtgtatcttgtggat

SEQ ID NO: 37658 - DNA, 19 bp, Artificial Sequence
  Synthetic
agaggcggcagatccagga

SEQ ID NO: 37659 - DNA, 20 bp, Artificial Sequence
  Synthetic
ccttgcgcaggtggtcatgc

SEQ ID NO: 37660 - DNA, 20 bp, Artificial Sequence
  Synthetic
cgtcccctacgccgcaattg

SEQ ID NO: 37661 - DNA, 20 bp, Artificial Sequence
  Synthetic
ccgcatggaagactccgcct

SEQ ID NO: 37662 - DNA, 21 bp, Artificial Sequence
  Synthetic
ggcctaacccgtttgcgttcc

SEQ ID NO: 37663 - DNA, 18 bp, Artificial Sequence
  Synthetic
aaccgggttctgccgcga

SEQ ID NO: 37664 - DNA, 22 bp, Artificial Sequence
  Synthetic
cgcgtaaaacttgcccaggctc

SEQ ID NO: 37665 - DNA, 20 bp, Artificial Sequence
  Synthetic
tcacggaggcgtcagtaccc

SEQ ID NO: 37666 - DNA, 19 bp, Artificial Sequence
  Synthetic
tgtacaccagcccggcctc

SEQ ID NO: 37667 - DNA, 19 bp, Artificial Sequence
  Synthetic
gttcaccgtctgcaggccc

SEQ ID NO: 37668 - DNA, 21 bp, Artificial Sequence
  Synthetic
agcaggaagtttagggtggcc

SEQ ID NO: 37669 - DNA, 20 bp, Artificial Sequence
  Synthetic
ggaggagaggacaccaccgc

SEQ ID NO: 37670 - DNA, 22 bp, Artificial Sequence
  Synthetic
tccaatatcgctctccagcacg

SEQ ID NO: 37671 - DNA, 20 bp, Artificial Sequence
  Synthetic
cactgccttctgtagcgtct

SEQ ID NO: 37672 - DNA, 20 bp, Artificial Sequence
  Synthetic
ggggtcttgcatgaggtccg

SEQ ID NO: 37673 - DNA, 19 bp, Artificial Sequence
  Synthetic
tagggacaggtgcggcgac

SEQ ID NO: 37674 - DNA, 19 bp, Artificial Sequence
  Synthetic
tgctagagatggccgcggc

SEQ ID NO: 37675 - DNA, 19 bp, Artificial Sequence
  Synthetic
ccaatttacgcgccgccgc

SEQ ID NO: 37676 - DNA, 22 bp, Artificial Sequence
  Synthetic
taaaggcggtggaggctgggag

SEQ ID NO: 37677 - DNA, 18 bp, Artificial Sequence
  Synthetic
cgcaggcggcaagtgaga

SEQ ID NO: 37678 - DNA, 19 bp, Artificial Sequence
  Synthetic
cgggttcaggcggctgttt

SEQ ID NO: 37679 - DNA, 19 bp, Artificial Sequence
  Synthetic
agtacgtgtcggtggcgcg

SEQ ID NO: 37680 - DNA, 24 bp, Artificial Sequence
  Synthetic
accgtatgtgtgagtttttgtagt

SEQ ID NO: 37681 - DNA, 21 bp, Artificial Sequence
  Synthetic
ggtaagacagctccgtgtttc

SEQ ID NO: 37682 - DNA, 22 bp, Artificial Sequence
  Synthetic
cgttggccggcgtgtacttaaa

SEQ ID NO: 37683 - DNA, 20 bp, Artificial Sequence
  Synthetic
taagcagccggtcattgccg

SEQ ID NO: 37684 - DNA, 21 bp, Artificial Sequence
  Synthetic
ccggtgaagcccgagttgttg

SEQ ID NO: 37685 - DNA, 20 bp, Artificial Sequence
  Synthetic
taatgcccgtgcactgcgag

SEQ ID NO: 37686 - DNA, 22 bp, Artificial Sequence
  Synthetic
aggaccatgtggtggagatgga

SEQ ID NO: 37687 - DNA, 21 bp, Artificial Sequence
  Synthetic
cctgcgcgatgcttacaagct

SEQ ID NO: 37688 - DNA, 20 bp, Artificial Sequence
  Synthetic
agggtctcggggtcgctaaa

SEQ ID NO: 37689 - DNA, 22 bp, Artificial Sequence
  Synthetic
cctcgatcacgtccgagtggta

SEQ ID NO: 37690 - DNA, 20 bp, Artificial Sequence
  Synthetic
ccgtaagatccgcgtgctgc

SEQ ID NO: 37691 - DNA, 20 bp, Artificial Sequence
  Synthetic
catgcggacttcggccagtg

SEQ ID NO: 37692 - DNA, 23 bp, Artificial Sequence
  Synthetic
ctcaccacaaagagtacagcaaa

SEQ ID NO: 37693 - DNA, 23 bp, Artificial Sequence
  Synthetic
ccatcacaaaactgcattccctt

SEQ ID NO: 37694 - DNA, 23 bp, Artificial Sequence
  Synthetic
ccttactttgtttagccccgttt

SEQ ID NO: 37695 - DNA, 20 bp, Artificial Sequence
  Synthetic
gcaggtgagcagggcaaaga

SEQ ID NO: 37696 - DNA, 21 bp, Artificial Sequence
  Synthetic
gcaggagcagaccatcactat

SEQ ID NO: 37697 - DNA, 20 bp, Artificial Sequence
  Synthetic
gttgacgcccaccatgcagg

SEQ ID NO: 37698 - DNA, 21 bp, Artificial Sequence
  Synthetic
tggaatccattggaggagaca

SEQ ID NO: 37699 - DNA, 20 bp, Artificial Sequence
  Synthetic
tgataagccaccgccttctg

SEQ ID NO: 37700 - DNA, 25 bp, Artificial Sequence
  Synthetic
tgcatattttttagagccagtggta

SEQ ID NO: 37701 - DNA, 25 bp, Artificial Sequence
  Synthetic
gctgcacttactgtgaaaacatgag

SEQ ID NO: 37702 - DNA, 22 bp, Artificial Sequence
  Synthetic
ggcctacagagtcctggctgat

SEQ ID NO: 37703 - DNA, 24 bp, Artificial Sequence
  Synthetic
aaaatgagaattacctggggatgg

SEQ ID NO: 37704 - DNA, 22 bp, Artificial Sequence
  Synthetic
ggcattaccggagacacaaaga

SEQ ID NO: 37705 - DNA, 21 bp, Artificial Sequence
  Synthetic
aagacaggagcttactgtgct

SEQ ID NO: 37706 - DNA, 25 bp, Artificial Sequence
  Synthetic
tcagctaggtcagtaagtagttagt

SEQ ID NO: 37707 - DNA, 22 bp, Artificial Sequence
  Synthetic
cctctagatccgcattctctct

SEQ ID NO: 37708 - DNA, 20 bp, Artificial Sequence
  Synthetic
ttccaggggcaaagtctcca

SEQ ID NO: 37709 - DNA, 24 bp, Artificial Sequence
  Synthetic
cgtttattgtttgcctggcttagt

SEQ ID NO: 37710 - DNA, 21 bp, Artificial Sequence
  Synthetic
gctgctagtttccatgcttct

SEQ ID NO: 37711 - DNA, 21 bp, Artificial Sequence
  Synthetic
gtggaacttttgggctggttt

SEQ ID NO: 37712 - DNA, 21 bp, Artificial Sequence
  Synthetic
ttcgtgtgagaatctggggaa

SEQ ID NO: 37713 - DNA, 24 bp, Artificial Sequence
  Synthetic
tctccagatctaactgttcttcgt

SEQ ID NO: 37714 - DNA, 24 bp, Artificial Sequence
  Synthetic
agagtttttgggaccttagcaatt

SEQ ID NO: 37715 - DNA, 21 bp, Artificial Sequence
  Synthetic
tttccatgcaagttggctcat

SEQ ID NO: 37716 - DNA, 24 bp, Artificial Sequence
  Synthetic
ttgatgttggtagaggactttgtc

SEQ ID NO: 37717 - DNA, 25 bp, Artificial Sequence
  Synthetic
tgattcactggtattctgtttgtcc

SEQ ID NO: 37718 - DNA, 25 bp, Artificial Sequence
  Synthetic
tcttacttgttgtacacctgattgg

SEQ ID NO: 37719 - DNA, 24 bp, Artificial Sequence
  Synthetic
cacttcctacactcggatacattg

SEQ ID NO: 37720 - DNA, 22 bp, Artificial Sequence
  Synthetic
agtgtggttgtagcaacattga

SEQ ID NO: 37721 - DNA, 24 bp, Artificial Sequence
  Synthetic
tgtttaaggattttgcctagcgat

SEQ ID NO: 37722 - DNA, 25 bp, Artificial Sequence
  Synthetic
ccttttgctagtagtgtttctgcta

SEQ ID NO: 37723 - DNA, 21 bp, Artificial Sequence
  Synthetic
ccattgctgacactctgacac

SEQ ID NO: 37724 - DNA, 23 bp, Artificial Sequence
  Synthetic
accacattttttgcctcaatcct

SEQ ID NO: 37725 - DNA, 20 bp, Artificial Sequence
  Synthetic
agtgctgcttccatccatga

SEQ ID NO: 37726 - DNA, 23 bp, Artificial Sequence
  Synthetic
ccagtcctctaagacttctggta

SEQ ID NO: 37727 - DNA, 21 bp, Artificial Sequence
  Synthetic
ttgcgctggaactttcaagaa

SEQ ID NO: 37728 - DNA, 23 bp, Artificial Sequence
  Synthetic
tccatcgtttcaagacacgaatt

SEQ ID NO: 37729 - DNA, 25 bp, Artificial Sequence
  Synthetic
tgtgttgttatttccatctcctctt

SEQ ID NO: 37730 - DNA, 21 bp, Artificial Sequence
  Synthetic
gcccagactgttcaagtttct

SEQ ID NO: 37731 - DNA, 23 bp, Artificial Sequence
  Synthetic
ggtgtatttcttttgcccgagat

SEQ ID NO: 37732 - DNA, 22 bp, Artificial Sequence
  Synthetic
ccattagctcccatttcaagca

SEQ ID NO: 37733 - DNA, 20 bp, Artificial Sequence
  Synthetic
gcacggtcccatagatgagt

SEQ ID NO: 37734 - DNA, 22 bp, Artificial Sequence
  Synthetic
ggtccgtaacaggaatggtccc

SEQ ID NO: 37735 - DNA, 21 bp, Artificial Sequence
  Synthetic
tgctactgtttccctgctctt

SEQ ID NO: 37736 - DNA, 21 bp, Artificial Sequence
  Synthetic
gccagcacactttcatctgtt

SEQ ID NO: 37737 - DNA, 21 bp, Artificial Sequence
  Synthetic
cgcttggtccgtaaaatacca

SEQ ID NO: 37738 - DNA, 20 bp, Artificial Sequence
  Synthetic
cggtcggctagtgactccat

SEQ ID NO: 37739 - DNA, 20 bp, Artificial Sequence
  Synthetic
tccagggttcatgcgcatat

SEQ ID NO: 37740 - DNA, 23 bp, Artificial Sequence
  Synthetic
agaaaaacaccaaaaatgcgctt

SEQ ID NO: 37741 - DNA, 20 bp, Artificial Sequence
  Synthetic
acgacccccagtaccagagc

SEQ ID NO: 37742 - DNA, 22 bp, Artificial Sequence
  Synthetic
cagcatccgatggaatgggact

SEQ ID NO: 37743 - DNA, 20 bp, Artificial Sequence
  Synthetic
gaatgtggatgggtggcagg

SEQ ID NO: 37744 - DNA, 24 bp, Artificial Sequence
  Synthetic
tgcaaactacaatagggatgtcct

SEQ ID NO: 37745 - DNA, 20 bp, Artificial Sequence
  Synthetic
ggtagagggtggtggtacca

SEQ ID NO: 37746 - DNA, 23 bp, Artificial Sequence
  Synthetic
tgttccaaactgtgtgtgttagc

SEQ ID NO: 37747 - DNA, 19 bp, Artificial Sequence
  Synthetic
gccaatggcggctcggaaa

SEQ ID NO: 37748 - DNA, 21 bp, Artificial Sequence
  Synthetic
gcaacgacaaatgagggtgag

SEQ ID NO: 37749 - DNA, 21 bp, Artificial Sequence
  Synthetic
agaaagacgctcctacgccga

SEQ ID NO: 37750 - DNA, 16 bp, Artificial Sequence
  Synthetic
agcaagcggcgcccat

SEQ ID NO: 37751 - DNA, 22 bp, Artificial Sequence
  Synthetic
gcccatcgtacacgagcttcca

SEQ ID NO: 37752 - DNA, 20 bp, Artificial Sequence
  Synthetic
actccaagccagtcgtacgc

SEQ ID NO: 37753 - DNA, 21 bp, Artificial Sequence
  Synthetic
agtgggaaatacctctcctgg

SEQ ID NO: 37754 - DNA, 22 bp, Artificial Sequence
  Synthetic
cgggacgcattcctggatttcg

SEQ ID NO: 37755 - DNA, 22 bp, Artificial Sequence
  Synthetic
tccactctatccacttcgccga

SEQ ID NO: 37756 - DNA, 22 bp, Artificial Sequence
  Synthetic
tctccgctccgaagttagggat

SEQ ID NO: 37757 - DNA, 19 bp, Artificial Sequence
  Synthetic
acggccccttgagcaaccg

SEQ ID NO: 37758 - DNA, 19 bp, Artificial Sequence
  Synthetic
taggcggtcgcgtggtctg

SEQ ID NO: 37759 - DNA, 19 bp, Artificial Sequence
  Synthetic
ctcccccaaagcggccaat

SEQ ID NO: 37760 - DNA, 21 bp, Artificial Sequence
  Synthetic
gaaagtgcatccgccaaccac

SEQ ID NO: 37761 - DNA, 21 bp, Artificial Sequence
  Synthetic
caggtatggggtcctctggga

SEQ ID NO: 37762 - DNA, 19 bp, Artificial Sequence
  Synthetic
tgtcaccagctgcccccca

SEQ ID NO: 37763 - DNA, 19 bp, Artificial Sequence
  Synthetic
acgtcccgtctttccgccg

SEQ ID NO: 37764 - DNA, 21 bp, Artificial Sequence
  Synthetic
ggggatctccagtgcgctttc

SEQ ID NO: 37765 - DNA, 21 bp, Artificial Sequence
  Synthetic
taacgggcagtgcgtggggta

SEQ ID NO: 37766 - DNA, 21 bp, Artificial Sequence
  Synthetic
ggaggtgtctgtggtgggcta

SEQ ID NO: 37767 - DNA, 19 bp, Artificial Sequence
  Synthetic
cgagcgttcaaggggaggg

SEQ ID NO: 37768 - DNA, 19 bp, Artificial Sequence
  Synthetic
tctcgtgcggaaccttggc

SEQ ID NO: 37769 - DNA, 22 bp, Artificial Sequence
  Synthetic
cgtcctctgacaccaccttagc

SEQ ID NO: 37770 - DNA, 22 bp, Artificial Sequence
  Synthetic
gcagcaggatgaacaggagcag

SEQ ID NO: 37771 - DNA, 22 bp, Artificial Sequence
  Synthetic
gtcttcctccccaatccctcca

SEQ ID NO: 37772 - DNA, 18 bp, Artificial Sequence
  Synthetic
actaccgctgcgtggcac

SEQ ID NO: 37773 - DNA, 21 bp, Artificial Sequence
  Synthetic
gcaacgccctggtatacctgg

SEQ ID NO: 37774 - DNA, 21 bp, Artificial Sequence
  Synthetic
cactgtccatctcctcggctg

SEQ ID NO: 37775 - DNA, 19 bp, Artificial Sequence
  Synthetic
agagtgcccgacacggtgg

SEQ ID NO: 37776 - DNA, 20 bp, Artificial Sequence
  Synthetic
ggttcagcggcttgccaagg

SEQ ID NO: 37777 - DNA, 22 bp, Artificial Sequence
  Synthetic
agatgttcctagggcatggatt

SEQ ID NO: 37778 - DNA, 23 bp, Artificial Sequence
  Synthetic
ctaggaacgacacaaactctacc

SEQ ID NO: 37779 - DNA, 22 bp, Artificial Sequence
  Synthetic
gccgactcgtgtcattccacat

SEQ ID NO: 37780 - DNA, 22 bp, Artificial Sequence
  Synthetic
ggtgctagacacagatgcggat

SEQ ID NO: 37781 - DNA, 20 bp, Artificial Sequence
  Synthetic
cgctgttcaacgctggtgta

SEQ ID NO: 37782 - DNA, 25 bp, Artificial Sequence
  Synthetic
aggataagaatcaccaacagacatt

SEQ ID NO: 37783 - DNA, 22 bp, Artificial Sequence
  Synthetic
cacttcgaagccaccagtacca

SEQ ID NO: 37784 - DNA, 20 bp, Artificial Sequence
  Synthetic
aaggcaccgaaccctgtttc

SEQ ID NO: 37785 - DNA, 21 bp, Artificial Sequence
  Synthetic
aagcagttccagggaatttcc

SEQ ID NO: 37786 - DNA, 25 bp, Artificial Sequence
  Synthetic
ctgtgtaaccccaatagaatcttca

SEQ ID NO: 37787 - DNA, 25 bp, Artificial Sequence
  Synthetic
ctgttaaaggctgtaaccaaaagtg

SEQ ID NO: 37788 - DNA, 25 bp, Artificial Sequence
  Synthetic
tgatattcctttctgccttgcataa

SEQ ID NO: 37789 - DNA, 21 bp, Artificial Sequence
  Synthetic
gtgttggagccttccccgatg

SEQ ID NO: 37790 - DNA, 20 bp, Artificial Sequence
  Synthetic
acacctgcttccagttcagg

SEQ ID NO: 37791 - DNA, 22 bp, Artificial Sequence
  Synthetic
gttcaaaggtgagggtgacatc

SEQ ID NO: 37792 - DNA, 23 bp, Artificial Sequence
  Synthetic
cacataatcatctgtgctgagca

SEQ ID NO: 37793 - DNA, 22 bp, Artificial Sequence
  Synthetic
tcctaaaggacctcctctgatg

SEQ ID NO: 37794 - DNA, 23 bp, Artificial Sequence
  Synthetic
gtctgattctcctcattcacctg

SEQ ID NO: 37795 - DNA, 22 bp, Artificial Sequence
  Synthetic
atcttttcaggtgtaggggtct

SEQ ID NO: 37796 - DNA, 25 bp, Artificial Sequence
  Synthetic
tttttccaccaatgttaaaacacgt

SEQ ID NO: 37797 - DNA, 20 bp, Artificial Sequence
  Synthetic
ttctgctatgccactgtcct

SEQ ID NO: 37798 - DNA, 25 bp, Artificial Sequence
  Synthetic
tttagtaacccaatctggtaacgac

SEQ ID NO: 37799 - DNA, 22 bp, Artificial Sequence
  Synthetic
gcggctgattctccttgttccc

SEQ ID NO: 37800 - DNA, 24 bp, Artificial Sequence
  Synthetic
tgtttatcgctgtcaaatgctact

SEQ ID NO: 37801 - DNA, 20 bp, Artificial Sequence
  Synthetic
tgctgctaacccagggaaag

SEQ ID NO: 37802 - DNA, 23 bp, Artificial Sequence
  Synthetic
agatttgcatctacatgggaagc

SEQ ID NO: 37803 - DNA, 21 bp, Artificial Sequence
  Synthetic
tggcaccataatgtctgcatg

SEQ ID NO: 37804 - DNA, 20 bp, Artificial Sequence
  Synthetic
aaggcggtcagtactcgaat

SEQ ID NO: 37805 - DNA, 25 bp, Artificial Sequence
  Synthetic
accagtactacctataccaagagga

SEQ ID NO: 37806 - DNA, 24 bp, Artificial Sequence
  Synthetic
gctgatattgaggaggctttggat

SEQ ID NO: 37807 - DNA, 25 bp, Artificial Sequence
  Synthetic
actcatctgaacatgttttcacagt

SEQ ID NO: 37808 - DNA, 25 bp, Artificial Sequence
  Synthetic
tgtttgtacagttgaaggtagcatt

SEQ ID NO: 37809 - DNA, 21 bp, Artificial Sequence
  Synthetic
gagggctaattaggagtgcct

SEQ ID NO: 37810 - DNA, 20 bp, Artificial Sequence
  Synthetic
ctccaagctgccatgtggaa

SEQ ID NO: 37811 - DNA, 20 bp, Artificial Sequence
  Synthetic
attcgcaaggccctgctatg

SEQ ID NO: 37812 - DNA, 20 bp, Artificial Sequence
  Synthetic
atcgttctggtgttgctgcc

SEQ ID NO: 37813 - DNA, 21 bp, Artificial Sequence
  Synthetic
gcgaatttccctgctccacat

SEQ ID NO: 37814 - DNA, 20 bp, Artificial Sequence
  Synthetic
ccacctcaccttgcaccttt

SEQ ID NO: 37815 - DNA, 19 bp, Artificial Sequence
  Synthetic
aacggggctggcgttggag

SEQ ID NO: 37816 - DNA, 20 bp, Artificial Sequence
  Synthetic
cggctggctttttgggacct

SEQ ID NO: 37817 - DNA, 20 bp, Artificial Sequence
  Synthetic
ccaagtcgtccaagatgtcg

SEQ ID NO: 37818 - DNA, 25 bp, Artificial Sequence
  Synthetic
aaacacaggattatcaaaggcaaag

SEQ ID NO: 37819 - DNA, 21 bp, Artificial Sequence
  Synthetic
agactcctctgcatcgattgt

SEQ ID NO: 37820 - DNA, 20 bp, Artificial Sequence
  Synthetic
tctgggagtagagaagcggg

SEQ ID NO: 37821 - DNA, 21 bp, Artificial Sequence
  Synthetic
acaggtgttgaaggtggtaga

SEQ ID NO: 37822 - DNA, 24 bp, Artificial Sequence
  Synthetic
gaccaatttctaagcctctacagg

SEQ ID NO: 37823 - DNA, 20 bp, Artificial Sequence
  Synthetic
ggttgtttgtcagggcatcg

SEQ ID NO: 37824 - DNA, 24 bp, Artificial Sequence
  Synthetic
ttgcttggtccattctaatgcata

SEQ ID NO: 37825 - DNA, 22 bp, Artificial Sequence
  Synthetic
cccatttctcttgcgcaatttg

SEQ ID NO: 37826 - DNA, 24 bp, Artificial Sequence
  Synthetic
ctctccatttttcttcccaatcca

SEQ ID NO: 37827 - DNA, 21 bp, Artificial Sequence
  Synthetic
actcctcacaaagcaaaggtg

SEQ ID NO: 37828 - DNA, 23 bp, Artificial Sequence
  Synthetic
tttaactcagcaatagccctgtt

SEQ ID NO: 37829 - DNA, 22 bp, Artificial Sequence
  Synthetic
gggcgtcttgtaggagcttgtt

SEQ ID NO: 37830 - DNA, 24 bp, Artificial Sequence
  Synthetic
gttatgccagatggtaaagtaggt

SEQ ID NO: 37831 - DNA, 20 bp, Artificial Sequence
  Synthetic
ttcacatggttcccccacat

SEQ ID NO: 37832 - DNA, 24 bp, Artificial Sequence
  Synthetic
aggtgtcttctatgttttgtggag

SEQ ID NO: 37833 - DNA, 22 bp, Artificial Sequence
  Synthetic
tcatccacttggtcatcatcgt

SEQ ID NO: 37834 - DNA, 21 bp, Artificial Sequence
  Synthetic
catcttcgcctactccactgt

SEQ ID NO: 37835 - DNA, 22 bp, Artificial Sequence
  Synthetic
ccagtacctttaccagacccaa

SEQ ID NO: 37836 - DNA, 20 bp, Artificial Sequence
  Synthetic
gatttggagtggcggtcacc

SEQ ID NO: 37837 - DNA, 22 bp, Artificial Sequence
  Synthetic
gcccaacagctccaatacctaa

SEQ ID NO: 37838 - DNA, 23 bp, Artificial Sequence
  Synthetic
gcaccaaaacctgtatcacacat

SEQ ID NO: 37839 - DNA, 25 bp, Artificial Sequence
  Synthetic
cgacttcaaactcttctgtatgtct

SEQ ID NO: 37840 - DNA, 22 bp, Artificial Sequence
  Synthetic
gtttggcatagcacctggaaat

SEQ ID NO: 37841 - DNA, 20 bp, Artificial Sequence
  Synthetic
gtactcaccttgcctcgacc

SEQ ID NO: 37842 - DNA, 25 bp, Artificial Sequence
  Synthetic
gtgtataatcactcgtatccctgtc

SEQ ID NO: 37843 - DNA, 20 bp, Artificial Sequence
  Synthetic
cctctatgccactgtctcca

SEQ ID NO: 37844 - DNA, 19 bp, Artificial Sequence
  Synthetic
cggtcgtggatgcgctgga

SEQ ID NO: 37845 - DNA, 21 bp, Artificial Sequence
  Synthetic
cgtctaattcgcgagagacct

SEQ ID NO: 37846 - DNA, 20 bp, Artificial Sequence
  Synthetic
caagtgtcccacctgtaccc

SEQ ID NO: 37847 - DNA, 20 bp, Artificial Sequence
  Synthetic
tagtggtgcaccagagcgat

SEQ ID NO: 37848 - DNA, 24 bp, Artificial Sequence
  Synthetic
ttcagtagaaaaacgctcagtcat

SEQ ID NO: 37849 - DNA, 21 bp, Artificial Sequence
  Synthetic
acagtccgtgtaccgataacg

SEQ ID NO: 37850 - DNA, 23 bp, Artificial Sequence
  Synthetic
gatcttcgatctcagcatttcct

SEQ ID NO: 37851 - DNA, 21 bp, Artificial Sequence
  Synthetic
caaatgcagcagaatggcatg

SEQ ID NO: 37852 - DNA, 21 bp, Artificial Sequence
  Synthetic
gttttccctgctacacacact

SEQ ID NO: 37853 - DNA, 21 bp, Artificial Sequence
  Synthetic
tcgacagttcaaattggcagt

SEQ ID NO: 37854 - DNA, 20 bp, Artificial Sequence
  Synthetic
tacaattggcctccagtccc

SEQ ID NO: 37855 - DNA, 24 bp, Artificial Sequence
  Synthetic
ggagggattggtaaaatgggtact

SEQ ID NO: 37856 - DNA, 24 bp, Artificial Sequence
  Synthetic
gaaaaggttaaagttgtgtcagca

SEQ ID NO: 37857 - DNA, 20 bp, Artificial Sequence
  Synthetic
atacctggttgccccaacaa

SEQ ID NO: 37858 - DNA, 23 bp, Artificial Sequence
  Synthetic
tgacaatccaatattccagccct

SEQ ID NO: 37859 - DNA, 20 bp, Artificial Sequence
  Synthetic
gaggtagaggaactgggggc

SEQ ID NO: 37860 - DNA, 22 bp, Artificial Sequence
  Synthetic
cgccacctaaattgctacctaa

SEQ ID NO: 37861 - DNA, 22 bp, Artificial Sequence
  Synthetic
aagcatagttggcagcatacat

SEQ ID NO: 37862 - DNA, 22 bp, Artificial Sequence
  Synthetic
caatctgtccagcagtgtactg

SEQ ID NO: 37863 - DNA, 23 bp, Artificial Sequence
  Synthetic
cggtcgttggtttcagatctaac

SEQ ID NO: 37864 - DNA, 22 bp, Artificial Sequence
  Synthetic
tctgttataggcgtctggaaca

SEQ ID NO: 37865 - DNA, 24 bp, Artificial Sequence
  Synthetic
ctaagctgtgctgtactactgttt

SEQ ID NO: 37866 - DNA, 21 bp, Artificial Sequence
  Synthetic
gccatttttgcatcagccaat

SEQ ID NO: 37867 - DNA, 23 bp, Artificial Sequence
  Synthetic
gcttgttggttaactgattgcag

SEQ ID NO: 37868 - DNA, 25 bp, Artificial Sequence
  Synthetic
ccagcttcaataaaacttgactcct

SEQ ID NO: 37869 - DNA, 22 bp, Artificial Sequence
  Synthetic
tcagagtcaggagcattatgca

SEQ ID NO: 37870 - DNA, 24 bp, Artificial Sequence
  Synthetic
cgtggaatgacatacaagctagga

SEQ ID NO: 37871 - DNA, 25 bp, Artificial Sequence
  Synthetic
tgttccctacgaatataaaaccaca

SEQ ID NO: 37872 - DNA, 22 bp, Artificial Sequence
  Synthetic
gtcgagttgtttgcatggtaac

SEQ ID NO: 37873 - DNA, 25 bp, Artificial Sequence
  Synthetic
cttctccactatgtaagaccattcc

SEQ ID NO: 37874 - DNA, 23 bp, Artificial Sequence
  Synthetic
tctaggaatccgtcttccatctg

SEQ ID NO: 37875 - DNA, 25 bp, Artificial Sequence
  Synthetic
tctgtttagtcttgcttcttctgaa

SEQ ID NO: 37876 - DNA, 20 bp, Artificial Sequence
  Synthetic
taggatccttccccgcactg

SEQ ID NO: 37877 - DNA, 20 bp, Artificial Sequence
  Synthetic
aaatgcggcagaatggcatg

SEQ ID NO: 37878 - DNA, 21 bp, Artificial Sequence
  Synthetic
gcaggtagcactaaagggcta

SEQ ID NO: 37879 - DNA, 25 bp, Artificial Sequence
  Synthetic
cccatgcttggatttataatttgca

SEQ ID NO: 37880 - DNA, 25 bp, Artificial Sequence
  Synthetic
ggcttctgctatttacaaacgatac

SEQ ID NO: 37881 - DNA, 21 bp, Artificial Sequence
  Synthetic
ccactgatgaaggagactgga

SEQ ID NO: 37882 - DNA, 22 bp, Artificial Sequence
  Synthetic
gtgtgcttgttactgaaacacg

SEQ ID NO: 37883 - DNA, 20 bp, Artificial Sequence
  Synthetic
ccagattgctgaccaagtgg

SEQ ID NO: 37884 - DNA, 22 bp, Artificial Sequence
  Synthetic
cagacacatctggaaacacagt

SEQ ID NO: 37885 - DNA, 22 bp, Artificial Sequence
  Synthetic
aaatgtaccagcaaccgatacc

SEQ ID NO: 37886 - DNA, 20 bp, Artificial Sequence
  Synthetic
acaaggtcagccatccgtac

SEQ ID NO: 37887 - DNA, 20 bp, Artificial Sequence
  Synthetic
aacatgcgcaatgctttgga

SEQ ID NO: 37888 - DNA, 22 bp, Artificial Sequence
  Synthetic
agatcccacgaaagcgaagagg

SEQ ID NO: 37889 - DNA, 22 bp, Artificial Sequence
  Synthetic
acatcgaacggttccagcaaca

SEQ ID NO: 37890 - DNA, 24 bp, Artificial Sequence
  Synthetic
attccaagggggatactttatgct

SEQ ID NO: 37891 - DNA, 20 bp, Artificial Sequence
  Synthetic
acacctattgagaggctgca

SEQ ID NO: 37892 - DNA, 24 bp, Artificial Sequence
  Synthetic
agaacattaagcaaaatcctgcac

SEQ ID NO: 37893 - DNA, 20 bp, Artificial Sequence
  Synthetic
accacaagcggttccttagt

SEQ ID NO: 37894 - DNA, 25 bp, Artificial Sequence
  Synthetic
tgaactatctcagtttgcattaggt

SEQ ID NO: 37895 - DNA, 24 bp, Artificial Sequence
  Synthetic
tctgttgactctttaccatcttcg

SEQ ID NO: 37896 - DNA, 22 bp, Artificial Sequence
  Synthetic
cgcaatgggagacgttaaaggt

SEQ ID NO: 37897 - DNA, 21 bp, Artificial Sequence
  Synthetic
ccgatttgagtccacagttgc

SEQ ID NO: 37898 - DNA, 20 bp, Artificial Sequence
  Synthetic
caatggagtcgctgacagac

SEQ ID NO: 37899 - DNA, 23 bp, Artificial Sequence
  Synthetic
ataggcccatctgaggtagttcc

SEQ ID NO: 37900 - DNA, 25 bp, Artificial Sequence
  Synthetic
attagatgtgcaacctatagaaccc

SEQ ID NO: 37901 - DNA, 20 bp, Artificial Sequence
  Synthetic
cagaaccagtaccccacgtg

SEQ ID NO: 37902 - DNA, 25 bp, Artificial Sequence
  Synthetic
cgaagaaggtcgtattcgattcagt

SEQ ID NO: 37903 - DNA, 21 bp, Artificial Sequence
  Synthetic
atctttcaggacaatggctgc

SEQ ID NO: 37904 - DNA, 20 bp, Artificial Sequence
  Synthetic
tccaccaattggggaacact

SEQ ID NO: 37905 - DNA, 25 bp, Artificial Sequence
  Synthetic
tttaacagaccttattggctacagc

SEQ ID NO: 37906 - DNA, 21 bp, Artificial Sequence
  Synthetic
ggaattgccgggaagactggg

SEQ ID NO: 37907 - DNA, 22 bp, Artificial Sequence
  Synthetic
cggcactaggaagagttcggag

SEQ ID NO: 37908 - DNA, 20 bp, Artificial Sequence
  Synthetic
gcggagcgcttactgacgat

SEQ ID NO: 37909 - DNA, 22 bp, Artificial Sequence
  Synthetic
gtgcccggtgtcatcattacca

SEQ ID NO: 37910 - DNA, 22 bp, Artificial Sequence
  Synthetic
gcccgctgtggtacaattcaac

SEQ ID NO: 37911 - DNA, 20 bp, Artificial Sequence
  Synthetic
gggcagggacggtttcatcc

SEQ ID NO: 37912 - DNA, 22 bp, Artificial Sequence
  Synthetic
aagatcatagtttggggggcgg

SEQ ID NO: 37913 - DNA, 20 bp, Artificial Sequence
  Synthetic
ggggaccaatgtgggcggtg

SEQ ID NO: 37914 - DNA, 22 bp, Artificial Sequence
  Synthetic
tcttcagagctgctgtctgcac

SEQ ID NO: 37915 - DNA, 21 bp, Artificial Sequence
  Synthetic
agctcacctcattggggctga

SEQ ID NO: 37916 - DNA, 20 bp, Artificial Sequence
  Synthetic
gtaggggcaggcttggcatc

SEQ ID NO: 37917 - DNA, 20 bp, Artificial Sequence
  Synthetic
ttcgcaagccagttagcgcc

SEQ ID NO: 37918 - DNA, 21 bp, Artificial Sequence
  Synthetic
acgcagtggatgaaccgtctc

SEQ ID NO: 37919 - DNA, 20 bp, Artificial Sequence
  Synthetic
gtgtggggccctgatagcag

SEQ ID NO: 37920 - DNA, 21 bp, Artificial Sequence
  Synthetic
tttgtggacggggtgcggata

SEQ ID NO: 37921 - DNA, 21 bp, Artificial Sequence
  Synthetic
cgggcggttatccaactcaca

SEQ ID NO: 37922 - DNA, 22 bp, Artificial Sequence
  Synthetic
accgaccaccataatggccaag

SEQ ID NO: 37923 - DNA, 22 bp, Artificial Sequence
  Synthetic
aggctcgcaccatcattaacgc

SEQ ID NO: 37924 - DNA, 20 bp, Artificial Sequence
  Synthetic
gatagggcggacctgcaagc

SEQ ID NO: 37925 - DNA, 20 bp, Artificial Sequence
  Synthetic
ctggagaagccaccacaatg

SEQ ID NO: 37926 - DNA, 22 bp, Artificial Sequence
  Synthetic
tgaaaatgagggccttcagaga

SEQ ID NO: 37927 - DNA, 21 bp, Artificial Sequence
  Synthetic
gacctttgattggacggtgtg

SEQ ID NO: 37928 - DNA, 25 bp, Artificial Sequence
  Synthetic
gtggctaaaatgctcagtaattgtc

SEQ ID NO: 37929 - DNA, 20 bp, Artificial Sequence
  Synthetic
aaggacggttactgcatcct

SEQ ID NO: 37930 - DNA, 22 bp, Artificial Sequence
  Synthetic
gtcatacaggaaaccagtaggc

SEQ ID NO: 37931 - DNA, 23 bp, Artificial Sequence
  Synthetic
aactgtgaaaccaaatgccaaac

SEQ ID NO: 37932 - DNA, 22 bp, Artificial Sequence
  Synthetic
gataccatcacagcaatgacca

SEQ ID NO: 37933 - DNA, 22 bp, Artificial Sequence
  Synthetic
catccagcaaatacaccatcca

SEQ ID NO: 37934 - DNA, 24 bp, Artificial Sequence
  Synthetic
atgacagactagaagctatggcaa

SEQ ID NO: 37935 - DNA, 22 bp, Artificial Sequence
  Synthetic
tatacgccaatcagccaatcca

SEQ ID NO: 37936 - DNA, 24 bp, Artificial Sequence
  Synthetic
cacaaatgcccagcaaatttacca

SEQ ID NO: 37937 - DNA, 20 bp, Artificial Sequence
  Synthetic
ggcaatccaagcccttcaca

SEQ ID NO: 37938 - DNA, 25 bp, Artificial Sequence
  Synthetic
ctgttttgcttccagtcaaaacatc

SEQ ID NO: 37939 - DNA, 24 bp, Artificial Sequence
  Synthetic
tgaactcaacagtgatgacatcaa

SEQ ID NO: 37940 - DNA, 23 bp, Artificial Sequence
  Synthetic
accaggaatgttcagacaagttc

SEQ ID NO: 37941 - DNA, 21 bp, Artificial Sequence
  Synthetic
ttccctgcatcaataccagct

SEQ ID NO: 37942 - DNA, 21 bp, Artificial Sequence
  Synthetic
gtctgcggaaccggtgagtac

SEQ ID NO: 37943 - DNA, 19 bp, Artificial Sequence
  Synthetic
cgcgcgacgaggaagactt

SEQ ID NO: 37944 - DNA, 22 bp, Artificial Sequence
  Synthetic
ggaagacggcgtgaactatgca

SEQ ID NO: 37945 - DNA, 20 bp, Artificial Sequence
  Synthetic
cctcgacgaacgcccctact

SEQ ID NO: 37946 - DNA, 20 bp, Artificial Sequence
  Synthetic
ggtgggcaacaacaccttgc

SEQ ID NO: 37947 - DNA, 21 bp, Artificial Sequence
  Synthetic
ccacacagtggcaggtccttc

SEQ ID NO: 37948 - DNA, 22 bp, Artificial Sequence
  Synthetic
atctgaagggtaggtgggtgcc

SEQ ID NO: 37949 - DNA, 21 bp, Artificial Sequence
  Synthetic
caaggccttctccggatctgc

SEQ ID NO: 37950 - DNA, 22 bp, Artificial Sequence
  Synthetic
cccaagggtcctgtcatccaga

SEQ ID NO: 37951 - DNA, 22 bp, Artificial Sequence
  Synthetic
aaccatgagatccccggtgttc

SEQ ID NO: 37952 - DNA, 21 bp, Artificial Sequence
  Synthetic
caatgccgtggcctactaccg

SEQ ID NO: 37953 - DNA, 22 bp, Artificial Sequence
  Synthetic
atgacatgcatgtcggccgacc

SEQ ID NO: 37954 - DNA, 20 bp, Artificial Sequence
  Synthetic
cacccctgctgtccagacca

SEQ ID NO: 37955 - DNA, 19 bp, Artificial Sequence
  Synthetic
cgccatcggcagcgttgga

SEQ ID NO: 37956 - DNA, 22 bp, Artificial Sequence
  Synthetic
ctcagcagcctcactgtaaccc

SEQ ID NO: 37957 - DNA, 22 bp, Artificial Sequence
  Synthetic
ccccattaacgcctacaccacg

SEQ ID NO: 37958 - DNA, 20 bp, Artificial Sequence
  Synthetic
accggacgtagccgtgttga

SEQ ID NO: 37959 - DNA, 21 bp, Artificial Sequence
  Synthetic
ggaggtctccgtacctgcaga

SEQ ID NO: 37960 - DNA, 20 bp, Artificial Sequence
  Synthetic
ccccccgactccgacgttga

SEQ ID NO: 37961 - DNA, 22 bp, Artificial Sequence
  Synthetic
taccaggacgtgctcaaggagg

SEQ ID NO: 37962 - DNA, 22 bp, Artificial Sequence
  Synthetic
tacgacgtggttagcaagctcc

SEQ ID NO: 37963 - DNA, 22 bp, Artificial Sequence
  Synthetic
ccagtcaattcctggctaggca

SEQ ID NO: 37964 - DNA, 20 bp, Artificial Sequence
  Synthetic
gcccttgcgagcttggagac

SEQ ID NO: 37965 - DNA, 22 bp, Artificial Sequence
  Synthetic
attgaagtgggcacttggtgag

SEQ ID NO: 37966 - DNA, 20 bp, Artificial Sequence
  Synthetic
gaatcacccaagggagtgga

SEQ ID NO: 37967 - DNA, 21 bp, Artificial Sequence
  Synthetic
cctccactcactccaaaacag

SEQ ID NO: 37968 - DNA, 22 bp, Artificial Sequence
  Synthetic
tgatgcagaagatgagacagca

SEQ ID NO: 37969 - DNA, 21 bp, Artificial Sequence
  Synthetic
ggtcagccaaagccaaacgac

SEQ ID NO: 37970 - DNA, 24 bp, Artificial Sequence
  Synthetic
tatggtgcaaacaaaatgtcctcc

SEQ ID NO: 37971 - DNA, 20 bp, Artificial Sequence
  Synthetic
tggaatgcaccaccaactgg

SEQ ID NO: 37972 - DNA, 20 bp, Artificial Sequence
  Synthetic
atatggacagtgggaggtgc

SEQ ID NO: 37973 - DNA, 22 bp, Artificial Sequence
  Synthetic
gcccacaatacataatgcacct

SEQ ID NO: 37974 - DNA, 21 bp, Artificial Sequence
  Synthetic
agaggcatatggggacagttt

SEQ ID NO: 37975 - DNA, 20 bp, Artificial Sequence
  Synthetic
tgttggggcaatcaggtgtt

SEQ ID NO: 37976 - DNA, 25 bp, Artificial Sequence
  Synthetic
ggacacatataggtttgtacagtca

SEQ ID NO: 37977 - DNA, 22 bp, Artificial Sequence
  Synthetic
tagagctcaggtcgagaccggg

SEQ ID NO: 37978 - DNA, 20 bp, Artificial Sequence
  Synthetic
cgaccccccggattctgacc

SEQ ID NO: 37979 - DNA, 22 bp, Artificial Sequence
  Synthetic
gtacctttgctcctccctcgtg

SEQ ID NO: 37980 - DNA, 21 bp, Artificial Sequence
  Synthetic
aaggcctggaggagccttacc

SEQ ID NO: 37981 - DNA, 20 bp, Artificial Sequence
  Synthetic
ccactggagtcgggactgca

SEQ ID NO: 37982 - DNA, 21 bp, Artificial Sequence
  Synthetic
ggctagaacacctcccaaggc

SEQ ID NO: 37983 - DNA, 22 bp, Artificial Sequence
  Synthetic
tctctcatcatcttcccccggg

SEQ ID NO: 37984 - DNA, 20 bp, Artificial Sequence
  Synthetic
cggcaagccttcccccaatg

SEQ ID NO: 37985 - DNA, 21 bp, Artificial Sequence
  Synthetic
caacgctctcacagatgccct

SEQ ID NO: 37986 - DNA, 21 bp, Artificial Sequence
  Synthetic
ccctacaatccaaccagctcc

SEQ ID NO: 37987 - DNA, 20 bp, Artificial Sequence
  Synthetic
tggaggctcctcaagcgagc

SEQ ID NO: 37988 - DNA, 21 bp, Artificial Sequence
  Synthetic
tggccctttcagcagatcagg

SEQ ID NO: 37989 - DNA, 19 bp, Artificial Sequence
  Synthetic
ctggcttgtctccgccctg

SEQ ID NO: 37990 - DNA, 21 bp, Artificial Sequence
  Synthetic
ctcctccgttcagcctccaag

SEQ ID NO: 37991 - DNA, 18 bp, Artificial Sequence
  Synthetic
cgtcgctgccgatcacga

SEQ ID NO: 37992 - DNA, 23 bp, Artificial Sequence
  Synthetic
cctcatttctactctcacacggc

SEQ ID NO: 37993 - DNA, 24 bp, Artificial Sequence
  Synthetic
gaaaagaacccgtcacttaggatg

SEQ ID NO: 37994 - DNA, 25 bp, Artificial Sequence
  Synthetic
cttgtccgaaaaacgagatttctcc

SEQ ID NO: 37995 - DNA, 20 bp, Artificial Sequence
  Synthetic
cacagattggcgggacaagg

SEQ ID NO: 37996 - DNA, 22 bp, Artificial Sequence
  Synthetic
agaaaagcaaccaggagattgg

SEQ ID NO: 37997 - DNA, 25 bp, Artificial Sequence
  Synthetic
taataaagcttcttccctttgcagc

SEQ ID NO: 37998 - DNA, 20 bp, Artificial Sequence
  Synthetic
aggattcctcattctgggca

SEQ ID NO: 37999 - DNA, 23 bp, Artificial Sequence
  Synthetic
acacagtaaacagaacacaccaa

SEQ ID NO: 38000 - DNA, 25 bp, Artificial Sequence
  Synthetic
ttggacattaaacagaaatcaaccg

SEQ ID NO: 38001 - DNA, 21 bp, Artificial Sequence
  Synthetic
ccaaagatgcagagagaggca

SEQ ID NO: 38002 - DNA, 21 bp, Artificial Sequence
  Synthetic
tgagggaatacaagcaggagt

SEQ ID NO: 38003 - DNA, 22 bp, Artificial Sequence
  Synthetic
ccccatctccacatctccacgc

SEQ ID NO: 38004 - DNA, 20 bp, Artificial Sequence
  Synthetic
cgaaacgacccgcacatggc

SEQ ID NO: 38005 - DNA, 21 bp, Artificial Sequence
  Synthetic
acatacacgcgtgcatgctgc

SEQ ID NO: 38006 - DNA, 22 bp, Artificial Sequence
  Synthetic
tcggttatgacacggcgaaacg

SEQ ID NO: 38007 - DNA, 20 bp, Artificial Sequence
  Synthetic
cacctacacctgcgtgctgg

SEQ ID NO: 38008 - DNA, 19 bp, Artificial Sequence
  Synthetic
gcggcgctatcatctgcgg

SEQ ID NO: 38009 - DNA, 19 bp, Artificial Sequence
  Synthetic
gaagcctctgcggtagcgg

SEQ ID NO: 38010 - DNA, 21 bp, Artificial Sequence
  Synthetic
cggatgatgaatcgcgccatg

SEQ ID NO: 38011 - DNA, 20 bp, Artificial Sequence
  Synthetic
agtagacggcggtgtcctcg

SEQ ID NO: 38012 - DNA, 21 bp, Artificial Sequence
  Synthetic
cgcagcctcgcctttaaacag

SEQ ID NO: 38013 - DNA, 21 bp, Artificial Sequence
  Synthetic
atcatgccccggagatcgtgc

SEQ ID NO: 38014 - DNA, 21 bp, Artificial Sequence
  Synthetic
gctccaaagcgtacgcagtct

SEQ ID NO: 38015 - DNA, 18 bp, Artificial Sequence
  Synthetic
tcaccgttcggcctcgca

SEQ ID NO: 38016 - DNA, 22 bp, Artificial Sequence
  Synthetic
tgcacacacaactggtcatggt

SEQ ID NO: 38017 - DNA, 19 bp, Artificial Sequence
  Synthetic
gcccgaggataacaggccg

SEQ ID NO: 38018 - DNA, 18 bp, Artificial Sequence
  Synthetic
tcgtggcgcacgtccgta

SEQ ID NO: 38019 - DNA, 18 bp, Artificial Sequence
  Synthetic
acgcgcgcgacgagttga

SEQ ID NO: 38020 - DNA, 22 bp, Artificial Sequence
  Synthetic
ccagtttgacgcagtgcatcag

SEQ ID NO: 38021 - DNA, 20 bp, Artificial Sequence
  Synthetic
cgcagtgacgaaagccatgc

SEQ ID NO: 38022 - DNA, 20 bp, Artificial Sequence
  Synthetic
gcgcttccagcacctgcttt

SEQ ID NO: 38023 - DNA, 21 bp, Artificial Sequence
  Synthetic
aggataccggagtcgtaggcg

SEQ ID NO: 38024 - DNA, 20 bp, Artificial Sequence
  Synthetic
actcacgcggataggggaca

SEQ ID NO: 38025 - DNA, 22 bp, Artificial Sequence
  Synthetic
gtcatgaggaccatgtcgcctt

SEQ ID NO: 38026 - DNA, 19 bp, Artificial Sequence
  Synthetic
cctgcacgaagccgcggaa

SEQ ID NO: 38027 - DNA, 18 bp, Artificial Sequence
  Synthetic
actcgagcatgtcggcgc

SEQ ID NO: 38028 - DNA, 19 bp, Artificial Sequence
  Synthetic
ccgcctcggtcaccaactc

SEQ ID NO: 38029 - DNA, 21 bp, Artificial Sequence
  Synthetic
ccaattccacaaaacgcgccg

SEQ ID NO: 38030 - DNA, 19 bp, Artificial Sequence
  Synthetic
gcgaactttccgcgtgcaa

SEQ ID NO: 38031 - DNA, 21 bp, Artificial Sequence
  Synthetic
ccagaagctgttgcagaccct

SEQ ID NO: 38032 - DNA, 19 bp, Artificial Sequence
  Synthetic
gctgagtgttcgcgtgcgc

SEQ ID NO: 38033 - DNA, 22 bp, Artificial Sequence
  Synthetic
ggccgcgagcgacctattaaac

SEQ ID NO: 38034 - DNA, 22 bp, Artificial Sequence
  Synthetic
cgtcccacctacgtactcgtca

SEQ ID NO: 38035 - DNA, 22 bp, Artificial Sequence
  Synthetic
cgcccgctttctactatgaggc

SEQ ID NO: 38036 - DNA, 20 bp, Artificial Sequence
  Synthetic
aggaactctttcgcctgggc

SEQ ID NO: 38037 - DNA, 19 bp, Artificial Sequence
  Synthetic
gcaactcgcgctaagccgc

SEQ ID NO: 38038 - DNA, 20 bp, Artificial Sequence
  Synthetic
ggcgctgatggaaaagccgc

SEQ ID NO: 38039 - DNA, 22 bp, Artificial Sequence
  Synthetic
aacctgcaacagcaagctgtcg

SEQ ID NO: 38040 - DNA, 16 bp, Artificial Sequence
  Synthetic
tctgacagcgcgcgca

SEQ ID NO: 38041 - DNA, 20 bp, Artificial Sequence
  Synthetic
ccagcagaagagccagcacc

SEQ ID NO: 38042 - DNA, 21 bp, Artificial Sequence
  Synthetic
ccgaattggatttgcgcacca

SEQ ID NO: 38043 - DNA, 21 bp, Artificial Sequence
  Synthetic
catcgtccagaaacggcaccc

SEQ ID NO: 38044 - DNA, 21 bp, Artificial Sequence
  Synthetic
tcatcaccgtccccagtcacc

SEQ ID NO: 38045 - DNA, 19 bp, Artificial Sequence
  Synthetic
cgtcagcgtcgtcgtccgt

SEQ ID NO: 38046 - DNA, 18 bp, Artificial Sequence
  Synthetic
ttttcgctgccgtcgccg

SEQ ID NO: 38047 - DNA, 20 bp, Artificial Sequence
  Synthetic
cggtctgaaaagcggccacg

SEQ ID NO: 38048 - DNA, 21 bp, Artificial Sequence
  Synthetic
tgcgcgctaaaggtatcctcg

SEQ ID NO: 38049 - DNA, 20 bp, Artificial Sequence
  Synthetic
acccgcccgcgaaaatagcg

SEQ ID NO: 38050 - DNA, 19 bp, Artificial Sequence
  Synthetic
tgggctgcttgtggggaac

SEQ ID NO: 38051 - DNA, 20 bp, Artificial Sequence
  Synthetic
gtcggggtgcgtgtagccaa

SEQ ID NO: 38052 - DNA, 20 bp, Artificial Sequence
  Synthetic
cgtgctggtcattgggcagg

SEQ ID NO: 38053 - DNA, 22 bp, Artificial Sequence
  Synthetic
cgacgaggaggatgaagtgacc

SEQ ID NO: 38054 - DNA, 20 bp, Artificial Sequence
  Synthetic
tgctgcgggtctttccctcg

SEQ ID NO: 38055 - DNA, 19 bp, Artificial Sequence
  Synthetic
tctggccgacgacgtgagt

SEQ ID NO: 38056 - DNA, 20 bp, Artificial Sequence
  Synthetic
aaacgcggcgttcttcagca

SEQ ID NO: 38057 - DNA, 19 bp, Artificial Sequence
  Synthetic
cgccaccatcaccggccta

SEQ ID NO: 38058 - DNA, 19 bp, Artificial Sequence
  Synthetic
cgtcgtcgtcgtcctcgga

SEQ ID NO: 38059 - DNA, 19 bp, Artificial Sequence
  Synthetic
tcggtcctgttcgcccacc

SEQ ID NO: 38060 - DNA, 18 bp, Artificial Sequence
  Synthetic
agccgccttccacgttgg

SEQ ID NO: 38061 - DNA, 20 bp, Artificial Sequence
  Synthetic
taacagcgtcggctacgggc

SEQ ID NO: 38062 - DNA, 19 bp, Artificial Sequence
  Synthetic
ccacctcgctgcccgtaaa

SEQ ID NO: 38063 - DNA, 19 bp, Artificial Sequence
  Synthetic
ggacgtggaccgcgagtgt

SEQ ID NO: 38064 - DNA, 19 bp, Artificial Sequence
  Synthetic
agtaaggcagtggcgcgtc

SEQ ID NO: 38065 - DNA, 20 bp, Artificial Sequence
  Synthetic
cagtgtgggcgtcagatccg

SEQ ID NO: 38066 - DNA, 21 bp, Artificial Sequence
  Synthetic
tggttgatttccagcgccagt

SEQ ID NO: 38067 - DNA, 20 bp, Artificial Sequence
  Synthetic
acgccggtcggtaaaagagg

SEQ ID NO: 38068 - DNA, 22 bp, Artificial Sequence
  Synthetic
ttgaccgttgttaagtcccggc

SEQ ID NO: 38069 - DNA, 21 bp, Artificial Sequence
  Synthetic
gaaggtctgtagacagggcgc

SEQ ID NO: 38070 - DNA, 21 bp, Artificial Sequence
  Synthetic
tttgcgacggtgaagtggagg

SEQ ID NO: 38071 - DNA, 21 bp, Artificial Sequence
  Synthetic
gctctcgctgacggaatggaa

SEQ ID NO: 38072 - DNA, 20 bp, Artificial Sequence
  Synthetic
tgactttacggggcagcagc

SEQ ID NO: 38073 - DNA, 20 bp, Artificial Sequence
  Synthetic
tcggatgaggcaggcgatgc

SEQ ID NO: 38074 - DNA, 20 bp, Artificial Sequence
  Synthetic
agctgtgcaggtgctcttcg

SEQ ID NO: 38075 - DNA, 20 bp, Artificial Sequence
  Synthetic
tgtcgtccctgcccttctcc

SEQ ID NO: 38076 - DNA, 20 bp, Artificial Sequence
  Synthetic
ctacctcatgacgcacgccg

SEQ ID NO: 38077 - DNA, 18 bp, Artificial Sequence
  Synthetic
gcgccgccacattggtga

SEQ ID NO: 38078 - DNA, 21 bp, Artificial Sequence
  Synthetic
tctccctcaactgccgtcagg

SEQ ID NO: 38079 - DNA, 20 bp, Artificial Sequence
  Synthetic
cggcctacggcgttattgca

SEQ ID NO: 38080 - DNA, 19 bp, Artificial Sequence
  Synthetic
tccgacgcctgtctgctca

SEQ ID NO: 38081 - DNA, 22 bp, Artificial Sequence
  Synthetic
aggggaaaggcgacagagaagg

SEQ ID NO: 38082 - DNA, 22 bp, Artificial Sequence
  Synthetic
taacgaggagcggcaacagaag

SEQ ID NO: 38083 - DNA, 18 bp, Artificial Sequence
  Synthetic
acgagccgcgtgtggtca

SEQ ID NO: 38084 - DNA, 18 bp, Artificial Sequence
  Synthetic
tgaggtgcgcgaggtgtg

SEQ ID NO: 38085 - DNA, 19 bp, Artificial Sequence
  Synthetic
cgacgagcggttggtgggt

SEQ ID NO: 38086 - DNA, 20 bp, Artificial Sequence
  Synthetic
gcgtcttcggtctcgagcaa

SEQ ID NO: 38087 - DNA, 19 bp, Artificial Sequence
  Synthetic
ctcctcgtgcaggtgtgcc

SEQ ID NO: 38088 - DNA, 20 bp, Artificial Sequence
  Synthetic
gcgtgccctgcatcatctgc

SEQ ID NO: 38089 - DNA, 19 bp, Artificial Sequence
  Synthetic
gactcggacgccatcacgg

SEQ ID NO: 38090 - DNA, 19 bp, Artificial Sequence
  Synthetic
agtctgcccagtgaccgcc

SEQ ID NO: 38091 - DNA, 19 bp, Artificial Sequence
  Synthetic
ctacggcctcacttcgcgc

SEQ ID NO: 38092 - DNA, 21 bp, Artificial Sequence
  Synthetic
gtattgagcagcagcacgccg

SEQ ID NO: 38093 - DNA, 19 bp, Artificial Sequence
  Synthetic
cgtcagcagggcccgcaat

SEQ ID NO: 38094 - DNA, 20 bp, Artificial Sequence
  Synthetic
acggtggtcgcgttggtttc

SEQ ID NO: 38095 - DNA, 19 bp, Artificial Sequence
  Synthetic
ccccgcccgtacatcccat

SEQ ID NO: 38096 - DNA, 21 bp, Artificial Sequence
  Synthetic
ctgtgcctaagtctggcctcc

SEQ ID NO: 38097 - DNA, 22 bp, Artificial Sequence
  Synthetic
cgaacatgcacatagtcgcggc

SEQ ID NO: 38098 - DNA, 19 bp, Artificial Sequence
  Synthetic
ccggctgagcgtctccagt

SEQ ID NO: 38099 - DNA, 20 bp, Artificial Sequence
  Synthetic
tcccgcgggccacttacttg

SEQ ID NO: 38100 - DNA, 21 bp, Artificial Sequence
  Synthetic
tccttccccgtgcttacagcc

SEQ ID NO: 38101 - DNA, 19 bp, Artificial Sequence
  Synthetic
cgcggtgcctaacgcggta

SEQ ID NO: 38102 - DNA, 19 bp, Artificial Sequence
  Synthetic
ggtggcgcaacagcgagtc

SEQ ID NO: 38103 - DNA, 21 bp, Artificial Sequence
  Synthetic
cagatggcggtgtccacttgt

SEQ ID NO: 38104 - DNA, 19 bp, Artificial Sequence
  Synthetic
gtcgagtgcgtcgtcggct

SEQ ID NO: 38105 - DNA, 20 bp, Artificial Sequence
  Synthetic
gtccgcgaccggctacgtag

SEQ ID NO: 38106 - DNA, 19 bp, Artificial Sequence
  Synthetic
gcaccgagtccgcgagtct

SEQ ID NO: 38107 - DNA, 18 bp, Artificial Sequence
  Synthetic
tttcgccaccgctgacgt

SEQ ID NO: 38108 - DNA, 19 bp, Artificial Sequence
  Synthetic
tcgtgtcgcgacatggacg

SEQ ID NO: 38109 - DNA, 20 bp, Artificial Sequence
  Synthetic
actggagacacggtagccgg

SEQ ID NO: 38110 - DNA, 21 bp, Artificial Sequence
  Synthetic
gcagcagaatgtacagcgcct

SEQ ID NO: 38111 - DNA, 22 bp, Artificial Sequence
  Synthetic
aagcgccacatacagtgcaaac

SEQ ID NO: 38112 - DNA, 22 bp, Artificial Sequence
  Synthetic
ggaaatacacgaagagcgcgga

SEQ ID NO: 38113 - DNA, 22 bp, Artificial Sequence
  Synthetic
tctaagacgcgagatccgtggg

SEQ ID NO: 38114 - DNA, 21 bp, Artificial Sequence
  Synthetic
agcagggccaaacagatggtg

SEQ ID NO: 38115 - DNA, 22 bp, Artificial Sequence
  Synthetic
taggacttccccgtcgtactgg

SEQ ID NO: 38116 - DNA, 21 bp, Artificial Sequence
  Synthetic
cggtcacggccacctagaaac

SEQ ID NO: 38117 - DNA, 19 bp, Artificial Sequence
  Synthetic
tccgacgggtagggagcct

SEQ ID NO: 38118 - DNA, 18 bp, Artificial Sequence
  Synthetic
tggtggcgctgcacgtag

SEQ ID NO: 38119 - DNA, 20 bp, Artificial Sequence
  Synthetic
cctcgcccatgtgtacgcag

SEQ ID NO: 38120 - DNA, 19 bp, Artificial Sequence
  Synthetic
accacgtcgtgcggtaccc

SEQ ID NO: 38121 - DNA, 20 bp, Artificial Sequence
  Synthetic
ccggatccatcattgcgcga

SEQ ID NO: 38122 - DNA, 20 bp, Artificial Sequence
  Synthetic
ggcctcgcagtgcaacagtc

SEQ ID NO: 38123 - DNA, 21 bp, Artificial Sequence
  Synthetic
ctggcggttttgcaatcgacg

SEQ ID NO: 38124 - DNA, 18 bp, Artificial Sequence
  Synthetic
tcgttcggcgttcaggcc

SEQ ID NO: 38125 - DNA, 19 bp, Artificial Sequence
  Synthetic
ccgacgacgcactcgactg

SEQ ID NO: 38126 - DNA, 18 bp, Artificial Sequence
  Synthetic
tgcgtgtgtggacggcga

SEQ ID NO: 38127 - DNA, 20 bp, Artificial Sequence
  Synthetic
tgtgacacggagggaagttc

SEQ ID NO: 38128 - DNA, 25 bp, Artificial Sequence
  Synthetic
tgaagggggtttacataaatacagc

SEQ ID NO: 38129 - DNA, 20 bp, Artificial Sequence
  Synthetic
ctggagccacacaaatggga

SEQ ID NO: 38130 - DNA, 23 bp, Artificial Sequence
  Synthetic
aattggagagtcacctaagggag

SEQ ID NO: 38131 - DNA, 25 bp, Artificial Sequence
  Synthetic
acagatgtgtacagaactcaaactc

SEQ ID NO: 38132 - DNA, 20 bp, Artificial Sequence
  Synthetic
aggatgcaactgctggtctt

SEQ ID NO: 38133 - DNA, 23 bp, Artificial Sequence
  Synthetic
gaatgtgcaacatcctcaaaggg

SEQ ID NO: 38134 - DNA, 24 bp, Artificial Sequence
  Synthetic
attataggcgcggaatatttaccg

SEQ ID NO: 38135 - DNA, 22 bp, Artificial Sequence
  Synthetic
aatggcgcatgtttctgcatcc

SEQ ID NO: 38136 - DNA, 23 bp, Artificial Sequence
  Synthetic
cctgttgatctgtcagtgaaacg

SEQ ID NO: 38137 - DNA, 22 bp, Artificial Sequence
  Synthetic
atatggtttgtggggtgtctga

SEQ ID NO: 38138 - DNA, 21 bp, Artificial Sequence
  Synthetic
cgacagtgtgagtgtggtagc

SEQ ID NO: 38139 - DNA, 22 bp, Artificial Sequence
  Synthetic
gaaggtaggaccattgaagggc

SEQ ID NO: 38140 - DNA, 23 bp, Artificial Sequence
  Synthetic
acttgggaaatttgtcatggagt

SEQ ID NO: 38141 - DNA, 21 bp, Artificial Sequence
  Synthetic
gtaaggaacgaggcggtgagc

SEQ ID NO: 38142 - DNA, 21 bp, Artificial Sequence
  Synthetic
agcaagtacaaaggaagccac

SEQ ID NO: 38143 - DNA, 23 bp, Artificial Sequence
  Synthetic
ggatttgatgtttaatcgccccg

SEQ ID NO: 38144 - DNA, 20 bp, Artificial Sequence
  Synthetic
gccacccgcgattatgcagt

SEQ ID NO: 38145 - DNA, 20 bp, Artificial Sequence
  Synthetic
cgaatgctggcgcgaacgta

SEQ ID NO: 38146 - DNA, 25 bp, Artificial Sequence
  Synthetic
tacggacaacatcctttttctacag

SEQ ID NO: 38147 - DNA, 25 bp, Artificial Sequence
  Synthetic
ggcaagaacaatttcatcaaatcca

SEQ ID NO: 38148 - DNA, 22 bp, Artificial Sequence
  Synthetic
ttgaatgaggtgtacctggcgg

SEQ ID NO: 38149 - DNA, 22 bp, Artificial Sequence
  Synthetic
gcctggagctgtccatggtatc

SEQ ID NO: 38150 - DNA, 20 bp, Artificial Sequence
  Synthetic
gcgggggaagcggtatgtcg

SEQ ID NO: 38151 - DNA, 23 bp, Artificial Sequence
  Synthetic
cgaatggttttaagaagcaccac

SEQ ID NO: 38152 - DNA, 24 bp, Artificial Sequence
  Synthetic
ctgcagtttgtcattactgaccaa

SEQ ID NO: 38153 - DNA, 22 bp, Artificial Sequence
  Synthetic
cggttccaaatattgcgcaggg

SEQ ID NO: 38154 - DNA, 20 bp, Artificial Sequence
  Synthetic
cgttgaacccggccaaggac

SEQ ID NO: 38155 - DNA, 22 bp, Artificial Sequence
  Synthetic
tgaggaaatgcgagactgcagg

SEQ ID NO: 38156 - DNA, 23 bp, Artificial Sequence
  Synthetic
ctaactgcccagctgttcttaat

SEQ ID NO: 38157 - DNA, 22 bp, Artificial Sequence
  Synthetic
accagtacgaggactgatcggc

SEQ ID NO: 38158 - DNA, 22 bp, Artificial Sequence
  Synthetic
ggtgaatttgatttgccggaag

SEQ ID NO: 38159 - DNA, 25 bp, Artificial Sequence
  Synthetic
tcatccagatatagtactgcttcca

SEQ ID NO: 38160 - DNA, 22 bp, Artificial Sequence
  Synthetic
tacaactacggagacccagaaa

SEQ ID NO: 38161 - DNA, 20 bp, Artificial Sequence
  Synthetic
gcatacccgaggacgcactg

SEQ ID NO: 38162 - DNA, 21 bp, Artificial Sequence
  Synthetic
ttgcaaacctagctgctccgc

SEQ ID NO: 38163 - DNA, 22 bp, Artificial Sequence
  Synthetic
gaagggacggcaagtaaaacgc

SEQ ID NO: 38164 - DNA, 20 bp, Artificial Sequence
  Synthetic
ggatcctagcgtacagccag

SEQ ID NO: 38165 - DNA, 20 bp, Artificial Sequence
  Synthetic
aagccactttagccccagcg

SEQ ID NO: 38166 - DNA, 20 bp, Artificial Sequence
  Synthetic
acggccggatgcagaggaaa

SEQ ID NO: 38167 - DNA, 22 bp, Artificial Sequence
  Synthetic
tggtcttacatgcacatcgccg

SEQ ID NO: 38168 - DNA, 23 bp, Artificial Sequence
  Synthetic
aagacgtaaaccttgaaatgcca

SEQ ID NO: 38169 - DNA, 20 bp, Artificial Sequence
  Synthetic
ccagcgttcgctttgacaac

SEQ ID NO: 38170 - DNA, 21 bp, Artificial Sequence
  Synthetic
gtgagttggcctggaaatgac

SEQ ID NO: 38171 - DNA, 20 bp, Artificial Sequence
  Synthetic
cttaccccgccaactatccc

SEQ ID NO: 38172 - DNA, 20 bp, Artificial Sequence
  Synthetic
gcagggcgcccataacatca

SEQ ID NO: 38173 - DNA, 22 bp, Artificial Sequence
  Synthetic
ctgttggacaccggcataagct

SEQ ID NO: 38174 - DNA, 20 bp, Artificial Sequence
  Synthetic
cggaagccttcaaaacgtgt

SEQ ID NO: 38175 - DNA, 21 bp, Artificial Sequence
  Synthetic
gcttccatacctgggattgtg

SEQ ID NO: 38176 - DNA, 25 bp, Artificial Sequence
  Synthetic
agacagagcactaaaatccctatgg

SEQ ID NO: 38177 - DNA, 20 bp, Artificial Sequence
  Synthetic
cctgggctttggacttctgc

SEQ ID NO: 38178 - DNA, 22 bp, Artificial Sequence
  Synthetic
cagcaacggcaggaaatctggg

SEQ ID NO: 38179 - DNA, 22 bp, Artificial Sequence
  Synthetic
aaagcgaagatcagttgcaacg

SEQ ID NO: 38180 - DNA, 25 bp, Artificial Sequence
  Synthetic
gctgaatttaatcatctgtagtggc

SEQ ID NO: 38181 - DNA, 20 bp, Artificial Sequence
  Synthetic
ctccgacaacagctgctgtc

SEQ ID NO: 38182 - DNA, 22 bp, Artificial Sequence
  Synthetic
ccactaaaagtcgtggtggaag

SEQ ID NO: 38183 - DNA, 25 bp, Artificial Sequence
  Synthetic
cattttttcttcttcgacttttgcc

SEQ ID NO: 38184 - DNA, 24 bp, Artificial Sequence
  Synthetic
aatattgtatttccagagcccccg

SEQ ID NO: 38185 - DNA, 20 bp, Artificial Sequence
  Synthetic
ccactcagcgacaaaccttt

SEQ ID NO: 38186 - DNA, 22 bp, Artificial Sequence
  Synthetic
caatccctacccaccatcttca

SEQ ID NO: 38187 - DNA, 20 bp, Artificial Sequence
  Synthetic
cccccctagcagtaaaggct

SEQ ID NO: 38188 - DNA, 20 bp, Artificial Sequence
  Synthetic
ggacgctggcaatgacaatg

SEQ ID NO: 38189 - DNA, 22 bp, Artificial Sequence
  Synthetic
ggtacttgttgtatggtgccaa

SEQ ID NO: 38190 - DNA, 23 bp, Artificial Sequence
  Synthetic
aactctacttaaaagcaagcgcg

SEQ ID NO: 38191 - DNA, 25 bp, Artificial Sequence
  Synthetic
agttcatgacaacagaagatgaaca

SEQ ID NO: 38192 - DNA, 23 bp, Artificial Sequence
  Synthetic
gtggtatcagacagcatttgtgt

SEQ ID NO: 38193 - DNA, 23 bp, Artificial Sequence
  Synthetic
aaagggaaaatattgcccacact

SEQ ID NO: 38194 - DNA, 21 bp, Artificial Sequence
  Synthetic
caaacccaggaatcctcactg

SEQ ID NO: 38195 - DNA, 25 bp, Artificial Sequence
  Synthetic
ccttttttgatttgcgccttacttg

SEQ ID NO: 38196 - DNA, 25 bp, Artificial Sequence
  Synthetic
cctgttgctatagatgtgaagttgc

SEQ ID NO: 38197 - DNA, 24 bp, Artificial Sequence
  Synthetic
atttcctcccctattgttagctct

SEQ ID NO: 38198 - DNA, 25 bp, Artificial Sequence
  Synthetic
gattgctcacataatcatagtcgca

SEQ ID NO: 38199 - DNA, 22 bp, Artificial Sequence
  Synthetic
ttgggtattggtactgggagag

SEQ ID NO: 38200 - DNA, 21 bp, Artificial Sequence
  Synthetic
tgtcatatctggcacaaccga

SEQ ID NO: 38201 - DNA, 21 bp, Artificial Sequence
  Synthetic
ttcccgcgcaatagtatttgg

SEQ ID NO: 38202 - DNA, 25 bp, Artificial Sequence
  Synthetic
actgaggggaatagaaataggaaga

SEQ ID NO: 38203 - DNA, 22 bp, Artificial Sequence
  Synthetic
atttctttgtcagagcaggcac

SEQ ID NO: 38204 - DNA, 23 bp, Artificial Sequence
  Synthetic
acccctgcaactgaaaaagaaga

SEQ ID NO: 38205 - DNA, 23 bp, Artificial Sequence
  Synthetic
atacacagatcagtaggagaggc

SEQ ID NO: 38206 - DNA, 20 bp, Artificial Sequence
  Synthetic
cggcacgcttcacactgacg

SEQ ID NO: 38207 - DNA, 23 bp, Artificial Sequence
  Synthetic
tatggaacctactgaagagccaa

SEQ ID NO: 38208 - DNA, 19 bp, Artificial Sequence
  Synthetic
ctgtgccgcctagccagca

SEQ ID NO: 38209 - DNA, 22 bp, Artificial Sequence
  Synthetic
acataaatcctccaattggggc

SEQ ID NO: 38210 - DNA, 20 bp, Artificial Sequence
  Synthetic
tcggtgctacctgtgtcaca

SEQ ID NO: 38211 - DNA, 22 bp, Artificial Sequence
  Synthetic
gacggacaagattcacaacctt

SEQ ID NO: 38212 - DNA, 20 bp, Artificial Sequence
  Synthetic
cgatgaggatgaggaggtgg

SEQ ID NO: 38213 - DNA, 24 bp, Artificial Sequence
  Synthetic
aacttacaagacagccaaaaaagg

SEQ ID NO: 38214 - DNA, 20 bp, Artificial Sequence
  Synthetic
tagatgcgtgccaggaacag

SEQ ID NO: 38215 - DNA, 22 bp, Artificial Sequence
  Synthetic
aacagtaacagttcagctacgc

SEQ ID NO: 38216 - DNA, 22 bp, Artificial Sequence
  Synthetic
ctgcatttctttccactcctca

SEQ ID NO: 38217 - DNA, 20 bp, Artificial Sequence
  Synthetic
gaaatttgggcgtgcccccg

SEQ ID NO: 38218 - DNA, 21 bp, Artificial Sequence
  Synthetic
cgactcggaagacttcggagc

SEQ ID NO: 38219 - DNA, 20 bp, Artificial Sequence
  Synthetic
ggaatctccccggttgctcc

SEQ ID NO: 38220 - DNA, 21 bp, Artificial Sequence
  Synthetic
cgcaccgcttgagtccttacg

SEQ ID NO: 38221 - DNA, 21 bp, Artificial Sequence
  Synthetic
tcagcatgcaggccaattggg

SEQ ID NO: 38222 - DNA, 21 bp, Artificial Sequence
  Synthetic
tcagcggctcgtctgatgaca

SEQ ID NO: 38223 - DNA, 22 bp, Artificial Sequence
  Synthetic
cctccatgcgaggttaacacca

SEQ ID NO: 38224 - DNA, 22 bp, Artificial Sequence
  Synthetic
atgcatacgaccaggaagtggc

SEQ ID NO: 38225 - DNA, 22 bp, Artificial Sequence
  Synthetic
atgagatcttgctcggaccagc

SEQ ID NO: 38226 - DNA, 20 bp, Artificial Sequence
  Synthetic
gcgggtgccaagaccatcag

SEQ ID NO: 38227 - DNA, 20 bp, Artificial Sequence
  Synthetic
gcagtgccccagacctacca

SEQ ID NO: 38228 - DNA, 22 bp, Artificial Sequence
  Synthetic
gttcctggctgatggaggttgc

SEQ ID NO: 38229 - DNA, 22 bp, Artificial Sequence
  Synthetic
tatgtcaccccgggagagagac

SEQ ID NO: 38230 - DNA, 22 bp, Artificial Sequence
  Synthetic
tgcctaattcgccttaagccca

SEQ ID NO: 38231 - DNA, 21 bp, Artificial Sequence
  Synthetic
cgggttacaactggctgagca

SEQ ID NO: 38232 - DNA, 20 bp, Artificial Sequence
  Synthetic
gcattcgtcgtgagcggctt

SEQ ID NO: 38233 - DNA, 22 bp, Artificial Sequence
  Synthetic
ggagatggcgtgatgcatacga

SEQ ID NO: 38234 - DNA, 22 bp, Artificial Sequence
  Synthetic
aaggacttgctggacgacaaca

SEQ ID NO: 38235 - DNA, 22 bp, Artificial Sequence
  Synthetic
atcagtgttgtgacctggagcc

SEQ ID NO: 38236 - DNA, 19 bp, Artificial Sequence
  Synthetic
ccgagccttcacggaggct

SEQ ID NO: 38237 - DNA, 22 bp, Artificial Sequence
  Synthetic
ggcgggggagacatttatcaca

SEQ ID NO: 38238 - DNA, 25 bp, Artificial Sequence
  Synthetic
ttcaacaataacaacacaagaagca

SEQ ID NO: 38239 - DNA, 21 bp, Artificial Sequence
  Synthetic
ggcctcaatctcatctggtcc

SEQ ID NO: 38240 - DNA, 22 bp, Artificial Sequence
  Synthetic
caggggctgagtgattacatca

SEQ ID NO: 38241 - DNA, 24 bp, Artificial Sequence
  Synthetic
gccttacattgaaagacaagcaaa

SEQ ID NO: 38242 - DNA, 24 bp, Artificial Sequence
  Synthetic
aatcctgaagctttagtcaggaga

SEQ ID NO: 38243 - DNA, 25 bp, Artificial Sequence
  Synthetic
atcccagactggaagttaaattgac

SEQ ID NO: 38244 - DNA, 23 bp, Artificial Sequence
  Synthetic
aatttccctttttggttcaccca

SEQ ID NO: 38245 - DNA, 22 bp, Artificial Sequence
  Synthetic
tgatgggggcattcatctccac

SEQ ID NO: 38246 - DNA, 22 bp, Artificial Sequence
  Synthetic
ttgggagcttgttcgagagctg

SEQ ID NO: 38247 - DNA, 20 bp, Artificial Sequence
  Synthetic
agtcagggctggaagacgcc

SEQ ID NO: 38248 - DNA, 22 bp, Artificial Sequence
  Synthetic
ttccacacaccgtctcctagga

SEQ ID NO: 38249 - DNA, 23 bp, Artificial Sequence
  Synthetic
agcgtatttgctatgcttgttgt

SEQ ID NO: 38250 - DNA, 24 bp, Artificial Sequence
  Synthetic
gctgacgctattcaatttttggag

SEQ ID NO: 38251 - DNA, 25 bp, Artificial Sequence
  Synthetic
gtacaggtagactctttgtcatacg

SEQ ID NO: 38252 - DNA, 23 bp, Artificial Sequence
  Synthetic
cccttgctggacgtttattgatg

SEQ ID NO: 38253 - DNA, 22 bp, Artificial Sequence
  Synthetic
acggttgatattgttggccccg

SEQ ID NO: 38254 - DNA, 20 bp, Artificial Sequence
  Synthetic
atctgaccgcgtcatctcca

SEQ ID NO: 38255 - DNA, 25 bp, Artificial Sequence
  Synthetic
acttttagaaacagctgacagaact

SEQ ID NO: 38256 - DNA, 25 bp, Artificial Sequence
  Synthetic
gagctcagggtaataataatggtgt

SEQ ID NO: 38257 - DNA, 20 bp, Artificial Sequence
  Synthetic
ttgttttccgccccgaggtt

SEQ ID NO: 38258 - DNA, 21 bp, Artificial Sequence
  Synthetic
ccgcgtcgtacttgctgatcc

SEQ ID NO: 38259 - DNA, 21 bp, Artificial Sequence
  Synthetic
tgtccgatcgatcttcggccc

SEQ ID NO: 38260 - DNA, 20 bp, Artificial Sequence
  Synthetic
tctaaggggatgcgccgtct

SEQ ID NO: 38261 - DNA, 19 bp, Artificial Sequence
  Synthetic
aagcccttgacctccccgc

SEQ ID NO: 38262 - DNA, 18 bp, Artificial Sequence
  Synthetic
tgtcgctgccgggcttga

SEQ ID NO: 38263 - DNA, 22 bp, Artificial Sequence
  Synthetic
gagtcgacatgtacctggctcg

SEQ ID NO: 38264 - DNA, 20 bp, Artificial Sequence
  Synthetic
ccgctgcatacccactcctc

SEQ ID NO: 38265 - DNA, 19 bp, Artificial Sequence
  Synthetic
cctgtgccggctgtcgagt

SEQ ID NO: 38266 - DNA, 20 bp, Artificial Sequence
  Synthetic
ccctcacttgctgctgctcc

SEQ ID NO: 38267 - DNA, 21 bp, Artificial Sequence
  Synthetic
ccagcgcccatctgttatccc

SEQ ID NO: 38268 - DNA, 22 bp, Artificial Sequence
  Synthetic
ttctccgcaagctcacgaatgt

SEQ ID NO: 38269 - DNA, 20 bp, Artificial Sequence
  Synthetic
gacctaccacagctggggcc

SEQ ID NO: 38270 - DNA, 19 bp, Artificial Sequence
  Synthetic
gccttcgtcgcggtgcaga

SEQ ID NO: 38271 - DNA, 21 bp, Artificial Sequence
  Synthetic
ggttgctgttttagcccccca

SEQ ID NO: 38272 - DNA, 20 bp, Artificial Sequence
  Synthetic
atgacgggtttatgcagcgt

SEQ ID NO: 38273 - DNA, 21 bp, Artificial Sequence
  Synthetic
cggtgcggatctataaggtga

SEQ ID NO: 38274 - DNA, 20 bp, Artificial Sequence
  Synthetic
tctaaaggaggccaacgcag

SEQ ID NO: 38275 - DNA, 20 bp, Artificial Sequence
  Synthetic
cttttgggggccagaatctc

SEQ ID NO: 38276 - DNA, 20 bp, Artificial Sequence
  Synthetic
aaccccctaacaccgcctta

SEQ ID NO: 38277 - DNA, 21 bp, Artificial Sequence
  Synthetic
aatacaaacacaatcggggcg

SEQ ID NO: 38278 - DNA, 19 bp, Artificial Sequence
  Synthetic
gcattccgagcctcgtccg

SEQ ID NO: 38279 - DNA, 19 bp, Artificial Sequence
  Synthetic
ccgtcgggcatcatgagcg

SEQ ID NO: 38280 - DNA, 19 bp, Artificial Sequence
  Synthetic
aggtccgcctttgccccct

SEQ ID NO: 38281 - DNA, 23 bp, Artificial Sequence
  Synthetic
taccctatagtgcagaacatcca

SEQ ID NO: 38282 - DNA, 21 bp, Artificial Sequence
  Synthetic
gacagcatgtcagggagtagg

SEQ ID NO: 38283 - DNA, 20 bp, Artificial Sequence
  Synthetic
tgggaaacatggtggacaga

SEQ ID NO: 38284 - DNA, 23 bp, Artificial Sequence
  Synthetic
ttgcctagtgttacgaaactgac

SEQ ID NO: 38285 - DNA, 22 bp, Artificial Sequence
  Synthetic
aattgggtgtcgacatagcaga

SEQ ID NO: 38286 - DNA, 20 bp, Artificial Sequence
  Synthetic
cacatgcctgtgtacccaca

SEQ ID NO: 38287 - DNA, 22 bp, Artificial Sequence
  Synthetic
gagatcttcagacctggaggag

SEQ ID NO: 38288 - DNA, 22 bp, Artificial Sequence
  Synthetic
atcaagcagctccaggcaagaa

SEQ ID NO: 38289 - DNA, 22 bp, Artificial Sequence
  Synthetic
gcctggctagaagcacaagagg

SEQ ID NO: 38290 - DNA, 22 bp, Artificial Sequence
  Synthetic
aaacaccatctttcggaggcgc

SEQ ID NO: 38291 - DNA, 19 bp, Artificial Sequence
  Synthetic
gcgtccaccccggaaggtt

SEQ ID NO: 38292 - DNA, 22 bp, Artificial Sequence
  Synthetic
ctctttccggatccggcgttgc

SEQ ID NO: 38293 - DNA, 19 bp, Artificial Sequence
  Synthetic
cgccaccgcaacaaccagg

SEQ ID NO: 38294 - DNA, 20 bp, Artificial Sequence
  Synthetic
caaggtgtcggcgtggttgg

SEQ ID NO: 38295 - DNA, 19 bp, Artificial Sequence
  Synthetic
tgctggccaacaatccgcc

SEQ ID NO: 38296 - DNA, 22 bp, Artificial Sequence
  Synthetic
tagggtgctaaagttcaccgcc

SEQ ID NO: 38297 - DNA, 19 bp, Artificial Sequence
  Synthetic
gggttcagcagctccagca

SEQ ID NO: 38298 - DNA, 20 bp, Artificial Sequence
  Synthetic
gcgactggtacacggacacc

SEQ ID NO: 38299 - DNA, 18 bp, Artificial Sequence
  Synthetic
gcagcacgcggtccgtaa

SEQ ID NO: 38300 - DNA, 20 bp, Artificial Sequence
  Synthetic
ggcgagcgtatcgtcgaagg

SEQ ID NO: 38301 - DNA, 20 bp, Artificial Sequence
  Synthetic
gttaaactcggcccgctcgt

SEQ ID NO: 38302 - DNA, 19 bp, Artificial Sequence
  Synthetic
agcagggtcgcgacgagct

SEQ ID NO: 38303 - DNA, 22 bp, Artificial Sequence
  Synthetic
tcttgtgtactcacgccctccc

SEQ ID NO: 38304 - DNA, 22 bp, Artificial Sequence
  Synthetic
gttgaaaacctcgttccgggcc

SEQ ID NO: 38305 - DNA, 21 bp, Artificial Sequence
  Synthetic
cgtaagtacgccttcctcccg

SEQ ID NO: 38306 - DNA, 19 bp, Artificial Sequence
  Synthetic
cccgcgacagaaccggagt

SEQ ID NO: 38307 - DNA, 19 bp, Artificial Sequence
  Synthetic
ccctgtgtggggcagtgga

SEQ ID NO: 38308 - DNA, 20 bp, Artificial Sequence
  Synthetic
agggcctccaggaagaccag

SEQ ID NO: 38309 - DNA, 19 bp, Artificial Sequence
  Synthetic
cgggccgccaaaaccccaa

SEQ ID NO: 38310 - DNA, 19 bp, Artificial Sequence
  Synthetic
cgtagctggcgttgtgggt

SEQ ID NO: 38311 - DNA, 21 bp, Artificial Sequence
  Synthetic
tggacgtttgggaacacaggc

SEQ ID NO: 38312 - DNA, 22 bp, Artificial Sequence
  Synthetic
atctgctgtaccgaaccaccca

SEQ ID NO: 38313 - DNA, 22 bp, Artificial Sequence
  Synthetic
ctgtagtacagcgcggtgttgg

SEQ ID NO: 38314 - DNA, 19 bp, Artificial Sequence
  Synthetic
cgggttcggctggttcgac

SEQ ID NO: 38315 - DNA, 19 bp, Artificial Sequence
  Synthetic
cggaacgcagccaaaggcc

SEQ ID NO: 38316 - DNA, 19 bp, Artificial Sequence
  Synthetic
ggacaacctggccgtcgag

SEQ ID NO: 38317 - DNA, 19 bp, Artificial Sequence
  Synthetic
ggtgcagctcgcgtttcgg

SEQ ID NO: 38318 - DNA, 19 bp, Artificial Sequence
  Synthetic
gttcctgtcggccggtgct

SEQ ID NO: 38319 - DNA, 20 bp, Artificial Sequence
  Synthetic
ggttcaaacccctggtgcgg

SEQ ID NO: 38320 - DNA, 18 bp, Artificial Sequence
  Synthetic
aacagagcacgcgcccca

SEQ ID NO: 38321 - DNA, 20 bp, Artificial Sequence
  Synthetic
tgggcctggatctggagtcg

SEQ ID NO: 38322 - DNA, 20 bp, Artificial Sequence
  Synthetic
gcgagctcggcttctaccgc

SEQ ID NO: 38323 - DNA, 19 bp, Artificial Sequence
  Synthetic
ccgtgacgtaccaggccag

SEQ ID NO: 38324 - DNA, 22 bp, Artificial Sequence
  Synthetic
tgaacatggtcaacaaacgcgc

SEQ ID NO: 38325 - DNA, 21 bp, Artificial Sequence
  Synthetic
ccctcctcacaaactgcctgc

SEQ ID NO: 38326 - DNA, 20 bp, Artificial Sequence
  Synthetic
ggggtggcgagggtgatcca

SEQ ID NO: 38327 - DNA, 21 bp, Artificial Sequence
  Synthetic
caacgccctggagcactttgg

SEQ ID NO: 38328 - DNA, 18 bp, Artificial Sequence
  Synthetic
tcgtgagtcccgcgcaca

SEQ ID NO: 38329 - DNA, 20 bp, Artificial Sequence
  Synthetic
ccttcttgtaccaccgcccg

SEQ ID NO: 38330 - DNA, 21 bp, Artificial Sequence
  Synthetic
ctgcacacgaccaaaacggac

SEQ ID NO: 38331 - DNA, 18 bp, Artificial Sequence
  Synthetic
tcccccacccaccacaca

SEQ ID NO: 38332 - DNA, 22 bp, Artificial Sequence
  Synthetic
gtcgtgtcgtgttgtgtcgtgg

SEQ ID NO: 38333 - DNA, 20 bp, Artificial Sequence
  Synthetic
gggaaaactctggcagcgca

SEQ ID NO: 38334 - DNA, 19 bp, Artificial Sequence
  Synthetic
ggagccacgagggaccgta

SEQ ID NO: 38335 - DNA, 19 bp, Artificial Sequence
  Synthetic
gggattacgggccgcacgt

SEQ ID NO: 38336 - DNA, 21 bp, Artificial Sequence
  Synthetic
ttttggaccagctgaccgacc

SEQ ID NO: 38337 - DNA, 20 bp, Artificial Sequence
  Synthetic
tctagcacacccacgggtct

SEQ ID NO: 38338 - DNA, 22 bp, Artificial Sequence
  Synthetic
gccgtctgccgcactttatagg

SEQ ID NO: 38339 - DNA, 21 bp, Artificial Sequence
  Synthetic
accttgacctcgcttgtcacg

SEQ ID NO: 38340 - DNA, 25 bp, Artificial Sequence
  Synthetic
tgaattatcacgtatggtacagtgg

SEQ ID NO: 38341 - DNA, 20 bp, Artificial Sequence
  Synthetic
gaaaacagctggcggggaat

SEQ ID NO: 38342 - DNA, 20 bp, Artificial Sequence
  Synthetic
atgcgaccctcacgttttgg

SEQ ID NO: 38343 - DNA, 21 bp, Artificial Sequence
  Synthetic
cgagacgacgcagaaacgagg

SEQ ID NO: 38344 - DNA, 25 bp, Artificial Sequence
  Synthetic
aacaactgtataagacatgcaaagc

SEQ ID NO: 38345 - DNA, 21 bp, Artificial Sequence
  Synthetic
ttgaatcaggggggccttcac

SEQ ID NO: 38346 - DNA, 21 bp, Artificial Sequence
  Synthetic
tgtgaccagcactcctgaacg

SEQ ID NO: 38347 - DNA, 22 bp, Artificial Sequence
  Synthetic
aggttgagcattgcatttgacc

SEQ ID NO: 38348 - DNA, 25 bp, Artificial Sequence
  Synthetic
ttctacactgcagagaaacaaatcc

SEQ ID NO: 38349 - DNA, 22 bp, Artificial Sequence
  Synthetic
ttgttattggaacgcctccggt

SEQ ID NO: 38350 - DNA, 25 bp, Artificial Sequence
  Synthetic
attagattttgtgtagtctgcagcc

SEQ ID NO: 38351 - DNA, 20 bp, Artificial Sequence
  Synthetic
tggtagaggaactggaggca

SEQ ID NO: 38352 - DNA, 23 bp, Artificial Sequence
  Synthetic
aatatttgagcgtgatgtggagg

SEQ ID NO: 38353 - DNA, 22 bp, Artificial Sequence
  Synthetic
tacaggcagatgatgatttgcg

SEQ ID NO: 38354 - DNA, 24 bp, Artificial Sequence
  Synthetic
taatttgtgttttgcttgctgtcg

SEQ ID NO: 38355 - DNA, 23 bp, Artificial Sequence
  Synthetic
aaattgtacagcttgctccaaac

SEQ ID NO: 38356 - DNA, 21 bp, Artificial Sequence
  Synthetic
ggaaattccctggcactgttc

SEQ ID NO: 38357 - DNA, 21 bp, Artificial Sequence
  Synthetic
ctaatggcgccgatacaactg

SEQ ID NO: 38358 - DNA, 20 bp, Artificial Sequence
  Synthetic
cagatgatgcagctgtggca

SEQ ID NO: 38359 - DNA, 20 bp, Artificial Sequence
  Synthetic
agaatggaggagacgcaaga

SEQ ID NO: 38360 - DNA, 21 bp, Artificial Sequence
  Synthetic
acatcctgcagtaaccagtgg

SEQ ID NO: 38361 - DNA, 23 bp, Artificial Sequence
  Synthetic
atcacagtctggtcaggttactc

SEQ ID NO: 38362 - DNA, 25 bp, Artificial Sequence
  Synthetic
ctgatattatcaggttgggtaggcc

SEQ ID NO: 38363 - DNA, 20 bp, Artificial Sequence
  Synthetic
gttgcagcaagacatgtcca

SEQ ID NO: 38364 - DNA, 21 bp, Artificial Sequence
  Synthetic
gtcgttatgtatcgcctccac

SEQ ID NO: 38365 - DNA, 22 bp, Artificial Sequence
  Synthetic
gaccgaatgcgttccttcattg

SEQ ID NO: 38366 - DNA, 20 bp, Artificial Sequence
  Synthetic
accccagagcaccaatggta

SEQ ID NO: 38367 - DNA, 20 bp, Artificial Sequence
  Synthetic
ggaggaggagcgagaacctt

SEQ ID NO: 38368 - DNA, 22 bp, Artificial Sequence
  Synthetic
actctcggagaatctgtcccgt

SEQ ID NO: 38369 - DNA, 20 bp, Artificial Sequence
  Synthetic
tatacctggggggtctgggt

SEQ ID NO: 38370 - DNA, 21 bp, Artificial Sequence
  Synthetic
gagatgccataccagagggaa

SEQ ID NO: 38371 - DNA, 25 bp, Artificial Sequence
  Synthetic
ccgttttgtgtataaaaggtccagc

SEQ ID NO: 38372 - DNA, 24 bp, Artificial Sequence
  Synthetic
cagaccaaatgtccctattgatcc

SEQ ID NO: 38373 - DNA, 24 bp, Artificial Sequence
  Synthetic
aaacgtttacgaactgtagatgct

SEQ ID NO: 38374 - DNA, 25 bp, Artificial Sequence
  Synthetic
acattttcaaagtaaagacgacagc

SEQ ID NO: 38375 - DNA, 22 bp, Artificial Sequence
  Synthetic
gggaagcaacgatgtatcatca

SEQ ID NO: 38376 - DNA, 24 bp, Artificial Sequence
  Synthetic
agtgatagggttcaacaaatcacc

SEQ ID NO: 38377 - DNA, 20 bp, Artificial Sequence
  Synthetic
acccttccaggatctggtca

SEQ ID NO: 38378 - DNA, 23 bp, Artificial Sequence
  Synthetic
ccttgccatacgtgtctattgga

SEQ ID NO: 38379 - DNA, 22 bp, Artificial Sequence
  Synthetic
tgagagacccactaacatctgg

SEQ ID NO: 38380 - DNA, 25 bp, Artificial Sequence
  Synthetic
ttagacggtttggatttgatttgga

SEQ ID NO: 38381 - DNA, 23 bp, Artificial Sequence
  Synthetic
cctcgtgaatggacagaaaatcc

SEQ ID NO: 38382 - DNA, 25 bp, Artificial Sequence
  Synthetic
cgctatgactacccaacaaaaacag

SEQ ID NO: 38383 - DNA, 20 bp, Artificial Sequence
  Synthetic
gaagcaaacaacccgctgtg

SEQ ID NO: 38384 - DNA, 20 bp, Artificial Sequence
  Synthetic
ttcctgctgatggatgcctt

SEQ ID NO: 38385 - DNA, 20 bp, Artificial Sequence
  Synthetic
ctcactgcagagccacagaa

SEQ ID NO: 38386 - DNA, 22 bp, Artificial Sequence
  Synthetic
gaacaaatcagaaacatggccc

SEQ ID NO: 38387 - DNA, 20 bp, Artificial Sequence
  Synthetic
ccaggttaaaatacgccgca

SEQ ID NO: 38388 - DNA, 23 bp, Artificial Sequence
  Synthetic
tcgcaaaacaagattcctaccag

SEQ ID NO: 38389 - DNA, 22 bp, Artificial Sequence
  Synthetic
ggaaagcaaccagaagactgat

SEQ ID NO: 38390 - DNA, 20 bp, Artificial Sequence
  Synthetic
gaaactccctggcgttgttc

SEQ ID NO: 38391 - DNA, 20 bp, Artificial Sequence
  Synthetic
caaatgaaaatggcggcgac

SEQ ID NO: 38392 - DNA, 19 bp, Artificial Sequence
  Synthetic
ggaggccgacggacgaaga

SEQ ID NO: 38393 - DNA, 21 bp, Artificial Sequence
  Synthetic
caaggcctagcatatccaggg

SEQ ID NO: 38394 - DNA, 25 bp, Artificial Sequence
  Synthetic
ttacttttagatggctacttggacc

SEQ ID NO: 38395 - DNA, 20 bp, Artificial Sequence
  Synthetic
agtctgcggaaccggtgagt

SEQ ID NO: 38396 - DNA, 20 bp, Artificial Sequence
  Synthetic
gacatccgagcgatcccagc

SEQ ID NO: 38397 - DNA, 20 bp, Artificial Sequence
  Synthetic
tcacccaccctggctgtacc

SEQ ID NO: 38398 - DNA, 20 bp, Artificial Sequence
  Synthetic
gccatcgcctacttcggcat

SEQ ID NO: 38399 - DNA, 20 bp, Artificial Sequence
  Synthetic
ccaacatcacagggccgtct

SEQ ID NO: 38400 - DNA, 21 bp, Artificial Sequence
  Synthetic
cccgccttgccagttaatccc

SEQ ID NO: 38401 - DNA, 19 bp, Artificial Sequence
  Synthetic
gtgtggcacgtgaaggggc

SEQ ID NO: 38402 - DNA, 21 bp, Artificial Sequence
  Synthetic
ccctgtgtccgcgagactagg

SEQ ID NO: 38403 - DNA, 22 bp, Artificial Sequence
  Synthetic
tggacacaaccatgcgatctcc

SEQ ID NO: 38404 - DNA, 22 bp, Artificial Sequence
  Synthetic
catcggcactgtcctagaccag

SEQ ID NO: 38405 - DNA, 21 bp, Artificial Sequence
  Synthetic
gctacacgggcgactttgact

SEQ ID NO: 38406 - DNA, 20 bp, Artificial Sequence
  Synthetic
atccattccacgtggcccag

SEQ ID NO: 38407 - DNA, 19 bp, Artificial Sequence
  Synthetic
ccacggtggccagcatagg

SEQ ID NO: 38408 - DNA, 21 bp, Artificial Sequence
  Synthetic
cgaggatacgtccacgccttg

SEQ ID NO: 38409 - DNA, 22 bp, Artificial Sequence
  Synthetic
gaacgtttccgatcaacgccac

SEQ ID NO: 38410 - DNA, 20 bp, Artificial Sequence
  Synthetic
ttgtgagccagagcctgacg

SEQ ID NO: 38411 - DNA, 22 bp, Artificial Sequence
  Synthetic
gggccagacctgactacaatcc

SEQ ID NO: 38412 - DNA, 22 bp, Artificial Sequence
  Synthetic
ggagacatcgagccagagctgt

SEQ ID NO: 38413 - DNA, 21 bp, Artificial Sequence
  Synthetic
acaatgccttggtgtatgtgg

SEQ ID NO: 38414 - DNA, 25 bp, Artificial Sequence
  Synthetic
tgaaaataggaaacttcagagtcgg

SEQ ID NO: 38415 - DNA, 23 bp, Artificial Sequence
  Synthetic
ttgctgctgtaaatgtgttaggc

SEQ ID NO: 38416 - DNA, 22 bp, Artificial Sequence
  Synthetic
aatttctttttgctgccctggg

SEQ ID NO: 38417 - DNA, 25 bp, Artificial Sequence
  Synthetic
gcgaaaaacaatatgtcagttttgc

SEQ ID NO: 38418 - DNA, 25 bp, Artificial Sequence
  Synthetic
ctatgatcaatcaccaaattgctgg

SEQ ID NO: 38419 - DNA, 20 bp, Artificial Sequence
  Synthetic
ggtccagcggaactgattcc

SEQ ID NO: 38420 - DNA, 20 bp, Artificial Sequence
  Synthetic
tggattttctgggtcaggcg

SEQ ID NO: 38421 - DNA, 20 bp, Artificial Sequence
  Synthetic
tgctggtaccactggagaca

SEQ ID NO: 38422 - DNA, 24 bp, Artificial Sequence
  Synthetic
gatgattggcaattggcatttgtg

SEQ ID NO: 38423 - DNA, 22 bp, Artificial Sequence
  Synthetic
tctcagttattctgctggtgca

SEQ ID NO: 38424 - DNA, 24 bp, Artificial Sequence
  Synthetic
gagactgaaacaccatgtagtcag

SEQ ID NO: 38425 - DNA, 21 bp, Artificial Sequence
  Synthetic
tctgtattgcagcctccaaca

SEQ ID NO: 38426 - DNA, 20 bp, Artificial Sequence
  Synthetic
cagccattaggtgtgggcat

SEQ ID NO: 38427 - DNA, 25 bp, Artificial Sequence
  Synthetic
tacctctgatgcccaaatattcaat

SEQ ID NO: 38428 - DNA, 24 bp, Artificial Sequence
  Synthetic
aggattgaaggccaaaccaaaatt

SEQ ID NO: 38429 - DNA, 20 bp, Artificial Sequence
  Synthetic
ttcctgacctgcactgcttg

SEQ ID NO: 38430 - DNA, 20 bp, Artificial Sequence
  Synthetic
cagttactgcgacgtgaggt

SEQ ID NO: 38431 - DNA, 21 bp, Artificial Sequence
  Synthetic
accggtcgatgtatgtcttgt

SEQ ID NO: 38432 - DNA, 22 bp, Artificial Sequence
  Synthetic
aaccttttgttgcaagtgtgac

SEQ ID NO: 38433 - DNA, 25 bp, Artificial Sequence
  Synthetic
atgtactctgatttccacttcatcg

SEQ ID NO: 38434 - DNA, 20 bp, Artificial Sequence
  Synthetic
ctcggtgagaacatggcacc

SEQ ID NO: 38435 - DNA, 24 bp, Artificial Sequence
  Synthetic
attgtgttcttgaaataggggaca

SEQ ID NO: 38436 - DNA, 22 bp, Artificial Sequence
  Synthetic
gagtcacctaaaggagtggagg

SEQ ID NO: 38437 - DNA, 20 bp, Artificial Sequence
  Synthetic
tgcaccgaatcatgagggaa

SEQ ID NO: 38438 - DNA, 23 bp, Artificial Sequence
  Synthetic
aattgtgcttccttgtggtttgt

SEQ ID NO: 38439 - DNA, 20 bp, Artificial Sequence
  Synthetic
ggaggatttggaggacacct

SEQ ID NO: 38440 - DNA, 22 bp, Artificial Sequence
  Synthetic
agtgatggaaagcctcaacaac

SEQ ID NO: 38441 - DNA, 21 bp, Artificial Sequence
  Synthetic
ggccctacggacgaagaaggt

SEQ ID NO: 38442 - DNA, 25 bp, Artificial Sequence
  Synthetic
agttactgcacctgaatttatcaca

SEQ ID NO: 38443 - DNA, 20 bp, Artificial Sequence
  Synthetic
cttctggcgagactgtggtg

SEQ ID NO: 38444 - DNA, 24 bp, Artificial Sequence
  Synthetic
tgcccagaataagttttaccttcc

SEQ ID NO: 38445 - DNA, 20 bp, Artificial Sequence
  Synthetic
actactgtggccaaacggag

SEQ ID NO: 38446 - DNA, 23 bp, Artificial Sequence
  Synthetic
gatactggtatcctttttggcgc

SEQ ID NO: 38447 - DNA, 24 bp, Artificial Sequence
  Synthetic
ggagattctacatccaaatgtgca

SEQ ID NO: 38448 - DNA, 23 bp, Artificial Sequence
  Synthetic
gggttgcttatgaaagaatgtgc

SEQ ID NO: 38449 - DNA, 21 bp, Artificial Sequence
  Synthetic
catggactccaataccctgga

SEQ ID NO: 38450 - DNA, 21 bp, Artificial Sequence
  Synthetic
gacccaaggtgccttactgaa

SEQ ID NO: 38451 - DNA, 20 bp, Artificial Sequence
  Synthetic
ggccatgggtgtctttcgat

SEQ ID NO: 38452 - DNA, 25 bp, Artificial Sequence
  Synthetic
ttcagcaaacaagagtggataagct

SEQ ID NO: 38453 - DNA, 22 bp, Artificial Sequence
  Synthetic
tacggacacaaataccagcaga

SEQ ID NO: 38454 - DNA, 22 bp, Artificial Sequence
  Synthetic
acagctcagatggctcttcagc

SEQ ID NO: 38455 - DNA, 20 bp, Artificial Sequence
  Synthetic
ctacctgatctgtgcacgga

SEQ ID NO: 38456 - DNA, 25 bp, Artificial Sequence
  Synthetic
acaatttattaataaggtgcctgcg

SEQ ID NO: 38457 - DNA, 21 bp, Artificial Sequence
  Synthetic
acgagcaattaagcgactcag

SEQ ID NO: 38458 - DNA, 23 bp, Artificial Sequence
  Synthetic
gcacagaaaacagtccattaggg

SEQ ID NO: 38459 - DNA, 20 bp, Artificial Sequence
  Synthetic
cacagagggcaacaacagca

SEQ ID NO: 38460 - DNA, 21 bp, Artificial Sequence
  Synthetic
gcaattcctgcgataccaaca

SEQ ID NO: 38461 - DNA, 20 bp, Artificial Sequence
  Synthetic
ccagacgtcggctgctacac

SEQ ID NO: 38462 - DNA, 20 bp, Artificial Sequence
  Synthetic
aggcactgcttgtaaatcgc

SEQ ID NO: 38463 - DNA, 21 bp, Artificial Sequence
  Synthetic
ggacaggaacaggatacacca

SEQ ID NO: 38464 - DNA, 22 bp, Artificial Sequence
  Synthetic
caaacacgagtagacaagctga

SEQ ID NO: 38465 - DNA, 22 bp, Artificial Sequence
  Synthetic
tctgattgtgaatgcacccaat

SEQ ID NO: 38466 - DNA, 22 bp, Artificial Sequence
  Synthetic
agtatggtggaggctatggttt

SEQ ID NO: 38467 - DNA, 22 bp, Artificial Sequence
  Synthetic
cgctatagggcaggcttatccc

SEQ ID NO: 38468 - DNA, 20 bp, Artificial Sequence
  Synthetic
acacagcaggggtcttgggc

SEQ ID NO: 38469 - DNA, 21 bp, Artificial Sequence
  Synthetic
ccattgtgcttactggggcgg

SEQ ID NO: 38470 - DNA, 19 bp, Artificial Sequence
  Synthetic
gggtgtggaggtttggcga

SEQ ID NO: 38471 - DNA, 22 bp, Artificial Sequence
  Synthetic
ttcgcccacttggttgttgagt

SEQ ID NO: 38472 - DNA, 19 bp, Artificial Sequence
  Synthetic
ctcggggtcggtggtgctt

SEQ ID NO: 38473 - DNA, 19 bp, Artificial Sequence
  Synthetic
caagaggtgcgctgcccct

SEQ ID NO: 38474 - DNA, 20 bp, Artificial Sequence
  Synthetic
tggtggcggcttggttttgg

SEQ ID NO: 38475 - DNA, 18 bp, Artificial Sequence
  Synthetic
tgccgcacgagtgttggg

SEQ ID NO: 38476 - DNA, 22 bp, Artificial Sequence
  Synthetic
ggaaccttgcaaatgctcaccg

SEQ ID NO: 38477 - DNA, 22 bp, Artificial Sequence
  Synthetic
gaatgtcgggttcgcttgttgc

SEQ ID NO: 38478 - DNA, 22 bp, Artificial Sequence
  Synthetic
actacaggggcagggaaacaga

SEQ ID NO: 38479 - DNA, 20 bp, Artificial Sequence
  Synthetic
ggagctctctgggcagctgt

SEQ ID NO: 38480 - DNA, 20 bp, Artificial Sequence
  Synthetic
tgggtggatgacctgcaggc

SEQ ID NO: 38481 - DNA, 22 bp, Artificial Sequence
  Synthetic
atcctggagactgagtgtggct

SEQ ID NO: 38482 - DNA, 19 bp, Artificial Sequence
  Synthetic
cggcagggcggtgcatgtt

SEQ ID NO: 38483 - DNA, 21 bp, Artificial Sequence
  Synthetic
agtgtcaagaagggggtcggt

SEQ ID NO: 38484 - DNA, 20 bp, Artificial Sequence
  Synthetic
gaccctgggaagggaacgga

SEQ ID NO: 38485 - DNA, 19 bp, Artificial Sequence
  Synthetic
cgaggtgaggcgggctgtt

SEQ ID NO: 38486 - DNA, 22 bp, Artificial Sequence
  Synthetic
tactcatacgtctggtcggggc

SEQ ID NO: 38487 - DNA, 20 bp, Artificial Sequence
  Synthetic
gaagctgcaatcttcgcggc

SEQ ID NO: 38488 - DNA, 21 bp, Artificial Sequence
  Synthetic
gggaaaaagcgctggtggttg

SEQ ID NO: 38489 - DNA, 20 bp, Artificial Sequence
  Synthetic
tcaacaggagtgtgagcaga

SEQ ID NO: 38490 - DNA, 24 bp, Artificial Sequence
  Synthetic
atacctattgtgttttaaggcggg

SEQ ID NO: 38491 - DNA, 20 bp, Artificial Sequence
  Synthetic
gcgaatgcagtagcttggct

SEQ ID NO: 38492 - DNA, 20 bp, Artificial Sequence
  Synthetic
atcaagaagaggagggcgag

SEQ ID NO: 38493 - DNA, 21 bp, Artificial Sequence
  Synthetic
ccgttgactccacgtccagac

SEQ ID NO: 38494 - DNA, 21 bp, Artificial Sequence
  Synthetic
gcgatcaaggtcaccctccac

SEQ ID NO: 38495 - DNA, 20 bp, Artificial Sequence
  Synthetic
gggcggctaacacactgaaa

SEQ ID NO: 38496 - DNA, 22 bp, Artificial Sequence
  Synthetic
tttagaggttgccccagagcct

SEQ ID NO: 38497 - DNA, 20 bp, Artificial Sequence
  Synthetic
agggaattgggacgtccaca

SEQ ID NO: 38498 - DNA, 24 bp, Artificial Sequence
  Synthetic
acaggggacttttatttacatccc

SEQ ID NO: 38499 - DNA, 21 bp, Artificial Sequence
  Synthetic
ccttgcataggagagcattgg

SEQ ID NO: 38500 - DNA, 21 bp, Artificial Sequence
  Synthetic
taccaatttgcacttgggcag

SEQ ID NO: 38501 - DNA, 23 bp, Artificial Sequence
  Synthetic
ggatgcttaccgacagtattggt

SEQ ID NO: 38502 - DNA, 21 bp, Artificial Sequence
  Synthetic
ttggtggttggactacggcta

SEQ ID NO: 38503 - DNA, 21 bp, Artificial Sequence
  Synthetic
ggcaaccagaccaatcatcaa

SEQ ID NO: 38504 - DNA, 20 bp, Artificial Sequence
  Synthetic
ccgcacctagagcaggagat

SEQ ID NO: 38505 - DNA, 24 bp, Artificial Sequence
  Synthetic
gcaagcagaatttgatccaaatgc

SEQ ID NO: 38506 - DNA, 20 bp, Artificial Sequence
  Synthetic
aagccgtttcgatgtactgc

SEQ ID NO: 38507 - DNA, 25 bp, Artificial Sequence
  Synthetic
ttaaatgttacacctgcagatcctc

SEQ ID NO: 38508 - DNA, 22 bp, Artificial Sequence
  Synthetic
gattgctgtacctaccacctca

SEQ ID NO: 38509 - DNA, 25 bp, Artificial Sequence
  Synthetic
aaacaggttcaaatgtgtattgtgg

SEQ ID NO: 38510 - DNA, 22 bp, Artificial Sequence
  Synthetic
ggaacaggaacaggatacacca

SEQ ID NO: 38511 - DNA, 22 bp, Artificial Sequence
  Synthetic
agtcgttcaacaaacaagggtg

SEQ ID NO: 38512 - DNA, 25 bp, Artificial Sequence
  Synthetic
catagtgaatgcaccaaatcatgag

SEQ ID NO: 38513 - DNA, 24 bp, Artificial Sequence
  Synthetic
attggaatttctagcatggtggag

SEQ ID NO: 38514 - DNA, 21 bp, Artificial Sequence
  Synthetic
tggtggactattgcaagcaac

SEQ ID NO: 38515 - DNA, 23 bp, Artificial Sequence
  Synthetic
acgtgtaagcattgtcattgtcg

SEQ ID NO: 38516 - DNA, 24 bp, Artificial Sequence
  Synthetic
acttttggctatagaccttttggg

SEQ ID NO: 38517 - DNA, 24 bp, Artificial Sequence
  Synthetic
atgtagtttatttaggcaggccaa

SEQ ID NO: 38518 - DNA, 25 bp, Artificial Sequence
  Synthetic
acttaggtccacaagaaaaagatga

SEQ ID NO: 38519 - DNA, 21 bp, Artificial Sequence
  Synthetic
ctggagccagcttttagtcct

SEQ ID NO: 38520 - DNA, 22 bp, Artificial Sequence
  Synthetic
acgacgagaaagagaaccagcc

SEQ ID NO: 38521 - DNA, 24 bp, Artificial Sequence
  Synthetic
taaacccaagcagtagttctgttg

SEQ ID NO: 38522 - DNA, 25 bp, Artificial Sequence
  Synthetic
tatgacccagaatttgaacttcctc

SEQ ID NO: 38523 - DNA, 24 bp, Artificial Sequence
  Synthetic
cagaagcatcttaaatgttcccac

SEQ ID NO: 38524 - DNA, 20 bp, Artificial Sequence
  Synthetic
accatcacgtcctgttgctc

SEQ ID NO: 38525 - DNA, 25 bp, Artificial Sequence
  Synthetic
ccaggttgcattaggatcattaaac

SEQ ID NO: 38526 - DNA, 25 bp, Artificial Sequence
  Synthetic
agttcagtttgaattcacaaatccc

SEQ ID NO: 38527 - DNA, 25 bp, Artificial Sequence
  Synthetic
aaggggtattgaaattcaaaggggt

SEQ ID NO: 38528 - DNA, 25 bp, Artificial Sequence
  Synthetic
caggtttttatcttctttggctacc

SEQ ID NO: 38529 - DNA, 22 bp, Artificial Sequence
  Synthetic
gtttcctttacaaaaccacgcc

SEQ ID NO: 38530 - DNA, 19 bp, Artificial Sequence
  Synthetic
gggaacatcggggcgtacg

SEQ ID NO: 38531 - DNA, 21 bp, Artificial Sequence
  Synthetic
ccctctccaaggttccgttcg

SEQ ID NO: 38532 - DNA, 21 bp, Artificial Sequence
  Synthetic
tgtggcctcacctgaccaacc

SEQ ID NO: 38533 - DNA, 22 bp, Artificial Sequence
  Synthetic
atggtcatggcaagcttggagc

SEQ ID NO: 38534 - DNA, 22 bp, Artificial Sequence
  Synthetic
ctttgtgggaggagaacagccg

SEQ ID NO: 38535 - DNA, 19 bp, Artificial Sequence
  Synthetic
cgccaccccgtcgaccttt

SEQ ID NO: 38536 - DNA, 20 bp, Artificial Sequence
  Synthetic
tacatggcccggtacctgct

SEQ ID NO: 38537 - DNA, 19 bp, Artificial Sequence
  Synthetic
gccgccgagtcccaatgca

SEQ ID NO: 38538 - DNA, 19 bp, Artificial Sequence
  Synthetic
ccgcgaaggagaccgtcga

SEQ ID NO: 38539 - DNA, 22 bp, Artificial Sequence
  Synthetic
ttttgcggcccatttttgcacc

SEQ ID NO: 38540 - DNA, 19 bp, Artificial Sequence
  Synthetic
ggctgcttcgctggatggc

SEQ ID NO: 38541 - DNA, 20 bp, Artificial Sequence
  Synthetic
aacgtcaccagatgcgggtg

SEQ ID NO: 38542 - DNA, 19 bp, Artificial Sequence
  Synthetic
gctgacgtcgtctggggtg

SEQ ID NO: 38543 - DNA, 17 bp, Artificial Sequence
  Synthetic
agcttgcggatgcgcgt

SEQ ID NO: 38544 - DNA, 22 bp, Artificial Sequence
  Synthetic
tgcggttagaaagtcacgacgc

SEQ ID NO: 38545 - DNA, 19 bp, Artificial Sequence
  Synthetic
ggaggtggacgatcgcgca

SEQ ID NO: 38546 - DNA, 21 bp, Artificial Sequence
  Synthetic
ttctgttgtaccgcccctcga

SEQ ID NO: 38547 - DNA, 19 bp, Artificial Sequence
  Synthetic
atctacctcgcggcccagg

SEQ ID NO: 38548 - DNA, 19 bp, Artificial Sequence
  Synthetic
ccggggcttcggggtgaat

SEQ ID NO: 38549 - DNA, 20 bp, Artificial Sequence
  Synthetic
gggaaaccgcaacgtgaggt

SEQ ID NO: 38550 - DNA, 20 bp, Artificial Sequence
  Synthetic
ggcgatgtcggccgacgtaa

SEQ ID NO: 38551 - DNA, 21 bp, Artificial Sequence
  Synthetic
aacccaaacccgggatggagg

SEQ ID NO: 38552 - DNA, 19 bp, Artificial Sequence
  Synthetic
gcctggacgttgcgagcga

SEQ ID NO: 38553 - DNA, 19 bp, Artificial Sequence
  Synthetic
cagcagggcgtcgaactcg

SEQ ID NO: 38554 - DNA, 19 bp, Artificial Sequence
  Synthetic
cagggccgtgcctcccaaa

SEQ ID NO: 38555 - DNA, 21 bp, Artificial Sequence
  Synthetic
ccccaacacgatgtttgtgcc

SEQ ID NO: 38556 - DNA, 21 bp, Artificial Sequence
  Synthetic
cgtctttaacctcccccggga

SEQ ID NO: 38557 - DNA, 19 bp, Artificial Sequence
  Synthetic
tgcggccggctgtatgtgg

SEQ ID NO: 38558 - DNA, 22 bp, Artificial Sequence
  Synthetic
cgcgtactcctcgaagtacacg

SEQ ID NO: 38559 - DNA, 20 bp, Artificial Sequence
  Synthetic
tccacagggtcagctcgtga

SEQ ID NO: 38560 - DNA, 19 bp, Artificial Sequence
  Synthetic
catggtgcagaccgacggg

SEQ ID NO: 38561 - DNA, 20 bp, Artificial Sequence
  Synthetic
ttcagcagaaagcccagcgg

SEQ ID NO: 38562 - DNA, 19 bp, Artificial Sequence
  Synthetic
cgcgtgctgtcgtacctgt

SEQ ID NO: 38563 - DNA, 19 bp, Artificial Sequence
  Synthetic
aggaggccgtgctcctgga

SEQ ID NO: 38564 - DNA, 21 bp, Artificial Sequence
  Synthetic
ttctgccccccatcaaactcg

SEQ ID NO: 38565 - DNA, 20 bp, Artificial Sequence
  Synthetic
cacatacgcgcgctcgaacg

SEQ ID NO: 38566 - DNA, 18 bp, Artificial Sequence
  Synthetic
gcgtgcagctcgcgtttc

SEQ ID NO: 38567 - DNA, 19 bp, Artificial Sequence
  Synthetic
gcggggaagagcaggctgt

SEQ ID NO: 38568 - DNA, 20 bp, Artificial Sequence
  Synthetic
ggcctccaagcgatccagtg

SEQ ID NO: 38569 - DNA, 21 bp, Artificial Sequence
  Synthetic
ggtcacgatagatcgcgccag

SEQ ID NO: 38570 - DNA, 20 bp, Artificial Sequence
  Synthetic
ctatcgagggcgcttggtcg

SEQ ID NO: 38571 - DNA, 20 bp, Artificial Sequence
  Synthetic
caggtgtttaacccgggcca

SEQ ID NO: 38572 - DNA, 18 bp, Artificial Sequence
  Synthetic
aacgcggccagtgtcacg

SEQ ID NO: 38573 - DNA, 20 bp, Artificial Sequence
  Synthetic
gcaggtttttgccctcgcag

SEQ ID NO: 38574 - DNA, 20 bp, Artificial Sequence
  Synthetic
gggtccgcaaaacccactgg

SEQ ID NO: 38575 - DNA, 19 bp, Artificial Sequence
  Synthetic
acgggtcatccagcaggcg

SEQ ID NO: 38576 - DNA, 18 bp, Artificial Sequence
  Synthetic
cagcagtgctttgccgcc

SEQ ID NO: 38577 - DNA, 22 bp, Artificial Sequence
  Synthetic
gctgcaccgatgtatttacgcg

SEQ ID NO: 38578 - DNA, 19 bp, Artificial Sequence
  Synthetic
gcccacaagatggtggccc

SEQ ID NO: 38579 - DNA, 20 bp, Artificial Sequence
  Synthetic
tcgtcggacgaggacatgga

SEQ ID NO: 38580 - DNA, 20 bp, Artificial Sequence
  Synthetic
aaacggactccgcttgcgtg

SEQ ID NO: 38581 - DNA, 20 bp, Artificial Sequence
  Synthetic
gcataggttggggggtggtc

SEQ ID NO: 38582 - DNA, 20 bp, Artificial Sequence
  Synthetic
gctacgccttcgggaatggg

SEQ ID NO: 38583 - DNA, 19 bp, Artificial Sequence
  Synthetic
cgccgcgtttccaggtagg

SEQ ID NO: 38584 - DNA, 19 bp, Artificial Sequence
  Synthetic
cggaaacggatgcgtcggt

SEQ ID NO: 38585 - DNA, 19 bp, Artificial Sequence
  Synthetic
ggcgatgtgggttgctcgt

SEQ ID NO: 38586 - DNA, 18 bp, Artificial Sequence
  Synthetic
tggtggtgtttggggggc

SEQ ID NO: 38587 - DNA, 19 bp, Artificial Sequence
  Synthetic
cgggcttgcgtcgacggaa

SEQ ID NO: 38588 - DNA, 18 bp, Artificial Sequence
  Synthetic
cactcacggtgcggcgaa

SEQ ID NO: 38589 - DNA, 19 bp, Artificial Sequence
  Synthetic
tcccacaccacaccaccca

SEQ ID NO: 38590 - DNA, 19 bp, Artificial Sequence
  Synthetic
ggcagctcctaagcgccgt

SEQ ID NO: 38591 - DNA, 19 bp, Artificial Sequence
  Synthetic
caggcccaggtccacgttg

SEQ ID NO: 38592 - DNA, 19 bp, Artificial Sequence
  Synthetic
ccacacaccccccatgcca

SEQ ID NO: 38593 - DNA, 18 bp, Artificial Sequence
  Synthetic
acccgaaacggccaacgg

SEQ ID NO: 38594 - DNA, 19 bp, Artificial Sequence
  Synthetic
acggaccccttaacgcacg

SEQ ID NO: 38595 - DNA, 22 bp, Artificial Sequence
  Synthetic
ccccggcccccaataaagatcg

SEQ ID NO: 38596 - DNA, 22 bp, Artificial Sequence
  Synthetic
gacctgcttattctcggggagc

SEQ ID NO: 38597 - DNA, 20 bp, Artificial Sequence
  Synthetic
gccatagccgccgaagggac

SEQ ID NO: 38598 - DNA, 19 bp, Artificial Sequence
  Synthetic
taaaggacccggctcgcca

SEQ ID NO: 38599 - DNA, 19 bp, Artificial Sequence
  Synthetic
acacgcgcgtccttcttgt

SEQ ID NO: 38600 - DNA, 23 bp, Artificial Sequence
  Synthetic
caagctgaaccatgcaatcaaag

SEQ ID NO: 38601 - DNA, 25 bp, Artificial Sequence
  Synthetic
atacaacggcataataacagacact

SEQ ID NO: 38602 - DNA, 21 bp, Artificial Sequence
  Synthetic
gtgcagggataattggcatgg

SEQ ID NO: 38603 - DNA, 22 bp, Artificial Sequence
  Synthetic
atccaaatgggtggactggaac

SEQ ID NO: 38604 - DNA, 20 bp, Artificial Sequence
  Synthetic
gcccgtttctcctggctcag

SEQ ID NO: 38605 - DNA, 25 bp, Artificial Sequence
  Synthetic
agttatgtcaacactaatatgggcc

SEQ ID NO: 38606 - DNA, 22 bp, Artificial Sequence
  Synthetic
ccagccttcagagcaaacaccg

SEQ ID NO: 38607 - DNA, 20 bp, Artificial Sequence
  Synthetic
agtacacatcggggagacag

SEQ ID NO: 38608 - DNA, 20 bp, Artificial Sequence
  Synthetic
cacaaattggcgggacaagg

SEQ ID NO: 38609 - DNA, 20 bp, Artificial Sequence
  Synthetic
ttaacggtcctgagtcggtt

SEQ ID NO: 38610 - DNA, 25 bp, Artificial Sequence
  Synthetic
taataaagcttctcccttttgcagc

SEQ ID NO: 38611 - DNA, 22 bp, Artificial Sequence
  Synthetic
aaaaggtgtttgctatgctgca

SEQ ID NO: 38612 - DNA, 20 bp, Artificial Sequence
  Synthetic
gagggcattggaaaggtgtc

SEQ ID NO: 38613 - DNA, 24 bp, Artificial Sequence
  Synthetic
ataccctggctctgtttaatgaac

SEQ ID NO: 38614 - DNA, 25 bp, Artificial Sequence
  Synthetic
tctgaatataaagcaaaggaagcca

SEQ ID NO: 38615 - DNA, 22 bp, Artificial Sequence
  Synthetic
caggctatagaccaattggagc

SEQ ID NO: 38616 - DNA, 25 bp, Artificial Sequence
  Synthetic
cagagagcacatttgtagatatccc

SEQ ID NO: 38617 - DNA, 23 bp, Artificial Sequence
  Synthetic
ggatagatcaggagtgcctttgg

SEQ ID NO: 38618 - DNA, 25 bp, Artificial Sequence
  Synthetic
aatctggttgcaattttactgactc

SEQ ID NO: 38619 - DNA, 21 bp, Artificial Sequence
  Synthetic
gcagaggaggagttttgtccg

SEQ ID NO: 38620 - DNA, 20 bp, Artificial Sequence
  Synthetic
aggaagtggaagaccagcca

SEQ ID NO: 38621 - DNA, 23 bp, Artificial Sequence
  Synthetic
aagtacacctgttaaacctggga

SEQ ID NO: 38622 - DNA, 25 bp, Artificial Sequence
  Synthetic
tgacattgcttatttaagtaggccg

SEQ ID NO: 38623 - DNA, 20 bp, Artificial Sequence
  Synthetic
ctgaggagcagcagacgatt

SEQ ID NO: 38624 - DNA, 23 bp, Artificial Sequence
  Synthetic
taaggtacccaatgtacttcggg

SEQ ID NO: 38625 - DNA, 21 bp, Artificial Sequence
  Synthetic
ctggcagatcgagccctgaga

SEQ ID NO: 38626 - DNA, 21 bp, Artificial Sequence
  Synthetic
actcggctgagtgaaggcagt

SEQ ID NO: 38627 - DNA, 22 bp, Artificial Sequence
  Synthetic
tgagcccccgaactctaaatgc

SEQ ID NO: 38628 - DNA, 24 bp, Artificial Sequence
  Synthetic
gcaaaagtgtgtcagaaagtacaa

SEQ ID NO: 38629 - DNA, 20 bp, Artificial Sequence
  Synthetic
ggctgctggaagtgtggcaa

SEQ ID NO: 38630 - DNA, 25 bp, Artificial Sequence
  Synthetic
accactacatgaagattttaggcag

SEQ ID NO: 38631 - DNA, 21 bp, Artificial Sequence
  Synthetic
agagatcagctgtggaaagga

SEQ ID NO: 38632 - DNA, 23 bp, Artificial Sequence
  Synthetic
catgatgaacaagggatgtcagc

SEQ ID NO: 38633 - DNA, 20 bp, Artificial Sequence
  Synthetic
aaaccctacaacgagccctc

SEQ ID NO: 38634 - DNA, 23 bp, Artificial Sequence
  Synthetic
tagcagggttcaagggaatacca

SEQ ID NO: 38635 - DNA, 25 bp, Artificial Sequence
  Synthetic
atgctatgaggtttagatactgtgc

SEQ ID NO: 38636 - DNA, 20 bp, Artificial Sequence
  Synthetic
cggtttggaggcagatggag

SEQ ID NO: 38637 - DNA, 22 bp, Artificial Sequence
  Synthetic
ggcctgtgaatcaacagtaacc

SEQ ID NO: 38638 - DNA, 21 bp, Artificial Sequence
  Synthetic
atatgacatggcaggagtggg

SEQ ID NO: 38639 - DNA, 21 bp, Artificial Sequence
  Synthetic
atgggtgcgagtggatccaag

SEQ ID NO: 38640 - DNA, 22 bp, Artificial Sequence
  Synthetic
ccagagaaagaatggaaggcaa

SEQ ID NO: 38641 - DNA, 20 bp, Artificial Sequence
  Synthetic
ggctccacgcttgcttgctt

SEQ ID NO: 38642 - DNA, 22 bp, Artificial Sequence
  Synthetic
tggttaaaactgccactcaagg

SEQ ID NO: 38643 - DNA, 23 bp, Artificial Sequence
  Synthetic
tattgcctcaaaaagtgtggtgc

SEQ ID NO: 38644 - DNA, 22 bp, Artificial Sequence
  Synthetic
ctggtttcttggaaggaggatg

SEQ ID NO: 38645 - DNA, 21 bp, Artificial Sequence
  Synthetic
gtcaggctaggcagatggtgc

SEQ ID NO: 38646 - DNA, 21 bp, Artificial Sequence
  Synthetic
cacgtatcactgacagaccgt

SEQ ID NO: 38647 - DNA, 25 bp, Artificial Sequence
  Synthetic
tccatattttttgggtcctgtttcc

SEQ ID NO: 38648 - DNA, 20 bp, Artificial Sequence
  Synthetic
tggattacagttgggtcgcc

SEQ ID NO: 38649 - DNA, 25 bp, Artificial Sequence
  Synthetic
agagacaacggaaaattttatctgc

SEQ ID NO: 38650 - DNA, 22 bp, Artificial Sequence
  Synthetic
gatgtcacagagagttgtccag

SEQ ID NO: 38651 - DNA, 25 bp, Artificial Sequence
  Synthetic
atatgccagacacatgtttacaagg

SEQ ID NO: 38652 - DNA, 22 bp, Artificial Sequence
  Synthetic
taatagacacacctggaggagg

SEQ ID NO: 38653 - DNA, 20 bp, Artificial Sequence
  Synthetic
gttggtcttcccgcccaaat

SEQ ID NO: 38654 - DNA, 24 bp, Artificial Sequence
  Synthetic
cgtcttcagggcattcaaattgac

SEQ ID NO: 38655 - DNA, 23 bp, Artificial Sequence
  Synthetic
gagtagttggcgacagtattcct

SEQ ID NO: 38656 - DNA, 22 bp, Artificial Sequence
  Synthetic
tagctcgagtgaaccattttgc

SEQ ID NO: 38657 - DNA, 21 bp, Artificial Sequence
  Synthetic
cattggcttcactcctggaaa

SEQ ID NO: 38658 - DNA, 22 bp, Artificial Sequence
  Synthetic
aaagcaaccagaaggatgatcc

SEQ ID NO: 38659 - DNA, 22 bp, Artificial Sequence
  Synthetic
aaggtgctgtttcaaaactggg

SEQ ID NO: 38660 - DNA, 22 bp, Artificial Sequence
  Synthetic
aactactaccatttgcagcagc

SEQ ID NO: 38661 - DNA, 23 bp, Artificial Sequence
  Synthetic
ttctaatcctcggcaaagaagac

SEQ ID NO: 38662 - DNA, 22 bp, Artificial Sequence
  Synthetic
cggaattgacaaggaagcaatg

SEQ ID NO: 38663 - DNA, 24 bp, Artificial Sequence
  Synthetic
ggaactgctgcagattacaaaagc

SEQ ID NO: 38664 - DNA, 22 bp, Artificial Sequence
  Synthetic
agctgagagagaatgctgaaga

SEQ ID NO: 38665 - DNA, 25 bp, Artificial Sequence
  Synthetic
ataccaattgtgcaaagattttggg

SEQ ID NO: 38666 - DNA, 24 bp, Artificial Sequence
  Synthetic
cggtcagttaaacttgttgtcagt

SEQ ID NO: 38667 - DNA, 25 bp, Artificial Sequence
  Synthetic
agaacttgcaagcaacattgttagg

SEQ ID NO: 38668 - DNA, 25 bp, Artificial Sequence
  Synthetic
aaagcaactgtcaggcaaaatatgt

SEQ ID NO: 38669 - DNA, 21 bp, Artificial Sequence
  Synthetic
gtttacgcatagaagcagcct

SEQ ID NO: 38670 - DNA, 21 bp, Artificial Sequence
  Synthetic
cgacagtctttgcagccacca

SEQ ID NO: 38671 - DNA, 23 bp, Artificial Sequence
  Synthetic
taatagaccccccatatcccttg

SEQ ID NO: 38672 - DNA, 24 bp, Artificial Sequence
  Synthetic
ataagggttgcatctactacgtcc

SEQ ID NO: 38673 - DNA, 23 bp, Artificial Sequence
  Synthetic
cctcctccacagctgtatctact

SEQ ID NO: 38674 - DNA, 22 bp, Artificial Sequence
  Synthetic
gcacagatgaatatgtgcaacg

SEQ ID NO: 38675 - DNA, 22 bp, Artificial Sequence
  Synthetic
cgccctctggtactttagaaga

SEQ ID NO: 38676 - DNA, 25 bp, Artificial Sequence
  Synthetic
tttacatacataacatacacgccct

SEQ ID NO: 38677 - DNA, 20 bp, Artificial Sequence
  Synthetic
gggatccgccattagtcctt

SEQ ID NO: 38678 - DNA, 23 bp, Artificial Sequence
  Synthetic
aatcagcaacacaaatgaggttg

SEQ ID NO: 38679 - DNA, 21 bp, Artificial Sequence
  Synthetic
cgcagagaacaagtgtatgct

SEQ ID NO: 38680 - DNA, 23 bp, Artificial Sequence
  Synthetic
tcttagatgactgggagttagca

SEQ ID NO: 38681 - DNA, 23 bp, Artificial Sequence
  Synthetic
catttttgaaaccccacagtgac

SEQ ID NO: 38682 - DNA, 23 bp, Artificial Sequence
  Synthetic
gttatcggtcgtttttatggctg

SEQ ID NO: 38683 - DNA, 22 bp, Artificial Sequence
  Synthetic
cagcagaagccatggaagtcgc

SEQ ID NO: 38684 - DNA, 25 bp, Artificial Sequence
  Synthetic
ttaaatacggtttgaaaagagggcc

SEQ ID NO: 38685 - DNA, 20 bp, Artificial Sequence
  Synthetic
cacgtgatgctgaagctcag

SEQ ID NO: 38686 - DNA, 25 bp, Artificial Sequence
  Synthetic
cattagagttgccaaaatcggaaat

SEQ ID NO: 38687 - DNA, 24 bp, Artificial Sequence
  Synthetic
aatgtcttccactagataggagca

SEQ ID NO: 38688 - DNA, 22 bp, Artificial Sequence
  Synthetic
catatcatgacgaaaggggcat

SEQ ID NO: 38689 - DNA, 21 bp, Artificial Sequence
  Synthetic
atgctggtaatgagctggaga

SEQ ID NO: 38690 - DNA, 20 bp, Artificial Sequence
  Synthetic
gccgggattattagccatgc

SEQ ID NO: 38691 - DNA, 20 bp, Artificial Sequence
  Synthetic
tgagtgtcccgggaaaacac

SEQ ID NO: 38692 - DNA, 20 bp, Artificial Sequence
  Synthetic
gtaaacgagctggccatcag

SEQ ID NO: 38693 - DNA, 25 bp, Artificial Sequence
  Synthetic
ggctatgtcaagatgttttgtaagg

SEQ ID NO: 38694 - DNA, 20 bp, Artificial Sequence
  Synthetic
gcaagtgctgtgtgtcctag

SEQ ID NO: 38695 - DNA, 20 bp, Artificial Sequence
  Synthetic
caggattgcatcgttggcat

SEQ ID NO: 38696 - DNA, 25 bp, Artificial Sequence
  Synthetic
aatagtgttactgatgagtgtcgtc

SEQ ID NO: 38697 - DNA, 20 bp, Artificial Sequence
  Synthetic
ttggacatcactgatgctgc

SEQ ID NO: 38698 - DNA, 21 bp, Artificial Sequence
  Synthetic
gctgtggtggtattttggcag

SEQ ID NO: 38699 - DNA, 21 bp, Artificial Sequence
  Synthetic
gttgccaagatgattgaacgc

SEQ ID NO: 38700 - DNA, 21 bp, Artificial Sequence
  Synthetic
acccaagccttacagggtaga

SEQ ID NO: 38701 - DNA, 20 bp, Artificial Sequence
  Synthetic
ttgaaccgtgtgctcagtct

SEQ ID NO: 38702 - DNA, 22 bp, Artificial Sequence
  Synthetic
gtgttttggctttgacaagtgg

SEQ ID NO: 38703 - DNA, 25 bp, Artificial Sequence
  Synthetic
tgcttggtactttcttgctatgttg

SEQ ID NO: 38704 - DNA, 23 bp, Artificial Sequence
  Synthetic
catctggctttgtggagaaatgt

SEQ ID NO: 38705 - DNA, 22 bp, Artificial Sequence
  Synthetic
atgctatgatggttgtgctcaa

SEQ ID NO: 38706 - DNA, 22 bp, Artificial Sequence
  Synthetic
acatggtggcttaaaggtgaaa

SEQ ID NO: 38707 - DNA, 22 bp, Artificial Sequence
  Synthetic
actgctcaagagttattgctgg

SEQ ID NO: 38708 - DNA, 22 bp, Artificial Sequence
  Synthetic
acaggaaggtgttttacgcatt

SEQ ID NO: 38709 - DNA, 25 bp, Artificial Sequence
  Synthetic
aagtgtacacgtattattcctgcac

SEQ ID NO: 38710 - DNA, 25 bp, Artificial Sequence
  Synthetic
aataaaggttcatttgttggtgctg

SEQ ID NO: 38711 - DNA, 25 bp, Artificial Sequence
  Synthetic
agaggatgtttgtacttgttacgat

SEQ ID NO: 38712 - DNA, 24 bp, Artificial Sequence
  Synthetic
aggaactgctgttcttaaaaggtg

SEQ ID NO: 38713 - DNA, 23 bp, Artificial Sequence
  Synthetic
cctaagacagttcgtgagtttgt

SEQ ID NO: 38714 - DNA, 20 bp, Artificial Sequence
  Synthetic
ttcaaacctcagagtggcgg

SEQ ID NO: 38715 - DNA, 25 bp, Artificial Sequence
  Synthetic
tttgtctataccttccaattggacc

SEQ ID NO: 38716 - DNA, 22 bp, Artificial Sequence
  Synthetic
cacaagtggtagtagagtggct

SEQ ID NO: 38717 - DNA, 25 bp, Artificial Sequence
  Synthetic
ttgactaagtacactgaagttcgtg

SEQ ID NO: 38718 - DNA, 21 bp, Artificial Sequence
  Synthetic
acgtattcctaccatggcaga

SEQ ID NO: 38719 - DNA, 21 bp, Artificial Sequence
  Synthetic
acattgcaacttgtgtctgct

SEQ ID NO: 38720 - DNA, 21 bp, Artificial Sequence
  Synthetic
ctggctctacaagacatggga

SEQ ID NO: 38721 - DNA, 25 bp, Artificial Sequence
  Synthetic
tgtaatagaacagtttatggcccca

SEQ ID NO: 38722 - DNA, 20 bp, Artificial Sequence
  Synthetic
gcagtgagctctcccatgag

SEQ ID NO: 38723 - DNA, 20 bp, Artificial Sequence
  Synthetic
ttgtcacccaagctgcattt

SEQ ID NO: 38724 - DNA, 20 bp, Artificial Sequence
  Synthetic
ttggaagtgcaggtgttgtg

SEQ ID NO: 38725 - DNA, 21 bp, Artificial Sequence
  Synthetic
accagtgcgtgatgaagtttc

SEQ ID NO: 38726 - DNA, 20 bp, Artificial Sequence
  Synthetic
ttcggacgtgcatagaccac

SEQ ID NO: 38727 - DNA, 22 bp, Artificial Sequence
  Synthetic
aataggcagcagctagaagagg

SEQ ID NO: 38728 - DNA, 22 bp, Artificial Sequence
  Synthetic
tgtgagtgcaacgcaaaatggg

SEQ ID NO: 38729 - DNA, 20 bp, Artificial Sequence
  Synthetic
gcaggaggcagacacctttg

SEQ ID NO: 38730 - DNA, 24 bp, Artificial Sequence
  Synthetic
aaagccatgccatatacaaagtgg

SEQ ID NO: 38731 - DNA, 21 bp, Artificial Sequence
  Synthetic
ggttacaagctgaggctaggg

SEQ ID NO: 38732 - DNA, 21 bp, Artificial Sequence
  Synthetic
ctttgggggcttgggtatagg

SEQ ID NO: 38733 - DNA, 20 bp, Artificial Sequence
  Synthetic
ctgccaccgatggtacagtt

SEQ ID NO: 38734 - DNA, 20 bp, Artificial Sequence
  Synthetic
agcattacctcctggtgctg

SEQ ID NO: 38735 - DNA, 20 bp, Artificial Sequence
  Synthetic
tttggaggcttcgagggttg

SEQ ID NO: 38736 - DNA, 25 bp, Artificial Sequence
  Synthetic
ggtttattgattctttggctacccg

SEQ ID NO: 38737 - DNA, 20 bp, Artificial Sequence
  Synthetic
tagaagccggccctccttcc

SEQ ID NO: 38738 - DNA, 18 bp, Artificial Sequence
  Synthetic
tttgcagagcaccccggc

SEQ ID NO: 38739 - DNA, 20 bp, Artificial Sequence
  Synthetic
gagacccgagtggcccggat

SEQ ID NO: 38740 - DNA, 21 bp, Artificial Sequence
  Synthetic
tccgtagaagggtcctcgtcc

SEQ ID NO: 38741 - DNA, 21 bp, Artificial Sequence
  Synthetic
cagagggggccaagaacccag

SEQ ID NO: 38742 - DNA, 22 bp, Artificial Sequence
  Synthetic
actctccactcccagtccatgt

SEQ ID NO: 38743 - DNA, 22 bp, Artificial Sequence
  Synthetic
aaagactcgtggtcggaatccg

SEQ ID NO: 38744 - DNA, 19 bp, Artificial Sequence
  Synthetic
tggcccgtccctcttgtcc

SEQ ID NO: 38745 - DNA, 19 bp, Artificial Sequence
  Synthetic
ttctcccgctgggcccagt

SEQ ID NO: 38746 - DNA, 22 bp, Artificial Sequence
  Synthetic
cccgaaatagggccttgccatc

SEQ ID NO: 38747 - DNA, 21 bp, Artificial Sequence
  Synthetic
tatccaaccggcagtggagga

SEQ ID NO: 38748 - DNA, 21 bp, Artificial Sequence
  Synthetic
gcagggatcgcagtctctccc

SEQ ID NO: 38749 - DNA, 20 bp, Artificial Sequence
  Synthetic
gacaaaggggggcactgagg

SEQ ID NO: 38750 - DNA, 20 bp, Artificial Sequence
  Synthetic
gtgcgggcccctgtagatgg

SEQ ID NO: 38751 - DNA, 22 bp, Artificial Sequence
  Synthetic
tatctccgttccagccctgtca

SEQ ID NO: 38752 - DNA, 19 bp, Artificial Sequence
  Synthetic
ggcacgaggtggtgggtct

SEQ ID NO: 38753 - DNA, 19 bp, Artificial Sequence
  Synthetic
accaccgcctcctcctcct

SEQ ID NO: 38754 - DNA, 21 bp, Artificial Sequence
  Synthetic
ccgccgtcgtgctgtatctca

SEQ ID NO: 38755 - DNA, 21 bp, Artificial Sequence
  Synthetic
acctgtttgaccccaaggacg

SEQ ID NO: 38756 - DNA, 21 bp, Artificial Sequence
  Synthetic
tttgaaggaggcctgcaacgc

SEQ ID NO: 38757 - DNA, 20 bp, Artificial Sequence
  Synthetic
agcaacaccgcactggagag

SEQ ID NO: 38758 - DNA, 20 bp, Artificial Sequence
  Synthetic
gacccaggcgacgagatcca

SEQ ID NO: 38759 - DNA, 22 bp, Artificial Sequence
  Synthetic
tgctcagccaggtaagtctccc

SEQ ID NO: 38760 - DNA, 20 bp, Artificial Sequence
  Synthetic
atggacgcagcgtggagttg

SEQ ID NO: 38761 - DNA, 21 bp, Artificial Sequence
  Synthetic
gttgtggtcttcatcgggcgc

SEQ ID NO: 38762 - DNA, 21 bp, Artificial Sequence
  Synthetic
gcaatctcggctgtttgtact

SEQ ID NO: 38763 - DNA, 21 bp, Artificial Sequence
  Synthetic
gtgaccgtctggctcgtttgc

SEQ ID NO: 38764 - DNA, 22 bp, Artificial Sequence
  Synthetic
tttgtcaatccatggcaggccc

SEQ ID NO: 38765 - DNA, 22 bp, Artificial Sequence
  Synthetic
acgctaggatgtgatgagggca

SEQ ID NO: 38766 - DNA, 19 bp, Artificial Sequence
  Synthetic
gccaccggaaacagctgcc

SEQ ID NO: 38767 - DNA, 21 bp, Artificial Sequence
  Synthetic
cctcaggggccaagcaaaacc

SEQ ID NO: 38768 - DNA, 22 bp, Artificial Sequence
  Synthetic
gccagagactcccgagtagagc

SEQ ID NO: 38769 - DNA, 22 bp, Artificial Sequence
  Synthetic
aaaggcgctatagacggttggg

SEQ ID NO: 38770 - DNA, 20 bp, Artificial Sequence
  Synthetic
acggtgaccttcgacagccc

SEQ ID NO: 38771 - DNA, 21 bp, Artificial Sequence
  Synthetic
tgcaaaaagtaagcctgcgcg

SEQ ID NO: 38772 - DNA, 22 bp, Artificial Sequence
  Synthetic
tacgtcctcgtgagtctgctgg

SEQ ID NO: 38773 - DNA, 21 bp, Artificial Sequence
  Synthetic
gctttggcagaccacctgtgc

SEQ ID NO: 38774 - DNA, 19 bp, Artificial Sequence
  Synthetic
accgccacgggaatctcca

SEQ ID NO: 38775 - DNA, 19 bp, Artificial Sequence
  Synthetic
cgcagtgacgctcttcgca

SEQ ID NO: 38776 - DNA, 19 bp, Artificial Sequence
  Synthetic
ggagctctgccgggttgac

SEQ ID NO: 38777 - DNA, 20 bp, Artificial Sequence
  Synthetic
ctgggaccgtttggacaccc

SEQ ID NO: 38778 - DNA, 19 bp, Artificial Sequence
  Synthetic
ccactcttgcctcggcgct

SEQ ID NO: 38779 - DNA, 19 bp, Artificial Sequence
  Synthetic
cgatgccaccccctatgcc

SEQ ID NO: 38780 - DNA, 20 bp, Artificial Sequence
  Synthetic
ttccatgacagtcccgttgg

SEQ ID NO: 38781 - DNA, 19 bp, Artificial Sequence
  Synthetic
ggggccatgctcagcagct

SEQ ID NO: 38782 - DNA, 21 bp, Artificial Sequence
  Synthetic
ccctgggtagtcacgttcagc

SEQ ID NO: 38783 - DNA, 21 bp, Artificial Sequence
  Synthetic
ggctaacctcagcgcgtactc

SEQ ID NO: 38784 - DNA, 21 bp, Artificial Sequence
  Synthetic
tactaaactcgcgcccatggg

SEQ ID NO: 38785 - DNA, 19 bp, Artificial Sequence
  Synthetic
ggtgggacaggtgtgccca

SEQ ID NO: 38786 - DNA, 21 bp, Artificial Sequence
  Synthetic
tcaagagccagctccctctga

SEQ ID NO: 38787 - DNA, 21 bp, Artificial Sequence
  Synthetic
gggtcactggcttatgcgtgg

SEQ ID NO: 38788 - DNA, 20 bp, Artificial Sequence
  Synthetic
actcgtcctggctggtgacg

SEQ ID NO: 38789 - DNA, 20 bp, Artificial Sequence
  Synthetic
gaatcttcgccagccccccg

SEQ ID NO: 38790 - DNA, 22 bp, Artificial Sequence
  Synthetic
gttgaaaagcagagctccccca

SEQ ID NO: 38791 - DNA, 19 bp, Artificial Sequence
  Synthetic
caaacaggctccgggtggt

SEQ ID NO: 38792 - DNA, 19 bp, Artificial Sequence
  Synthetic
gtcctttggcgcggatcct

SEQ ID NO: 38793 - DNA, 19 bp, Artificial Sequence
  Synthetic
gatgaggccggtgatgcgg

SEQ ID NO: 38794 - DNA, 21 bp, Artificial Sequence
  Synthetic
cagggtctcgctctgttgcgc

SEQ ID NO: 38795 - DNA, 19 bp, Artificial Sequence
  Synthetic
tgtagaggcgcgggtctgg

SEQ ID NO: 38796 - DNA, 19 bp, Artificial Sequence
  Synthetic
cgagacagccgctccagca

SEQ ID NO: 38797 - DNA, 18 bp, Artificial Sequence
  Synthetic
gtcggcaaacaggggcca

SEQ ID NO: 38798 - DNA, 19 bp, Artificial Sequence
  Synthetic
ggctggcaaaggcaggtct

SEQ ID NO: 38799 - DNA, 19 bp, Artificial Sequence
  Synthetic
gctaagggtcggcgggtga

SEQ ID NO: 38800 - DNA, 25 bp, Artificial Sequence
  Synthetic
tttgcaatgtgtattttgtaagcgt

SEQ ID NO: 38801 - DNA, 23 bp, Artificial Sequence
  Synthetic
gatagtgaggctgaagaagagga

SEQ ID NO: 38802 - DNA, 21 bp, Artificial Sequence
  Synthetic
aggatgaatcaggccgatctg

SEQ ID NO: 38803 - DNA, 20 bp, Artificial Sequence
  Synthetic
tcgctctccaccatctcttc

SEQ ID NO: 38804 - DNA, 22 bp, Artificial Sequence
  Synthetic
tactaactagagcccgccattt

SEQ ID NO: 38805 - DNA, 21 bp, Artificial Sequence
  Synthetic
gtcagtacaacgatcgccttt

SEQ ID NO: 38806 - DNA, 22 bp, Artificial Sequence
  Synthetic
agtgctcgagaagaatgtgaca

SEQ ID NO: 38807 - DNA, 20 bp, Artificial Sequence
  Synthetic
gtccggcatcatcacctcaa

SEQ ID NO: 38808 - DNA, 21 bp, Artificial Sequence
  Synthetic
cagttcactggtgcttttggt

SEQ ID NO: 38809 - DNA, 25 bp, Artificial Sequence
  Synthetic
cgtctgcacagttagaatttacaca

SEQ ID NO: 38810 - DNA, 22 bp, Artificial Sequence
  Synthetic
ccagcaagagagtgaggaaagc

SEQ ID NO: 38811 - DNA, 22 bp, Artificial Sequence
  Synthetic
atatgcaaagctggctgaaaca

SEQ ID NO: 38812 - DNA, 23 bp, Artificial Sequence
  Synthetic
tctgagtgatcaagaagacgagg

SEQ ID NO: 38813 - DNA, 23 bp, Artificial Sequence
  Synthetic
gctaccagtgaacagaaagctaa

SEQ ID NO: 38814 - DNA, 19 bp, Artificial Sequence
  Synthetic
cccacgaccaggtcccagt

SEQ ID NO: 38815 - DNA, 20 bp, Artificial Sequence
  Synthetic
ctgacccaagccctcctatg

SEQ ID NO: 38816 - DNA, 21 bp, Artificial Sequence
  Synthetic
tcgggttagtagactaggccg

SEQ ID NO: 38817 - DNA, 22 bp, Artificial Sequence
  Synthetic
actcggtggactcgttatttgg

SEQ ID NO: 38818 - DNA, 22 bp, Artificial Sequence
  Synthetic
ggaacaaaaccaaaatcacggc

SEQ ID NO: 38819 - DNA, 20 bp, Artificial Sequence
  Synthetic
tttgagcaagtttggggcct

SEQ ID NO: 38820 - DNA, 20 bp, Artificial Sequence
  Synthetic
aagggttgattcgtgctgtc

SEQ ID NO: 38821 - DNA, 20 bp, Artificial Sequence
  Synthetic
gctcatgataagcggcagtc

SEQ ID NO: 38822 - DNA, 21 bp, Artificial Sequence
  Synthetic
gagcgtctctcttatctggga

SEQ ID NO: 38823 - DNA, 20 bp, Artificial Sequence
  Synthetic
atttctttggtatgcggggc

SEQ ID NO: 38824 - DNA, 24 bp, Artificial Sequence
  Synthetic
ttatcaacgtaggagttgggaagc

SEQ ID NO: 38825 - DNA, 22 bp, Artificial Sequence
  Synthetic
aacgcttccaagacaagagatc

SEQ ID NO: 38826 - DNA, 22 bp, Artificial Sequence
  Synthetic
gccattgcctcatcgatactgt

SEQ ID NO: 38827 - DNA, 21 bp, Artificial Sequence
  Synthetic
catttgcacacctacccagag

SEQ ID NO: 38828 - DNA, 20 bp, Artificial Sequence
  Synthetic
ctagctgccctcttggatgc

SEQ ID NO: 38829 - DNA, 22 bp, Artificial Sequence
  Synthetic
cattcggaaaaatcactcccca

SEQ ID NO: 38830 - DNA, 22 bp, Artificial Sequence
  Synthetic
acactttgattctgcctgttcc

SEQ ID NO: 38831 - DNA, 20 bp, Artificial Sequence
  Synthetic
cgactacggtgactacagct

SEQ ID NO: 38832 - DNA, 22 bp, Artificial Sequence
  Synthetic
agcccacaaccaaatacacatt

SEQ ID NO: 38833 - DNA, 22 bp, Artificial Sequence
  Synthetic
ttttacgcacaatgaacccaga

SEQ ID NO: 38834 - DNA, 20 bp, Artificial Sequence
  Synthetic
tttccctctgccctgatgtt

SEQ ID NO: 38835 - DNA, 25 bp, Artificial Sequence
  Synthetic
aatctcagaaatgctagaaagcctt

SEQ ID NO: 38836 - DNA, 20 bp, Artificial Sequence
  Synthetic
tttctgagcctccacgcatt

SEQ ID NO: 38837 - DNA, 25 bp, Artificial Sequence
  Synthetic
aactcttctatttcagaatcagcca

SEQ ID NO: 38838 - DNA, 22 bp, Artificial Sequence
  Synthetic
aaagataaaggcccctcacaac

SEQ ID NO: 38839 - DNA, 22 bp, Artificial Sequence
  Synthetic
gcctgagtcaataagacaccca

SEQ ID NO: 38840 - DNA, 22 bp, Artificial Sequence
  Synthetic
ggaactccaggagctagtatcg

SEQ ID NO: 38841 - DNA, 22 bp, Artificial Sequence
  Synthetic
cgcatcaatgccatcaaaagca

SEQ ID NO: 38842 - DNA, 23 bp, Artificial Sequence
  Synthetic
actgagctgcaactaataaacga

SEQ ID NO: 38843 - DNA, 24 bp, Artificial Sequence
  Synthetic
tccttttccatgacttgtttcaca

SEQ ID NO: 38844 - DNA, 21 bp, Artificial Sequence
  Synthetic
cacagtctatcgagtggacgt

SEQ ID NO: 38845 - DNA, 20 bp, Artificial Sequence
  Synthetic
tcatgcagtgcttgggctag

SEQ ID NO: 38846 - DNA, 21 bp, Artificial Sequence
  Synthetic
cttagatcacaacgcgatggt

SEQ ID NO: 38847 - DNA, 20 bp, Artificial Sequence
  Synthetic
agcccgtttatgctgttcag

SEQ ID NO: 38848 - DNA, 22 bp, Artificial Sequence
  Synthetic
tggctcaatttccaagcaaacg

SEQ ID NO: 38849 - DNA, 21 bp, Artificial Sequence
  Synthetic
aaccggagcaacctctttacg

SEQ ID NO: 38850 - DNA, 20 bp, Artificial Sequence
  Synthetic
ctcccacagaagggtagggt

SEQ ID NO: 38851 - DNA, 22 bp, Artificial Sequence
  Synthetic
tccatcattgcttggatgttgc

SEQ ID NO: 38852 - DNA, 23 bp, Artificial Sequence
  Synthetic
aagtaggaagatttgaactcgcc

SEQ ID NO: 38853 - DNA, 25 bp, Artificial Sequence
  Synthetic
atccgtgtcaataaatttgcgattg

SEQ ID NO: 38854 - DNA, 21 bp, Artificial Sequence
  Synthetic
atcctctttccagagtctgca

SEQ ID NO: 38855 - DNA, 22 bp, Artificial Sequence
  Synthetic
gccttcatctgagaaaagctga

SEQ ID NO: 38856 - DNA, 24 bp, Artificial Sequence
  Synthetic
actttcagggattaactctggaac

SEQ ID NO: 38857 - DNA, 22 bp, Artificial Sequence
  Synthetic
gcaaacgtcctagttgctatgc

SEQ ID NO: 38858 - DNA, 25 bp, Artificial Sequence
  Synthetic
acatatcatcgaacaaatcattcgc

SEQ ID NO: 38859 - DNA, 20 bp, Artificial Sequence
  Synthetic
ttgccaatgccgttctcatc

SEQ ID NO: 38860 - DNA, 22 bp, Artificial Sequence
  Synthetic
ctatgggattcggatacaacgc

SEQ ID NO: 38861 - DNA, 21 bp, Artificial Sequence
  Synthetic
ccgcaagacaaccattcaact

SEQ ID NO: 38862 - DNA, 23 bp, Artificial Sequence
  Synthetic
agctcatgacgatccataacagt

SEQ ID NO: 38863 - DNA, 21 bp, Artificial Sequence
  Synthetic
gtgcaatctgaccaacaagcc

SEQ ID NO: 38864 - DNA, 21 bp, Artificial Sequence
  Synthetic
acgtaaacctattgcacgcac

SEQ ID NO: 38865 - DNA, 22 bp, Artificial Sequence
  Synthetic
aatagccccatcgtcataacca

SEQ ID NO: 38866 - DNA, 21 bp, Artificial Sequence
  Synthetic
gcgataggctttcctgaaggg

SEQ ID NO: 38867 - DNA, 20 bp, Artificial Sequence
  Synthetic
ccacgttcatcaactcgtgc

SEQ ID NO: 38868 - DNA, 25 bp, Artificial Sequence
  Synthetic
agatttctatgccttttctggtcat

SEQ ID NO: 38869 - DNA, 21 bp, Artificial Sequence
  Synthetic
tctcgaggaggatttcaaggg

SEQ ID NO: 38870 - DNA, 21 bp, Artificial Sequence
  Synthetic
ggggagagcagcaggttttac

SEQ ID NO: 38871 - DNA, 20 bp, Artificial Sequence
  Synthetic
gaggttccgaggtgaagtct

SEQ ID NO: 38872 - DNA, 21 bp, Artificial Sequence
  Synthetic
tttttggcatcagcaggagtt

SEQ ID NO: 38873 - DNA, 22 bp, Artificial Sequence
  Synthetic
tttttgctccacccaatccttg

SEQ ID NO: 38874 - DNA, 22 bp, Artificial Sequence
  Synthetic
tcatcaaggtggccattcttac

SEQ ID NO: 38875 - DNA, 22 bp, Artificial Sequence
  Synthetic
tgatctcttgaatggcagacgt

SEQ ID NO: 38876 - DNA, 21 bp, Artificial Sequence
  Synthetic
ggtggagcaagccttcttaaa

SEQ ID NO: 38877 - DNA, 20 bp, Artificial Sequence
  Synthetic
agggaaacggcagcaaatcc

SEQ ID NO: 38878 - DNA, 20 bp, Artificial Sequence
  Synthetic
ttgcgccgataataaacggg

SEQ ID NO: 38879 - DNA, 21 bp, Artificial Sequence
  Synthetic
ttttcttgattcctgggcctg

SEQ ID NO: 38880 - DNA, 24 bp, Artificial Sequence
  Synthetic
agaaacacgatgattgtagcaact

SEQ ID NO: 38881 - DNA, 21 bp, Artificial Sequence
  Synthetic
aatcagaggctgcaagtacca

SEQ ID NO: 38882 - DNA, 23 bp, Artificial Sequence
  Synthetic
acagaacgatatgaaaacgcgtt

SEQ ID NO: 38883 - DNA, 24 bp, Artificial Sequence
  Synthetic
ttacggatctaactttgttggagg

SEQ ID NO: 38884 - DNA, 20 bp, Artificial Sequence
  Synthetic
cagcagaaaaagcagggctg

SEQ ID NO: 38885 - DNA, 24 bp, Artificial Sequence
  Synthetic
tttgcctgaagatctggaaagttc

SEQ ID NO: 38886 - DNA, 21 bp, Artificial Sequence
  Synthetic
catcgcgatcatttcaaacgc

SEQ ID NO: 38887 - DNA, 20 bp, Artificial Sequence
  Synthetic
tagatcaggctggttcgctc

SEQ ID NO: 38888 - DNA, 20 bp, Artificial Sequence
  Synthetic
agaattgtttggggggctcc

SEQ ID NO: 38889 - DNA, 20 bp, Artificial Sequence
  Synthetic
gcgaagatcccccagcttta

SEQ ID NO: 38890 - DNA, 21 bp, Artificial Sequence
  Synthetic
ccaggatcttcgatcatgcct

SEQ ID NO: 38891 - DNA, 20 bp, Artificial Sequence
  Synthetic
taaacagtccgtcttcgcca

SEQ ID NO: 38892 - DNA, 25 bp, Artificial Sequence
  Synthetic
aaacacaggctattgttatccttga

SEQ ID NO: 38893 - DNA, 23 bp, Artificial Sequence
  Synthetic
actcccatttctatccaagggat

SEQ ID NO: 38894 - DNA, 20 bp, Artificial Sequence
  Synthetic
gggttgacgcgaatacaagg

SEQ ID NO: 38895 - DNA, 22 bp, Artificial Sequence
  Synthetic
aaaaagctctcggttgctaact

SEQ ID NO: 38896 - DNA, 20 bp, Artificial Sequence
  Synthetic
ggcgctcttattgtcgagga

SEQ ID NO: 38897 - DNA, 21 bp, Artificial Sequence
  Synthetic
tcttcttctatgcctggtgct

SEQ ID NO: 38898 - DNA, 20 bp, Artificial Sequence
  Synthetic
taccagcatggagagcgtgt

SEQ ID NO: 38899 - DNA, 20 bp, Artificial Sequence
  Synthetic
agctgggctgactcacatga

SEQ ID NO: 38900 - DNA, 22 bp, Artificial Sequence
  Synthetic
cactaatcaacagagggcctct

SEQ ID NO: 38901 - DNA, 23 bp, Artificial Sequence
  Synthetic
cattcatatcatgctcccccttg

SEQ ID NO: 38902 - DNA, 25 bp, Artificial Sequence
  Synthetic
atgagggaagaatatcgaaaggaac

SEQ ID NO: 38903 - DNA, 25 bp, Artificial Sequence
  Synthetic
ccacggaagaaaaaagaatgtttga

SEQ ID NO: 38904 - DNA, 21 bp, Artificial Sequence
  Synthetic
agacaccccaacaatgcaatg

SEQ ID NO: 38905 - DNA, 21 bp, Artificial Sequence
  Synthetic
tatcacaatcagggtgggtga

SEQ ID NO: 38906 - DNA, 20 bp, Artificial Sequence
  Synthetic
agcagcttgggcttagcaat

SEQ ID NO: 38907 - DNA, 22 bp, Artificial Sequence
  Synthetic
tacaacaggatgggaacagtga

SEQ ID NO: 38908 - DNA, 23 bp, Artificial Sequence
  Synthetic
gtcagaaaatcaggaggaggagc

SEQ ID NO: 38909 - DNA, 20 bp, Artificial Sequence
  Synthetic
ggacagcggacttgagcttt

SEQ ID NO: 38910 - DNA, 25 bp, Artificial Sequence
  Synthetic
taacaacgaaattttgtttgctcct

SEQ ID NO: 38911 - DNA, 21 bp, Artificial Sequence
  Synthetic
aggagatcacgatcgcggtca

SEQ ID NO: 38912 - DNA, 25 bp, Artificial Sequence
  Synthetic
taaggtatacttacccccttcaaca

SEQ ID NO: 38913 - DNA, 23 bp, Artificial Sequence
  Synthetic
cttaccatgtgctgaaaagcaac

SEQ ID NO: 38914 - DNA, 20 bp, Artificial Sequence
  Synthetic
atatgtttgtgcgcggtggt

SEQ ID NO: 38915 - DNA, 21 bp, Artificial Sequence
  Synthetic
acgtgttgtatcctaggcagt

SEQ ID NO: 38916 - DNA, 23 bp, Artificial Sequence
  Synthetic
ggtgctacttcaagatgctttgc

SEQ ID NO: 38917 - DNA, 20 bp, Artificial Sequence
  Synthetic
tgcaccacttgtggtcatgt

SEQ ID NO: 38918 - DNA, 24 bp, Artificial Sequence
  Synthetic
cagatgtgtggcataaacaattgc

SEQ ID NO: 38919 - DNA, 23 bp, Artificial Sequence
  Synthetic
tgatgatcatgttggactcttgg

SEQ ID NO: 38920 - DNA, 21 bp, Artificial Sequence
  Synthetic
gccttgtgttgctagtgaaca

SEQ ID NO: 38921 - DNA, 23 bp, Artificial Sequence
  Synthetic
ggtggttatgttgctgattttgc

SEQ ID NO: 38922 - DNA, 20 bp, Artificial Sequence
  Synthetic
ctgatgcgagaacacagggt

SEQ ID NO: 38923 - DNA, 24 bp, Artificial Sequence
  Synthetic
taatgtcacgaagcataagtgtga

SEQ ID NO: 38924 - DNA, 22 bp, Artificial Sequence
  Synthetic
atggcttgaatttcgttctggc

SEQ ID NO: 38925 - DNA, 25 bp, Artificial Sequence
  Synthetic
tgccaaagaaaccaaagaaatcaac

SEQ ID NO: 38926 - DNA, 22 bp, Artificial Sequence
  Synthetic
ctttctgctgatggagtgcagt

SEQ ID NO: 38927 - DNA, 23 bp, Artificial Sequence
  Synthetic
gtgtctttggaaacactgttggc

SEQ ID NO: 38928 - DNA, 25 bp, Artificial Sequence
  Synthetic
tgctgtgaatgtcttgtatttcaca

SEQ ID NO: 38929 - DNA, 23 bp, Artificial Sequence
  Synthetic
cgtcttgcttaattgcttgcaac

SEQ ID NO: 38930 - DNA, 25 bp, Artificial Sequence
  Synthetic
cgttttagtggttctgctaatcaac

SEQ ID NO: 38931 - DNA, 22 bp, Artificial Sequence
  Synthetic
ccaggatgtggtgttgctatag

SEQ ID NO: 38932 - DNA, 25 bp, Artificial Sequence
  Synthetic
accttccatatcctaatcctagtcg

SEQ ID NO: 38933 - DNA, 21 bp, Artificial Sequence
  Synthetic
cgtggtctgctcttctcaaac

SEQ ID NO: 38934 - DNA, 20 bp, Artificial Sequence
  Synthetic
gcaaaaggcaaccgaggaag

SEQ ID NO: 38935 - DNA, 25 bp, Artificial Sequence
  Synthetic
gagatggttacagctttaaaaaggc

SEQ ID NO: 38936 - DNA, 24 bp, Artificial Sequence
  Synthetic
agaactggttactatggttgttgg

SEQ ID NO: 38937 - DNA, 25 bp, Artificial Sequence
  Synthetic
ttatgtacctttgaaatctgccacg

SEQ ID NO: 38938 - DNA, 22 bp, Artificial Sequence
  Synthetic
gttgaattatttgccaagcgca

SEQ ID NO: 38939 - DNA, 21 bp, Artificial Sequence
  Synthetic
accgcgtgctgaattaaatgg

SEQ ID NO: 38940 - DNA, 25 bp, Artificial Sequence
  Synthetic
gaattatgggaagccagttactttg

SEQ ID NO: 38941 - DNA, 25 bp, Artificial Sequence
  Synthetic
aaaagtgttgatgtcgctattcaag

SEQ ID NO: 38942 - DNA, 22 bp, Artificial Sequence
  Synthetic
tcggtgctgaaaagaaagatgg

SEQ ID NO: 38943 - DNA, 20 bp, Artificial Sequence
  Synthetic
ttgttgattcgcggtggaac

SEQ ID NO: 38944 - DNA, 25 bp, Artificial Sequence
  Synthetic
ttgccagtataatatgtgcgagtac

SEQ ID NO: 38945 - DNA, 25 bp, Artificial Sequence
  Synthetic
tttactcgctttcaatcaagatggt

SEQ ID NO: 38946 - DNA, 25 bp, Artificial Sequence
  Synthetic
gatgtagtttatgcacaacactgtt

SEQ ID NO: 38947 - DNA, 20 bp, Artificial Sequence
  Synthetic
tgtacttgccgaccacaagc

SEQ ID NO: 38948 - DNA, 24 bp, Artificial Sequence
  Synthetic
ctgctctcagaaaatcagatcagt

SEQ ID NO: 38949 - DNA, 24 bp, Artificial Sequence
  Synthetic
gccgtaatcaaggtagattttgtg

SEQ ID NO: 38950 - DNA, 21 bp, Artificial Sequence
  Synthetic
tcacaataatacgcggccatc

SEQ ID NO: 38951 - DNA, 22 bp, Artificial Sequence
  Synthetic
tggaaatcgttctggtaatggc

SEQ ID NO: 38952 - DNA, 22 bp, Artificial Sequence
  Synthetic
gctgacattgtcgatcgggacc

SEQ ID NO: 38953 - DNA, 25 bp, Artificial Sequence
  Synthetic
tctctatcagaatggatgtcttgct

SEQ ID NO: 38954 - DNA, 20 bp, Artificial Sequence
  Synthetic
atggaccaggcaatcatgga

SEQ ID NO: 38955 - DNA, 22 bp, Artificial Sequence
  Synthetic
ccctaagaggaagaggcagcac

SEQ ID NO: 38956 - DNA, 21 bp, Artificial Sequence
  Synthetic
gcattagaatggaccaggcag

SEQ ID NO: 38957 - DNA, 21 bp, Artificial Sequence
  Synthetic
gtctgcggaaccggtgagtac

SEQ ID NO: 38958 - DNA, 19 bp, Artificial Sequence
  Synthetic
gaggcgtcgcaagagccct

SEQ ID NO: 38959 - DNA, 21 bp, Artificial Sequence
  Synthetic
gttcgacataatggccggggc

SEQ ID NO: 38960 - DNA, 22 bp, Artificial Sequence
  Synthetic
agaccttgtgacattgtcccgg

SEQ ID NO: 38961 - DNA, 21 bp, Artificial Sequence
  Synthetic
ggtgctcgtggatgaactcca

SEQ ID NO: 38962 - DNA, 22 bp, Artificial Sequence
  Synthetic
tatcggctggtacctggtagct

SEQ ID NO: 38963 - DNA, 20 bp, Artificial Sequence
  Synthetic
gatacagcggcttgcggaga

SEQ ID NO: 38964 - DNA, 20 bp, Artificial Sequence
  Synthetic
ccaaacatcccgcgctccaa

SEQ ID NO: 38965 - DNA, 22 bp, Artificial Sequence
  Synthetic
gctgtgtgcaccagaggtgtag

SEQ ID NO: 38966 - DNA, 22 bp, Artificial Sequence
  Synthetic
agatgtggaagtgtctcgtgcg

SEQ ID NO: 38967 - DNA, 19 bp, Artificial Sequence
  Synthetic
cccatttggcagggcccca

SEQ ID NO: 38968 - DNA, 22 bp, Artificial Sequence
  Synthetic
agtggatgaacaggctcatcgc

SEQ ID NO: 38969 - DNA, 20 bp, Artificial Sequence
  Synthetic
ggggggacggtgtgatgtca

SEQ ID NO: 38970 - DNA, 22 bp, Artificial Sequence
  Synthetic
ggatggagtgagacttcaccgc

SEQ ID NO: 38971 - DNA, 22 bp, Artificial Sequence
  Synthetic
gaacgaggtgttttgcgtggac

SEQ ID NO: 38972 - DNA, 21 bp, Artificial Sequence
  Synthetic
ctgcggaggccctatgttcaa

SEQ ID NO: 38973 - DNA, 22 bp, Artificial Sequence
  Synthetic
gaccaggtattctgctccaccc

SEQ ID NO: 38974 - DNA, 22 bp, Artificial Sequence
  Synthetic
ggagaagaacccagcacttagg

SEQ ID NO: 38975 - DNA, 21 bp, Artificial Sequence
  Synthetic
cagcacacagattggtggaat

SEQ ID NO: 38976 - DNA, 22 bp, Artificial Sequence
  Synthetic
gaagagcaacagccatactcag

SEQ ID NO: 38977 - DNA, 25 bp, Artificial Sequence
  Synthetic
aacttactcatcgtcaatgatgtgg

SEQ ID NO: 38978 - DNA, 25 bp, Artificial Sequence
  Synthetic
taataaaacttcttcccttcgcagc

SEQ ID NO: 38979 - DNA, 21 bp, Artificial Sequence
  Synthetic
acacagtggcaggtccttccg

SEQ ID NO: 38980 - DNA, 21 bp, Artificial Sequence
  Synthetic
caaggccttctccggatctgc

SEQ ID NO: 38981 - DNA, 20 bp, Artificial Sequence
  Synthetic
gctcctcaaggttcccgctc

SEQ ID NO: 38982 - DNA, 20 bp, Artificial Sequence
  Synthetic
agcagtgccccagagcttcc

SEQ ID NO: 38983 - DNA, 22 bp, Artificial Sequence
  Synthetic
ggatgccacatccatcttgggc

SEQ ID NO: 38984 - DNA, 20 bp, Artificial Sequence
  Synthetic
cgaccagcggcgatgttgtc

SEQ ID NO: 38985 - DNA, 21 bp, Artificial Sequence
  Synthetic
tgcttggtatgagctcacgcc

SEQ ID NO: 38986 - DNA, 20 bp, Artificial Sequence
  Synthetic
ctccacggaggacctggtca

SEQ ID NO: 38987 - DNA, 19 bp, Artificial Sequence
  Synthetic
agctcctgaggcgactgca

SEQ ID NO: 38988 - DNA, 20 bp, Artificial Sequence
  Synthetic
tacaccacgggcccctgtac

SEQ ID NO: 38989 - DNA, 20 bp, Artificial Sequence
  Synthetic
gccgtgttgacgtccatgct

SEQ ID NO: 38990 - DNA, 19 bp, Artificial Sequence
  Synthetic
ggagcctggggatccggat

SEQ ID NO: 38991 - DNA, 22 bp, Artificial Sequence
  Synthetic
atccaagtttggctatggggca

SEQ ID NO: 38992 - DNA, 19 bp, Artificial Sequence
  Synthetic
cctggccgtgatgggaagc

SEQ ID NO: 38993 - DNA, 25 bp, Artificial Sequence
  Synthetic
agaaattgtggaatacctttggagg

SEQ ID NO: 38994 - DNA, 23 bp, Artificial Sequence
  Synthetic
agggaagaaaaagacagacatcg

SEQ ID NO: 38995 - DNA, 25 bp, Artificial Sequence
  Synthetic
tgtacaaagtgtagtttaccactgc

SEQ ID NO: 38996 - DNA, 20 bp, Artificial Sequence
  Synthetic
tcggctgtttgagctaccgg

SEQ ID NO: 38997 - DNA, 20 bp, Artificial Sequence
  Synthetic
gtacggtacaaacgtgccaa

SEQ ID NO: 38998 - DNA, 21 bp, Artificial Sequence
  Synthetic
gatcctgaagacgaggaggag

SEQ ID NO: 38999 - DNA, 22 bp, Artificial Sequence
  Synthetic
tgtgtatatggggaaacaggca

SEQ ID NO: 39000 - DNA, 20 bp, Artificial Sequence
  Synthetic
gaacgagcgggtggacaagt

SEQ ID NO: 39001 - DNA, 20 bp, Artificial Sequence
  Synthetic
acacctgccagtgagaatgt

SEQ ID NO: 39002 - DNA, 25 bp, Artificial Sequence
  Synthetic
tttactattatgcaggcacttcacg

SEQ ID NO: 39003 - DNA, 20 bp, Artificial Sequence
  Synthetic
taactttgccaccgtccact

SEQ ID NO: 39004 - DNA, 21 bp, Artificial Sequence
  Synthetic
cgatttcggtacaagatggcc

SEQ ID NO: 39005 - DNA, 22 bp, Artificial Sequence
  Synthetic
ctggcactgtacaacaaacagg

SEQ ID NO: 39006 - DNA, 22 bp, Artificial Sequence
  Synthetic
gatcccagagatcccagaccga

SEQ ID NO: 39007 - DNA, 25 bp, Artificial Sequence
  Synthetic
tagaacctgctaacgcaatagaagt

SEQ ID NO: 39008 - DNA, 21 bp, Artificial Sequence
  Synthetic
tggtgtatcgtttcctgtgca

SEQ ID NO: 39009 - DNA, 21 bp, Artificial Sequence
  Synthetic
cacttggggccgaataacctt

SEQ ID NO: 39010 - DNA, 23 bp, Artificial Sequence
  Synthetic
tgcttgagagagaactagttgcc

SEQ ID NO: 39011 - DNA, 25 bp, Artificial Sequence
  Synthetic
ctgaacctttaaaatcatgtctggc

SEQ ID NO: 39012 - DNA, 24 bp, Artificial Sequence
  Synthetic
accaaagaactggtacaaaacact

SEQ ID NO: 39013 - DNA, 20 bp, Artificial Sequence
  Synthetic
ccagtgacgtgttggttgtc

SEQ ID NO: 39014 - DNA, 24 bp, Artificial Sequence
  Synthetic
tggtgttattcctgaaaatcctgt

SEQ ID NO: 39015 - DNA, 23 bp, Artificial Sequence
  Synthetic
tgctgattttgcttgcaagtttg

SEQ ID NO: 39016 - DNA, 25 bp, Artificial Sequence
  Synthetic
gttttccatgtgcaggtagaaaagt

SEQ ID NO: 39017 - DNA, 20 bp, Artificial Sequence
  Synthetic
catggtggtggagttgcaaa

SEQ ID NO: 39018 - DNA, 20 bp, Artificial Sequence
  Synthetic
tgaatttcgtgctggcagac

SEQ ID NO: 39019 - DNA, 24 bp, Artificial Sequence
  Synthetic
tgatgttgttgcagctaacatgtt

SEQ ID NO: 39020 - DNA, 22 bp, Artificial Sequence
  Synthetic
cctgtagctactggtgatgttg

SEQ ID NO: 39021 - DNA, 24 bp, Artificial Sequence
  Synthetic
actattgttggtggtgtaattcgt

SEQ ID NO: 39022 - DNA, 25 bp, Artificial Sequence
  Synthetic
tactgttttagctgcgtataatggc

SEQ ID NO: 39023 - DNA, 23 bp, Artificial Sequence
  Synthetic
agtaaagttgtttccgctttgca

SEQ ID NO: 39024 - DNA, 21 bp, Artificial Sequence
  Synthetic
acgtgtagagcatccagatgt

SEQ ID NO: 39025 - DNA, 20 bp, Artificial Sequence
  Synthetic
cagggtttggtgtggcagtt

SEQ ID NO: 39026 - DNA, 21 bp, Artificial Sequence
  Synthetic
catctgctagtgctctgcttg

SEQ ID NO: 39027 - DNA, 20 bp, Artificial Sequence
  Synthetic
cgcactgtagcaggtgtttc

SEQ ID NO: 39028 - DNA, 23 bp, Artificial Sequence
  Synthetic
ggcaactgaagaggcttttaaac

SEQ ID NO: 39029 - DNA, 25 bp, Artificial Sequence
  Synthetic
aatgaaacgttattgcactgttcaa

SEQ ID NO: 39030 - DNA, 24 bp, Artificial Sequence
  Synthetic
actggtgtggattttgtagttgaa

SEQ ID NO: 39031 - DNA, 25 bp, Artificial Sequence
  Synthetic
tatgagaaaagatggtgacgatgtt

SEQ ID NO: 39032 - DNA, 24 bp, Artificial Sequence
  Synthetic
taaagaagtagctccaggttctgc

SEQ ID NO: 39033 - DNA, 20 bp, Artificial Sequence
  Synthetic
actcgaccacactgactggt

SEQ ID NO: 39034 - DNA, 25 bp, Artificial Sequence
  Synthetic
atttgaaatctcaggaactatgcgt

SEQ ID NO: 39035 - DNA, 21 bp, Artificial Sequence
  Synthetic
cggtccaaattcctcctgatg

SEQ ID NO: 39036 - DNA, 25 bp, Artificial Sequence
  Synthetic
cattgtagagccactgagtacataa

SEQ ID NO: 39037 - DNA, 21 bp, Artificial Sequence
  Synthetic
tgcactgaactcaaactcagc

SEQ ID NO: 39038 - DNA, 22 bp, Artificial Sequence
  Synthetic
taagtcctgcttgcctgcttgt

SEQ ID NO: 39039 - DNA, 21 bp, Artificial Sequence
  Synthetic
actctgcatttgacctgtccc

SEQ ID NO: 39040 - DNA, 19 bp, Artificial Sequence
  Synthetic
aggactcccaccccgagtc

SEQ ID NO: 39041 - DNA, 24 bp, Artificial Sequence
  Synthetic
cacaaggtgctgactgtatacctg

SEQ ID NO: 39042 - DNA, 22 bp, Artificial Sequence
  Synthetic
agagacgctacctgtagatgtt

SEQ ID NO: 39043 - DNA, 23 bp, Artificial Sequence
  Synthetic
cacctcaggtgctatatgatcca

SEQ ID NO: 39044 - DNA, 25 bp, Artificial Sequence
  Synthetic
ggtgaaactaacactataacaacgc

SEQ ID NO: 39045 - DNA, 25 bp, Artificial Sequence
  Synthetic
aatgtgaagaaggacaaaaaggaga

SEQ ID NO: 39046 - DNA, 23 bp, Artificial Sequence
  Synthetic
acaatttgctaggcatttgtggg

SEQ ID NO: 39047 - DNA, 25 bp, Artificial Sequence
  Synthetic
tagaggatgcttacagatatttgcg

SEQ ID NO: 39048 - DNA, 24 bp, Artificial Sequence
  Synthetic
aagtggaacgaaaactgtgaaacg

SEQ ID NO: 39049 - DNA, 22 bp, Artificial Sequence
  Synthetic
gggcatatgaacaccgttttcg

SEQ ID NO: 39050 - DNA, 25 bp, Artificial Sequence
  Synthetic
atttgagattacaggaactatgcgc

SEQ ID NO: 39051 - DNA, 25 bp, Artificial Sequence
  Synthetic
ggagaccttaaacagtatgacagtg

SEQ ID NO: 39052 - DNA, 23 bp, Artificial Sequence
  Synthetic
agtgtacataaatacggccttgc

SEQ ID NO: 39053 - DNA, 20 bp, Artificial Sequence
  Synthetic
tcttgaggactgcgataggc

SEQ ID NO: 39054 - DNA, 20 bp, Artificial Sequence
  Synthetic
ttgggaaagtgtgcaggacc

SEQ ID NO: 39055 - DNA, 21 bp, Artificial Sequence
  Synthetic
ggctccgaagagaccaaaagg

SEQ ID NO: 39056 - DNA, 25 bp, Artificial Sequence
  Synthetic
tgaaaatggaccaagccataatgga

SEQ ID NO: 39057 - DNA, 21 bp, Artificial Sequence
  Synthetic
tccatgatgagaatgggggac

SEQ ID NO: 39058 - DNA, 23 bp, Artificial Sequence
  Synthetic
ggtcacacaaagaacaataggga

SEQ ID NO: 39059 - DNA, 21 bp, Artificial Sequence
  Synthetic
aggccagttggaatttccagc

SEQ ID NO: 39060 - DNA, 22 bp, Artificial Sequence
  Synthetic
actaccagacctatgcaacaca

SEQ ID NO: 39061 - DNA, 21 bp, Artificial Sequence
  Synthetic
gcacacagcacagaaaacagt

SEQ ID NO: 39062 - DNA, 25 bp, Artificial Sequence
  Synthetic
aatgatacagtgggcgtttgataat

SEQ ID NO: 39063 - DNA, 23 bp, Artificial Sequence
  Synthetic
accaggaagaggaggatacagaa

SEQ ID NO: 39064 - DNA, 20 bp, Artificial Sequence
  Synthetic
caccgtataccgaagccacc

SEQ ID NO: 39065 - DNA, 21 bp, Artificial Sequence
  Synthetic
tgcacacatttgcaacacagg

SEQ ID NO: 39066 - DNA, 20 bp, Artificial Sequence
  Synthetic
cctgtgttggcatggaggta

SEQ ID NO: 39067 - DNA, 22 bp, Artificial Sequence
  Synthetic
ggaacattgggctaagggtact

SEQ ID NO: 39068 - DNA, 20 bp, Artificial Sequence
  Synthetic
acgccatttttggaacaggg

SEQ ID NO: 39069 - DNA, 23 bp, Artificial Sequence
  Synthetic
cagatgaatgcaggttctatgct

SEQ ID NO: 39070 - DNA, 20 bp, Artificial Sequence
  Synthetic
gagaagaaccccgcactcag

SEQ ID NO: 39071 - DNA, 23 bp, Artificial Sequence
  Synthetic
aaaacaaggtttctcccagtagc

SEQ ID NO: 39072 - DNA, 23 bp, Artificial Sequence
  Synthetic
gcacacagattggaggagtaagg

SEQ ID NO: 39073 - DNA, 21 bp, Artificial Sequence
  Synthetic
ggcaaccaggagattgatcca

SEQ ID NO: 39074 - DNA, 25 bp, Artificial Sequence
  Synthetic
gtgctagtcaacacttatcaatgga

SEQ ID NO: 39075 - DNA, 24 bp, Artificial Sequence
  Synthetic
ggatgcaattttcctcattgactg

SEQ ID NO: 39076 - DNA, 24 bp, Artificial Sequence
  Synthetic
tcttacacgagttggaagattgca

SEQ ID NO: 39077 - DNA, 20 bp, Artificial Sequence
  Synthetic
tcttaagcgagcgaccgaat

SEQ ID NO: 39078 - DNA, 20 bp, Artificial Sequence
  Synthetic
caaagcaacgccagcgaaat

SEQ ID NO: 39079 - DNA, 24 bp, Artificial Sequence
  Synthetic
aagccaaaactgctattatgatgc

SEQ ID NO: 39080 - DNA, 22 bp, Artificial Sequence
  Synthetic
cgggtccacaattaggaaatgc

SEQ ID NO: 39081 - DNA, 22 bp, Artificial Sequence
  Synthetic
agggtactgtagtacgtccggg

SEQ ID NO: 39082 - DNA, 20 bp, Artificial Sequence
  Synthetic
tgcagcctttaggtcagcat

SEQ ID NO: 39083 - DNA, 20 bp, Artificial Sequence
  Synthetic
atgtgcagatgctaggcagg

SEQ ID NO: 39084 - DNA, 25 bp, Artificial Sequence
  Synthetic
acatgtagaggaatttgagattgct

SEQ ID NO: 39085 - DNA, 20 bp, Artificial Sequence
  Synthetic
tcgtgtagagacccctaccc

SEQ ID NO: 39086 - DNA, 22 bp, Artificial Sequence
  Synthetic
actaccacctattccgtttgct

SEQ ID NO: 39087 - DNA, 22 bp, Artificial Sequence
  Synthetic
agctcctcaaaacaatcctccg

SEQ ID NO: 39088 - DNA, 22 bp, Artificial Sequence
  Synthetic
ccaaaagacgcagagtacccga

SEQ ID NO: 39089 - DNA, 20 bp, Artificial Sequence
  Synthetic
caacacgggcaagggaatta

SEQ ID NO: 39090 - DNA, 25 bp, Artificial Sequence
  Synthetic
aacaaaaggaacaatgaaaacacga

SEQ ID NO: 39091 - DNA, 21 bp, Artificial Sequence
  Synthetic
acaattcctccaggtgtagct

SEQ ID NO: 39092 - DNA, 20 bp, Artificial Sequence
  Synthetic
tgcagacagctggacaattg

SEQ ID NO: 39093 - DNA, 25 bp, Artificial Sequence
  Synthetic
ggatattgctaaaccttgtgatcct

SEQ ID NO: 39094 - DNA, 22 bp, Artificial Sequence
  Synthetic
gacacttaccaaccgtaactgg

SEQ ID NO: 39095 - DNA, 20 bp, Artificial Sequence
  Synthetic
tagaagccggccctccttcc

SEQ ID NO: 39096 - DNA, 19 bp, Artificial Sequence
  Synthetic
cgtcgctgactccgccatc

SEQ ID NO: 39097 - DNA, 22 bp, Artificial Sequence
  Synthetic
actttgagccactaagcccccg

SEQ ID NO: 39098 - DNA, 20 bp, Artificial Sequence
  Synthetic
gctcatccccacattccagg

SEQ ID NO: 39099 - DNA, 22 bp, Artificial Sequence
  Synthetic
gtgcattcacggcatctggggt

SEQ ID NO: 39100 - DNA, 19 bp, Artificial Sequence
  Synthetic
aggcaccggacacgcgaga

SEQ ID NO: 39101 - DNA, 22 bp, Artificial Sequence
  Synthetic
gagttacaccagcgactgcacc

SEQ ID NO: 39102 - DNA, 19 bp, Artificial Sequence
  Synthetic
accggtgtctggcccggat

SEQ ID NO: 39103 - DNA, 20 bp, Artificial Sequence
  Synthetic
ccgggcttgtagggggctga

SEQ ID NO: 39104 - DNA, 19 bp, Artificial Sequence
  Synthetic
ccaggaaggcggcagcgta

SEQ ID NO: 39105 - DNA, 19 bp, Artificial Sequence
  Synthetic
cgccatcagggtctggctc

SEQ ID NO: 39106 - DNA, 18 bp, Artificial Sequence
  Synthetic
tgcggccaggtgctcatg

SEQ ID NO: 39107 - DNA, 19 bp, Artificial Sequence
  Synthetic
ctcccggtctctgcgtcgt

SEQ ID NO: 39108 - DNA, 18 bp, Artificial Sequence
  Synthetic
acgtgacccaggccctct

SEQ ID NO: 39109 - DNA, 19 bp, Artificial Sequence
  Synthetic
agggcgaggccatgaacgc

SEQ ID NO: 39110 - DNA, 21 bp, Artificial Sequence
  Synthetic
gagggaccaggtgggtggtgt

SEQ ID NO: 39111 - DNA, 20 bp, Artificial Sequence
  Synthetic
cacgatcttgggacgcagcc

SEQ ID NO: 39112 - DNA, 20 bp, Artificial Sequence
  Synthetic
gcatcgaggatggcctccgc

SEQ ID NO: 39113 - DNA, 19 bp, Artificial Sequence
  Synthetic
ctccgcctgagccgcttac

SEQ ID NO: 39114 - DNA, 19 bp, Artificial Sequence
  Synthetic
cggctggtgttgggctggt

SEQ ID NO: 39115 - DNA, 20 bp, Artificial Sequence
  Synthetic
gacagtgcgtcacagatgtc

SEQ ID NO: 39116 - DNA, 21 bp, Artificial Sequence
  Synthetic
gagaggcacccccatcattcc

SEQ ID NO: 39117 - DNA, 19 bp, Artificial Sequence
  Synthetic
cctccatgacggccacgca

SEQ ID NO: 39118 - DNA, 22 bp, Artificial Sequence
  Synthetic
aacgtccaagttgcattggctg

SEQ ID NO: 39119 - DNA, 21 bp, Artificial Sequence
  Synthetic
tgaaagagccagggggagagg

SEQ ID NO: 39120 - DNA, 21 bp, Artificial Sequence
  Synthetic
attagcctgggcatgcgtgaa

SEQ ID NO: 39121 - DNA, 20 bp, Artificial Sequence
  Synthetic
gaactcggcggcaatgtcgg

SEQ ID NO: 39122 - DNA, 21 bp, Artificial Sequence
  Synthetic
tctgggagaggttctgtgcgg

SEQ ID NO: 39123 - DNA, 22 bp, Artificial Sequence
  Synthetic
taaccgccataacgccatctgc

SEQ ID NO: 39124 - DNA, 21 bp, Artificial Sequence
  Synthetic
cgtgtaggagaacccgggtga

SEQ ID NO: 39125 - DNA, 21 bp, Artificial Sequence
  Synthetic
agatgaggccctgctcatcct

SEQ ID NO: 39126 - DNA, 20 bp, Artificial Sequence
  Synthetic
agagggcccacatccaaggg

SEQ ID NO: 39127 - DNA, 19 bp, Artificial Sequence
  Synthetic
cggccgtctgaccgagaac

SEQ ID NO: 39128 - DNA, 22 bp, Artificial Sequence
  Synthetic
aagctctgccataaccgtgtcg

SEQ ID NO: 39129 - DNA, 22 bp, Artificial Sequence
  Synthetic
tcatgggtctcaatcagggtgc

SEQ ID NO: 39130 - DNA, 20 bp, Artificial Sequence
  Synthetic
ggacgcctagcctcctccct

SEQ ID NO: 39131 - DNA, 20 bp, Artificial Sequence
  Synthetic
cgtcgtggccctcgtctcct

SEQ ID NO: 39132 - DNA, 22 bp, Artificial Sequence
  Synthetic
actgccaccatatctcgagtgc

SEQ ID NO: 39133 - DNA, 19 bp, Artificial Sequence
  Synthetic
ttccgtgcctcgggcctca

SEQ ID NO: 39134 - DNA, 22 bp, Artificial Sequence
  Synthetic
cgcaccatccgggatattctgg

SEQ ID NO: 39135 - DNA, 20 bp, Artificial Sequence
  Synthetic
gatagaccccgcccgactgc

SEQ ID NO: 39136 - DNA, 19 bp, Artificial Sequence
  Synthetic
tcccacttgcgggcagact

SEQ ID NO: 39137 - DNA, 22 bp, Artificial Sequence
  Synthetic
gctcagtctaaggagcccacca

SEQ ID NO: 39138 - DNA, 19 bp, Artificial Sequence
  Synthetic
ggggccatggtggagagca

SEQ ID NO: 39139 - DNA, 21 bp, Artificial Sequence
  Synthetic
tggtagaagcacagggggggc

SEQ ID NO: 39140 - DNA, 19 bp, Artificial Sequence
  Synthetic
aagagcccgctctcctccg

SEQ ID NO: 39141 - DNA, 22 bp, Artificial Sequence
  Synthetic
gacgaaggcccgtctgtagagg

SEQ ID NO: 39142 - DNA, 20 bp, Artificial Sequence
  Synthetic
cccctctgccgtggaagggt

SEQ ID NO: 39143 - DNA, 19 bp, Artificial Sequence
  Synthetic
caggccgcgctgtccacaa

SEQ ID NO: 39144 - DNA, 21 bp, Artificial Sequence
  Synthetic
ttccgctgtagagtcgctcct

SEQ ID NO: 39145 - DNA, 19 bp, Artificial Sequence
  Synthetic
ccgatgtcggctgtcctgc

SEQ ID NO: 39146 - DNA, 21 bp, Artificial Sequence
  Synthetic
aaccctgacaaaggcccccca

SEQ ID NO: 39147 - DNA, 21 bp, Artificial Sequence
  Synthetic
cacagaaccagcacagcaggc

SEQ ID NO: 39148 - DNA, 23 bp, Artificial Sequence
  Synthetic
tatgtgcgtttggtgtgtattgc

SEQ ID NO: 39149 - DNA, 20 bp, Artificial Sequence
  Synthetic
ctatgccaattccagcagcc

SEQ ID NO: 39150 - DNA, 22 bp, Artificial Sequence
  Synthetic
agcaggaattactcatcttgcc

SEQ ID NO: 39151 - DNA, 20 bp, Artificial Sequence
  Synthetic
caacaggcctccaccaccac

SEQ ID NO: 39152 - DNA, 20 bp, Artificial Sequence
  Synthetic
tccattgcacctcccagttc

SEQ ID NO: 39153 - DNA, 25 bp, Artificial Sequence
  Synthetic
taccaatatagagtgtttcgtgtgc

SEQ ID NO: 39154 - DNA, 20 bp, Artificial Sequence
  Synthetic
gagccattggtgatcgcatg

SEQ ID NO: 39155 - DNA, 24 bp, Artificial Sequence
  Synthetic
ggccataacctgtcagaaaaacag

SEQ ID NO: 39156 - DNA, 24 bp, Artificial Sequence
  Synthetic
gctgactatgttcgcctaagtacg

SEQ ID NO: 39157 - DNA, 20 bp, Artificial Sequence
  Synthetic
tttgcctttgtaccgggagt

SEQ ID NO: 39158 - DNA, 22 bp, Artificial Sequence
  Synthetic
aacctttttgggttgacacctg

SEQ ID NO: 39159 - DNA, 22 bp, Artificial Sequence
  Synthetic
gagactcagaagtgttgctgtt

SEQ ID NO: 39160 - DNA, 22 bp, Artificial Sequence
  Synthetic
ttggcatttgaaaatccacgtg

SEQ ID NO: 39161 - DNA, 20 bp, Artificial Sequence
  Synthetic
ggctgcagcaatctggaact

SEQ ID NO: 39162 - DNA, 21 bp, Artificial Sequence
  Synthetic
ggaggaggttgtatcgtttgc

SEQ ID NO: 39163 - DNA, 21 bp, Artificial Sequence
  Synthetic
catgcatggccaacgaccaac

SEQ ID NO: 39164 - DNA, 21 bp, Artificial Sequence
  Synthetic
tatagtgtgtccgctctgcgc

SEQ ID NO: 39165 - DNA, 21 bp, Artificial Sequence
  Synthetic
atgacgaggcctttgtgcagg

SEQ ID NO: 39166 - DNA, 20 bp, Artificial Sequence
  Synthetic
cggaggaggaggagcgacaa

SEQ ID NO: 39167 - DNA, 20 bp, Artificial Sequence
  Synthetic
caaacagttgtggggcacag

SEQ ID NO: 39168 - DNA, 25 bp, Artificial Sequence
  Synthetic
agaagtgcaaagatatcagaggagg

SEQ ID NO: 39169 - DNA, 24 bp, Artificial Sequence
  Synthetic
gcttatagatgatgttacccccca

SEQ ID NO: 39170 - DNA, 20 bp, Artificial Sequence
  Synthetic
caaaggttgtgggctcggtt

SEQ ID NO: 39171 - DNA, 20 bp, Artificial Sequence
  Synthetic
ccatgtggaccatgcaggac

SEQ ID NO: 39172 - DNA, 20 bp, Artificial Sequence
  Synthetic
tggcacgtgacaacacaggg

SEQ ID NO: 39173 - DNA, 23 bp, Artificial Sequence
  Synthetic
ccaccaatgaaaaatcagccttt

SEQ ID NO: 39174 - DNA, 21 bp, Artificial Sequence
  Synthetic
cagatgtgcaggtgttatccc

SEQ ID NO: 39175 - DNA, 22 bp, Artificial Sequence
  Synthetic
ctgttgtggatgttggccctcc

SEQ ID NO: 39176 - DNA, 20 bp, Artificial Sequence
  Synthetic
cctcctttaggcgagcactg

SEQ ID NO: 39177 - DNA, 23 bp, Artificial Sequence
  Synthetic
aggcacttttataacagagcagg

SEQ ID NO: 39178 - DNA, 20 bp, Artificial Sequence
  Synthetic
ttgtgccacacaaacaccct

SEQ ID NO: 39179 - DNA, 22 bp, Artificial Sequence
  Synthetic
catggcgttttgttggcactgt

SEQ ID NO: 39180 - DNA, 20 bp, Artificial Sequence
  Synthetic
tcccgggagagccatagtgg

SEQ ID NO: 39181 - DNA, 20 bp, Artificial Sequence
  Synthetic
ggcgtgagagtcctggagga

SEQ ID NO: 39182 - DNA, 22 bp, Artificial Sequence
  Synthetic
cttctctatgcagggagcgtgg

SEQ ID NO: 39183 - DNA, 20 bp, Artificial Sequence
  Synthetic
ctgttgtgccccacggactg

SEQ ID NO: 39184 - DNA, 20 bp, Artificial Sequence
  Synthetic
ccgccttgtcgactggtctt

SEQ ID NO: 39185 - DNA, 21 bp, Artificial Sequence
  Synthetic
actgctcctagcattgcccca

SEQ ID NO: 39186 - DNA, 20 bp, Artificial Sequence
  Synthetic
tgccgtacttcgtcagggct

SEQ ID NO: 39187 - DNA, 22 bp, Artificial Sequence
  Synthetic
tccaaggggtggagtcttctcg

SEQ ID NO: 39188 - DNA, 22 bp, Artificial Sequence
  Synthetic
tgagggggacttagtagggtgg

SEQ ID NO: 39189 - DNA, 21 bp, Artificial Sequence
  Synthetic
ccgactggcagtggaaagagc

SEQ ID NO: 39190 - DNA, 20 bp, Artificial Sequence
  Synthetic
ccggtttgcctgtgtgccaa

SEQ ID NO: 39191 - DNA, 21 bp, Artificial Sequence
  Synthetic
attctgtctccgggtgccttg

SEQ ID NO: 39192 - DNA, 20 bp, Artificial Sequence
  Synthetic
aaggtcgccatctggagggt

SEQ ID NO: 39193 - DNA, 19 bp, Artificial Sequence
  Synthetic
cccccatccgaggcaagct

SEQ ID NO: 39194 - DNA, 21 bp, Artificial Sequence
  Synthetic
caccgcttgtggaatcgtgga

SEQ ID NO: 39195 - DNA, 21 bp, Artificial Sequence
  Synthetic
aggaggcttgccagttaaccc

SEQ ID NO: 39196 - DNA, 22 bp, Artificial Sequence
  Synthetic
tatgcggcgatgacttggttgt

SEQ ID NO: 39197 - DNA, 20 bp, Artificial Sequence
  Synthetic
gcgcgccgaagtgattttgc

SEQ ID NO: 39198 - DNA, 19 bp, Artificial Sequence
  Synthetic
ccgtcttcgcggcggatga

SEQ ID NO: 39199 - DNA, 19 bp, Artificial Sequence
  Synthetic
cgacgtgggcgtggaggat

SEQ ID NO: 39200 - DNA, 19 bp, Artificial Sequence
  Synthetic
aaggcttggcggcatctgc

SEQ ID NO: 39201 - DNA, 19 bp, Artificial Sequence
  Synthetic
ccttgggtgtggcagtgcc

SEQ ID NO: 39202 - DNA, 19 bp, Artificial Sequence
  Synthetic
gcgcgactggggcatttcg

SEQ ID NO: 39203 - DNA, 22 bp, Artificial Sequence
  Synthetic
aacacgcgattttgcacctcct

SEQ ID NO: 39204 - DNA, 19 bp, Artificial Sequence
  Synthetic
gacgcctccaaagccgacc

SEQ ID NO: 39205 - DNA, 18 bp, Artificial Sequence
  Synthetic
cggcagtgctgtggtcga

SEQ ID NO: 39206 - DNA, 21 bp, Artificial Sequence
  Synthetic
cggtgtagccgtcgttggaac

SEQ ID NO: 39207 - DNA, 22 bp, Artificial Sequence
  Synthetic
ggcaggcatgacgatgatttgc

SEQ ID NO: 39208 - DNA, 19 bp, Artificial Sequence
  Synthetic
ctgccggcgaaatctggct

SEQ ID NO: 39209 - DNA, 20 bp, Artificial Sequence
  Synthetic
gtttgggcgaactcatgccg

SEQ ID NO: 39210 - DNA, 21 bp, Artificial Sequence
  Synthetic
caaaccgccacgctttcagac

SEQ ID NO: 39211 - DNA, 22 bp, Artificial Sequence
  Synthetic
actcggatagctttggttcgcg

SEQ ID NO: 39212 - DNA, 22 bp, Artificial Sequence
  Synthetic
acccacacgctgttttcatcgc

SEQ ID NO: 39213 - DNA, 22 bp, Artificial Sequence
  Synthetic
tcttccgatgccgtctgaaagc

SEQ ID NO: 39214 - DNA, 20 bp, Artificial Sequence
  Synthetic
ggacgagtcggatgcccagt

SEQ ID NO: 39215 - DNA, 20 bp, Artificial Sequence
  Synthetic
tgcccgtaaaccgcatcctc

SEQ ID NO: 39216 - DNA, 19 bp, Artificial Sequence
  Synthetic
gccagttgcgggatagccg

SEQ ID NO: 39217 - DNA, 18 bp, Artificial Sequence
  Synthetic
gctcaaacggcggcggtt

SEQ ID NO: 39218 - DNA, 21 bp, Artificial Sequence
  Synthetic
cggactgttcgacctgttcgg

SEQ ID NO: 39219 - DNA, 19 bp, Artificial Sequence
  Synthetic
gcaggctgcctttgtcggc

SEQ ID NO: 39220 - DNA, 21 bp, Artificial Sequence
  Synthetic
tcgaaatagaggcggtcgctg

SEQ ID NO: 39221 - DNA, 19 bp, Artificial Sequence
  Synthetic
agccgaaatgcagggcgat

SEQ ID NO: 39222 - DNA, 22 bp, Artificial Sequence
  Synthetic
tgaagtaggcgagccaagatgc

SEQ ID NO: 39223 - DNA, 21 bp, Artificial Sequence
  Synthetic
cgaacgcagcttgaattccgc

SEQ ID NO: 39224 - DNA, 20 bp, Artificial Sequence
  Synthetic
atcaccgccggtatcgacct

SEQ ID NO: 39225 - DNA, 22 bp, Artificial Sequence
  Synthetic
ctggaattgctggaagggacgg

SEQ ID NO: 39226 - DNA, 20 bp, Artificial Sequence
  Synthetic
ccggcagcgacggtaaaacc

SEQ ID NO: 39227 - DNA, 18 bp, Artificial Sequence
  Synthetic
gcgcgccgacaaaaccgt

SEQ ID NO: 39228 - DNA, 21 bp, Artificial Sequence
  Synthetic
caaatggcggcagagttggac

SEQ ID NO: 39229 - DNA, 20 bp, Artificial Sequence
  Synthetic
ttttgccgcgtttgcccatc

SEQ ID NO: 39230 - DNA, 19 bp, Artificial Sequence
  Synthetic
gccgcgtatcagggcttcg

SEQ ID NO: 39231 - DNA, 22 bp, Artificial Sequence
  Synthetic
cagacgatttactgggcggaca

SEQ ID NO: 39232 - DNA, 20 bp, Artificial Sequence
  Synthetic
cgtcggtcaacacgttgccg

SEQ ID NO: 39233 - DNA, 22 bp, Artificial Sequence
  Synthetic
gtctcgtcggcggtcatgatgc

SEQ ID NO: 39234 - DNA, 19 bp, Artificial Sequence
  Synthetic
gtaaaccggacggcggcgt

SEQ ID NO: 39235 - DNA, 20 bp, Artificial Sequence
  Synthetic
gcagaatggcgagtttgggc

SEQ ID NO: 39236 - DNA, 18 bp, Artificial Sequence
  Synthetic
cgatgcgcccgatgtcgt

SEQ ID NO: 39237 - DNA, 22 bp, Artificial Sequence
  Synthetic
tttcttgtccggaccgatgacg

SEQ ID NO: 39238 - DNA, 22 bp, Artificial Sequence
  Synthetic
actcggcttgtcgtcatggaac

SEQ ID NO: 39239 - DNA, 21 bp, Artificial Sequence
  Synthetic
ggcgtgtccgaaggtgtgtcc

SEQ ID NO: 39240 - DNA, 21 bp, Artificial Sequence
  Synthetic
accgtgtttgcatgggtgtct

SEQ ID NO: 39241 - DNA, 21 bp, Artificial Sequence
  Synthetic
gcgaaactgtcggaacttgcg

SEQ ID NO: 39242 - DNA, 20 bp, Artificial Sequence
  Synthetic
ctgatgtagcgtccgcccaa

SEQ ID NO: 39243 - DNA, 19 bp, Artificial Sequence
  Synthetic
gactgccgacttcgcccca

SEQ ID NO: 39244 - DNA, 20 bp, Artificial Sequence
  Synthetic
gccccaggctggtaaaaccg

SEQ ID NO: 39245 - DNA, 19 bp, Artificial Sequence
  Synthetic
caggctgctgcgttcggca

SEQ ID NO: 39246 - DNA, 19 bp, Artificial Sequence
  Synthetic
gcgaaacgcacgtcggagg

SEQ ID NO: 39247 - DNA, 18 bp, Artificial Sequence
  Synthetic
ccgccgccgagtttcact

SEQ ID NO: 39248 - DNA, 18 bp, Artificial Sequence
  Synthetic
acgccgccctgatggtga

SEQ ID NO: 39249 - DNA, 19 bp, Artificial Sequence
  Synthetic
ccatgaacgggctgtcgcg

SEQ ID NO: 39250 - DNA, 18 bp, Artificial Sequence
  Synthetic
tttcgggcaggtggcggt

SEQ ID NO: 39251 - DNA, 21 bp, Artificial Sequence
  Synthetic
ccctgttccaaaaggcgtggc

SEQ ID NO: 39252 - DNA, 18 bp, Artificial Sequence
  Synthetic
gcttcgctgcggctggtt

SEQ ID NO: 39253 - DNA, 18 bp, Artificial Sequence
  Synthetic
gggtcgtttgccggagca

SEQ ID NO: 39254 - DNA, 21 bp, Artificial Sequence
  Synthetic
gctggggcggacattgtttca

SEQ ID NO: 39255 - DNA, 20 bp, Artificial Sequence
  Synthetic
ccttcgcggctcatagtgcg

SEQ ID NO: 39256 - DNA, 19 bp, Artificial Sequence
  Synthetic
cgccggtggacgacaggat

SEQ ID NO: 39257 - DNA, 19 bp, Artificial Sequence
  Synthetic
ggcgagtttggcgcgggaa

SEQ ID NO: 39258 - DNA, 21 bp, Artificial Sequence
  Synthetic
ttaagttgaacagcgggccgc

SEQ ID NO: 39259 - DNA, 21 bp, Artificial Sequence
  Synthetic
ccgatgaaggcggcatcgttg

SEQ ID NO: 39260 - DNA, 18 bp, Artificial Sequence
  Synthetic
ccgctggttgccgccatt

SEQ ID NO: 39261 - DNA, 22 bp, Artificial Sequence
  Synthetic
aatacacggccttgcaggtcaa

SEQ ID NO: 39262 - DNA, 19 bp, Artificial Sequence
  Synthetic
cagcgacgctttcacgtgc

SEQ ID NO: 39263 - DNA, 22 bp, Artificial Sequence
  Synthetic
tgggtcatgaagcgtgtgtacc

SEQ ID NO: 39264 - DNA, 18 bp, Artificial Sequence
  Synthetic
gcgtggtaaacggcggga

SEQ ID NO: 39265 - DNA, 22 bp, Artificial Sequence
  Synthetic
tttggggttgcggtgttttcag

SEQ ID NO: 39266 - DNA, 19 bp, Artificial Sequence
  Synthetic
cgaggcagtgcagtacggc

SEQ ID NO: 39267 - DNA, 21 bp, Artificial Sequence
  Synthetic
gccaatcggcggatgtgatgg

SEQ ID NO: 39268 - DNA, 20 bp, Artificial Sequence
  Synthetic
ctgtgttgtgctcggcggag

SEQ ID NO: 39269 - DNA, 19 bp, Artificial Sequence
  Synthetic
gccggtttgcctgtcgtcc

SEQ ID NO: 39270 - DNA, 22 bp, Artificial Sequence
  Synthetic
atcggagaggctgtgccattgt

SEQ ID NO: 39271 - DNA, 20 bp, Artificial Sequence
  Synthetic
gcagtcatggcttgtgcggt

SEQ ID NO: 39272 - DNA, 19 bp, Artificial Sequence
  Synthetic
ccaggcggtctgggcgttt

SEQ ID NO: 39273 - DNA, 24 bp, Artificial Sequence
  Synthetic
atcggcatcattatttacctgtcg

SEQ ID NO: 39274 - DNA, 19 bp, Artificial Sequence
  Synthetic
cggctttggcatcgacggc

SEQ ID NO: 39275 - DNA, 18 bp, Artificial Sequence
  Synthetic
acacagggcgcggatgtc

SEQ ID NO: 39276 - DNA, 19 bp, Artificial Sequence
  Synthetic
cgagcagggtttcggcggt

SEQ ID NO: 39277 - DNA, 18 bp, Artificial Sequence
  Synthetic
ttgccgttgccgagaccg

SEQ ID NO: 39278 - DNA, 22 bp, Artificial Sequence
  Synthetic
tcagcttgaggaagacgagtgc

SEQ ID NO: 39279 - DNA, 19 bp, Artificial Sequence
  Synthetic
cgttgatggtggaggcggg

SEQ ID NO: 39280 - DNA, 21 bp, Artificial Sequence
  Synthetic
cgttcgaaatcgcgtccgagc

SEQ ID NO: 39281 - DNA, 22 bp, Artificial Sequence
  Synthetic
ccagccagttgagcatatgccg

SEQ ID NO: 39282 - DNA, 21 bp, Artificial Sequence
  Synthetic
ggacggtgtttcggcaaacag

SEQ ID NO: 39283 - DNA, 19 bp, Artificial Sequence
  Synthetic
aaggtcggtgtgcagcgtc

SEQ ID NO: 39284 - DNA, 22 bp, Artificial Sequence
  Synthetic
catggtgcagccgacaatctgg

SEQ ID NO: 39285 - DNA, 20 bp, Artificial Sequence
  Synthetic
aacggcggcagcgaaatgtt

SEQ ID NO: 39286 - DNA, 19 bp, Artificial Sequence
  Synthetic
cggttcgagcaggagcagg

SEQ ID NO: 39287 - DNA, 19 bp, Artificial Sequence
  Synthetic
catcgccgtcgaaaccgcc

SEQ ID NO: 39288 - DNA, 22 bp, Artificial Sequence
  Synthetic
ttgtccgtttgtctgtgtggcg

SEQ ID NO: 39289 - DNA, 22 bp, Artificial Sequence
  Synthetic
agccgctgatgacgctttacct

SEQ ID NO: 39290 - DNA, 19 bp, Artificial Sequence
  Synthetic
gaagcgggcgacaacgttg

SEQ ID NO: 39291 - DNA, 20 bp, Artificial Sequence
  Synthetic
gatgcgccttaccgatgccg

SEQ ID NO: 39292 - DNA, 19 bp, Artificial Sequence
  Synthetic
cgccgacgttttcaggggt

SEQ ID NO: 39293 - DNA, 18 bp, Artificial Sequence
  Synthetic
ggcaggggtttgtgccgt

SEQ ID NO: 39294 - DNA, 19 bp, Artificial Sequence
  Synthetic
atacggtcaacgcgcaggc

SEQ ID NO: 39295 - DNA, 21 bp, Artificial Sequence
  Synthetic
acgcactctgtttccgcaggc

SEQ ID NO: 39296 - DNA, 20 bp, Artificial Sequence
  Synthetic
ttgttgacatctgcaacgct

SEQ ID NO: 39297 - DNA, 21 bp, Artificial Sequence
  Synthetic
cgtatgcaggctgttggacgg

SEQ ID NO: 39298 - DNA, 19 bp, Artificial Sequence
  Synthetic
ggcggctcctgtcgtccaa

SEQ ID NO: 39299 - DNA, 22 bp, Artificial Sequence
  Synthetic
acaggatgagttgtttggcggc

SEQ ID NO: 39300 - DNA, 22 bp, Artificial Sequence
  Synthetic
gttgtcgatcgccaaaaccagc

SEQ ID NO: 39301 - DNA, 21 bp, Artificial Sequence
  Synthetic
agaactgtgccgtgtatgcgg

SEQ ID NO: 39302 - DNA, 18 bp, Artificial Sequence
  Synthetic
ttgccgccatcacgagcg

SEQ ID NO: 39303 - DNA, 19 bp, Artificial Sequence
  Synthetic
cgtgcctacgcccatcagg

SEQ ID NO: 39304 - DNA, 21 bp, Artificial Sequence
  Synthetic
tgatgacctgccggtaaagga

SEQ ID NO: 39305 - DNA, 22 bp, Artificial Sequence
  Synthetic
ttttcaatgccgacggtagcga

SEQ ID NO: 39306 - DNA, 21 bp, Artificial Sequence
  Synthetic
gtgcggaattcggctacaacg

SEQ ID NO: 39307 - DNA, 18 bp, Artificial Sequence
  Synthetic
ccgcgttgaccttgccga

SEQ ID NO: 39308 - DNA, 18 bp, Artificial Sequence
  Synthetic
cgcgccgctgtttcagga

SEQ ID NO: 39309 - DNA, 20 bp, Artificial Sequence
  Synthetic
gtagggaagctaaccgcacg

SEQ ID NO: 39310 - DNA, 20 bp, Artificial Sequence
  Synthetic
acggcgggcgggattttctg

SEQ ID NO: 39311 - DNA, 19 bp, Artificial Sequence
  Synthetic
gctgccgcatcggatgtga

SEQ ID NO: 39312 - DNA, 20 bp, Artificial Sequence
  Synthetic
gcgcgtttggtgttggcaaa

SEQ ID NO: 39313 - DNA, 21 bp, Artificial Sequence
  Synthetic
tagtcgacaccgtgcacgagc

SEQ ID NO: 39314 - DNA, 20 bp, Artificial Sequence
  Synthetic
tcgcccaaacagtttcacaa

SEQ ID NO: 39315 - DNA, 19 bp, Artificial Sequence
  Synthetic
tctccgccgttaccgctgc

SEQ ID NO: 39316 - DNA, 22 bp, Artificial Sequence
  Synthetic
aaggtaatagtgctggtgcgcg

SEQ ID NO: 39317 - DNA, 19 bp, Artificial Sequence
  Synthetic
tgcggcaagccttcgatca

SEQ ID NO: 39318 - DNA, 20 bp, Artificial Sequence
  Synthetic
ggcgcaaaccgtgttcttcg

SEQ ID NO: 39319 - DNA, 21 bp, Artificial Sequence
  Synthetic
ttgagtacgccgataccgctg

SEQ ID NO: 39320 - DNA, 18 bp, Artificial Sequence
  Synthetic
atatccacgcggcggctg

SEQ ID NO: 39321 - DNA, 19 bp, Artificial Sequence
  Synthetic
gggacagtaccgcgatgcc

SEQ ID NO: 39322 - DNA, 19 bp, Artificial Sequence
  Synthetic
atttgtcgggcggactcgg

SEQ ID NO: 39323 - DNA, 19 bp, Artificial Sequence
  Synthetic
ctgcaacagggtggcggct

SEQ ID NO: 39324 - DNA, 19 bp, Artificial Sequence
  Synthetic
gcccgccgtgttggtcgat

SEQ ID NO: 39325 - DNA, 22 bp, Artificial Sequence
  Synthetic
ctgttgggcgaaatcgacgagt

SEQ ID NO: 39326 - DNA, 19 bp, Artificial Sequence
  Synthetic
agacaaagtggcacgccgc

SEQ ID NO: 39327 - DNA, 18 bp, Artificial Sequence
  Synthetic
aaaccggtgctgacggcg

SEQ ID NO: 39328 - DNA, 19 bp, Artificial Sequence
  Synthetic
cgttacccgagccgccgat

SEQ ID NO: 39329 - DNA, 21 bp, Artificial Sequence
  Synthetic
gtttcaagccgcgcaggattt

SEQ ID NO: 39330 - DNA, 22 bp, Artificial Sequence
  Synthetic
aaaaggtggtcgggaatcaggg

SEQ ID NO: 39331 - DNA, 21 bp, Artificial Sequence
  Synthetic
ctggtgatgatgggcgggaaa

SEQ ID NO: 39332 - DNA, 19 bp, Artificial Sequence
  Synthetic
gcggacaacggcgaagtgc

SEQ ID NO: 39333 - DNA, 19 bp, Artificial Sequence
  Synthetic
agtcgatgacggcgaggca

SEQ ID NO: 39334 - DNA, 21 bp, Artificial Sequence
  Synthetic
gtctgtccagcgtgcaaacga

SEQ ID NO: 39335 - DNA, 19 bp, Artificial Sequence
  Synthetic
ccccgcaatccgtgtttgc

SEQ ID NO: 39336 - DNA, 19 bp, Artificial Sequence
  Synthetic
ggcggctgccgaattggac

SEQ ID NO: 39337 - DNA, 21 bp, Artificial Sequence
  Synthetic
ggcggatttttcttgctttcg

SEQ ID NO: 39338 - DNA, 18 bp, Artificial Sequence
  Synthetic
ccaaagtcgccgccgctt

SEQ ID NO: 39339 - DNA, 21 bp, Artificial Sequence
  Synthetic
ggaaaccaaagccaatccgcc

SEQ ID NO: 39340 - DNA, 20 bp, Artificial Sequence
  Synthetic
acgtttttgaccgtcccggc

SEQ ID NO: 39341 - DNA, 21 bp, Artificial Sequence
  Synthetic
gcattcaggtgccgctcttcc

SEQ ID NO: 39342 - DNA, 22 bp, Artificial Sequence
  Synthetic
tgcccgctatgaatttgccagc

SEQ ID NO: 39343 - DNA, 18 bp, Artificial Sequence
  Synthetic
gcgccaaacggcaaggtg

SEQ ID NO: 39344 - DNA, 19 bp, Artificial Sequence
  Synthetic
caacagggcggtcaggagc

SEQ ID NO: 39345 - DNA, 19 bp, Artificial Sequence
  Synthetic
gctggacgcgcttcaaggc

SEQ ID NO: 39346 - DNA, 19 bp, Artificial Sequence
  Synthetic
gcgaggggcccctgcattt

SEQ ID NO: 39347 - DNA, 18 bp, Artificial Sequence
  Synthetic
cgcgcgggccatccaaat

SEQ ID NO: 39348 - DNA, 22 bp, Artificial Sequence
  Synthetic
ggcaacctgataggctgggaag

SEQ ID NO: 39349 - DNA, 21 bp, Artificial Sequence
  Synthetic
atcgttgaccctgttgccgtg

SEQ ID NO: 39350 - DNA, 20 bp, Artificial Sequence
  Synthetic
cgcggttgcctatgcttggt

SEQ ID NO: 39351 - DNA, 19 bp, Artificial Sequence
  Synthetic
gtcaggcaggcgttcggca

SEQ ID NO: 39352 - DNA, 22 bp, Artificial Sequence
  Synthetic
accgtgtgttttttgatgccgg

SEQ ID NO: 39353 - DNA, 20 bp, Artificial Sequence
  Synthetic
cgacggctgcaaggtcaacc

SEQ ID NO: 39354 - DNA, 19 bp, Artificial Sequence
  Synthetic
ggcggcaacacgttcgaac

SEQ ID NO: 39355 - DNA, 21 bp, Artificial Sequence
  Synthetic
cggcgaatttctggcatacgc

SEQ ID NO: 39356 - DNA, 18 bp, Artificial Sequence
  Synthetic
cgtgggcatcaacggcga

SEQ ID NO: 39357 - DNA, 21 bp, Artificial Sequence
  Synthetic
atcgggcaggcgtaaaccaag

SEQ ID NO: 39358 - DNA, 19 bp, Artificial Sequence
  Synthetic
cgcggtcgaacacgccgaa

SEQ ID NO: 39359 - DNA, 18 bp, Artificial Sequence
  Synthetic
tgacaggccggctgaacg

SEQ ID NO: 39360 - DNA, 18 bp, Artificial Sequence
  Synthetic
ggcggcaaagggggcaaa

SEQ ID NO: 39361 - DNA, 19 bp, Artificial Sequence
  Synthetic
cacgaacggacgcaggcga

SEQ ID NO: 39362 - DNA, 19 bp, Artificial Sequence
  Synthetic
cgaccacaaccacgacgcg

SEQ ID NO: 39363 - DNA, 22 bp, Artificial Sequence
  Synthetic
ttcttcatcgacggctttggct

SEQ ID NO: 39364 - DNA, 22 bp, Artificial Sequence
  Synthetic
tttgccgaacaggtaagacgcg

SEQ ID NO: 39365 - DNA, 19 bp, Artificial Sequence
  Synthetic
cggaatccccgccaccatc

SEQ ID NO: 39366 - DNA, 20 bp, Artificial Sequence
  Synthetic
atgccgaaaagctgtttgcc

SEQ ID NO: 39367 - DNA, 22 bp, Artificial Sequence
  Synthetic
aagtgtacgccgccgatgatgt

SEQ ID NO: 39368 - DNA, 18 bp, Artificial Sequence
  Synthetic
ccatcgaagccggcgaca

SEQ ID NO: 39369 - DNA, 21 bp, Artificial Sequence
  Synthetic
attggtgtacccaacgcggcc

SEQ ID NO: 39370 - DNA, 20 bp, Artificial Sequence
  Synthetic
gggacgaaggggatttccgc

SEQ ID NO: 39371 - DNA, 21 bp, Artificial Sequence
  Synthetic
tattgaccgaagttcccgccc

SEQ ID NO: 39372 - DNA, 21 bp, Artificial Sequence
  Synthetic
cgtcgcagcccatttcgatgg

SEQ ID NO: 39373 - DNA, 18 bp, Artificial Sequence
  Synthetic
agccgcgcgcgtgcatat

SEQ ID NO: 39374 - DNA, 19 bp, Artificial Sequence
  Synthetic
aggaatccggccgctggga

SEQ ID NO: 39375 - DNA, 21 bp, Artificial Sequence
  Synthetic
gcgcgacgacgtgattatcgt

SEQ ID NO: 39376 - DNA, 18 bp, Artificial Sequence
  Synthetic
gcgcaacgtgaacggcgt

SEQ ID NO: 39377 - DNA, 18 bp, Artificial Sequence
  Synthetic
gcgcgtcgttgatgccgt

SEQ ID NO: 39378 - DNA, 20 bp, Artificial Sequence
  Synthetic
taaggtggctttcgtccgcc

SEQ ID NO: 39379 - DNA, 20 bp, Artificial Sequence
  Synthetic
gacggaaagtgaaccgccgc

SEQ ID NO: 39380 - DNA, 19 bp, Artificial Sequence
  Synthetic
ctgttggtcagccgcgcca

SEQ ID NO: 39381 - DNA, 20 bp, Artificial Sequence
  Synthetic
gcccgaacatggtggaaggc

SEQ ID NO: 39382 - DNA, 20 bp, Artificial Sequence
  Synthetic
atacgtgtcggcgcagtgtt

SEQ ID NO: 39383 - DNA, 20 bp, Artificial Sequence
  Synthetic
gatgaaatccctgggcgctt

SEQ ID NO: 39384 - DNA, 22 bp, Artificial Sequence
  Synthetic
actacttcagcggtaatcacct

SEQ ID NO: 39385 - DNA, 19 bp, Artificial Sequence
  Synthetic
tgcggacaaggggatcggg

SEQ ID NO: 39386 - DNA, 22 bp, Artificial Sequence
  Synthetic
tcccatgaaaacaggctgtcgg

SEQ ID NO: 39387 - DNA, 19 bp, Artificial Sequence
  Synthetic
aaacctgcgccgagttcgt

SEQ ID NO: 39388 - DNA, 19 bp, Artificial Sequence
  Synthetic
ccgcccatcaccgccacaa

SEQ ID NO: 39389 - DNA, 19 bp, Artificial Sequence
  Synthetic
atctgccacaacgccgaca

SEQ ID NO: 39390 - DNA, 22 bp, Artificial Sequence
  Synthetic
tacgcagcaagggattgaaggg

SEQ ID NO: 39391 - DNA, 22 bp, Artificial Sequence
  Synthetic
gatgagggagttcatcagggcg

SEQ ID NO: 39392 - DNA, 22 bp, Artificial Sequence
  Synthetic
gacagacagcatttcgatggcg

SEQ ID NO: 39393 - DNA, 20 bp, Artificial Sequence
  Synthetic
agtgtggggaaacgggtcgg

SEQ ID NO: 39394 - DNA, 19 bp, Artificial Sequence
  Synthetic
tgggttcgagcgaggcgga

SEQ ID NO: 39395 - DNA, 22 bp, Artificial Sequence
  Synthetic
aagtccggttgccaaaggatcg

SEQ ID NO: 39396 - DNA, 20 bp, Artificial Sequence
  Synthetic
taggcggctaaatgttcggg

SEQ ID NO: 39397 - DNA, 21 bp, Artificial Sequence
  Synthetic
cgcgttgatgatgtcgaaggc

SEQ ID NO: 39398 - DNA, 19 bp, Artificial Sequence
  Synthetic
gcgcgcaccagcagggatt

SEQ ID NO: 39399 - DNA, 22 bp, Artificial Sequence
  Synthetic
aacaccatcagggtcggaatgc

SEQ ID NO: 39400 - DNA, 18 bp, Artificial Sequence
  Synthetic
tcgtttatccggccgccg

SEQ ID NO: 39401 - DNA, 18 bp, Artificial Sequence
  Synthetic
attcccgtcgtcagcggc

SEQ ID NO: 39402 - DNA, 22 bp, Artificial Sequence
  Synthetic
ctatcaggtcggcgcgattcac

SEQ ID NO: 39403 - DNA, 20 bp, Artificial Sequence
  Synthetic
cctacggcgtggtgatggtc

SEQ ID NO: 39404 - DNA, 21 bp, Artificial Sequence
  Synthetic
ggcagcaacgcctttatcgtg

SEQ ID NO: 39405 - DNA, 18 bp, Artificial Sequence
  Synthetic
aaatcctgcctgccgcgt

SEQ ID NO: 39406 - DNA, 18 bp, Artificial Sequence
  Synthetic
cggcaagggcttcgtcca

SEQ ID NO: 39407 - DNA, 20 bp, Artificial Sequence
  Synthetic
gggtggtcagggtttgctcg

SEQ ID NO: 39408 - DNA, 21 bp, Artificial Sequence
  Synthetic
ccgtagtcgtccaatgcccaa

SEQ ID NO: 39409 - DNA, 20 bp, Artificial Sequence
  Synthetic
aaccatttcgggcgacgtgc

SEQ ID NO: 39410 - DNA, 19 bp, Artificial Sequence
  Synthetic
ggaggctgatgagcgcgga

SEQ ID NO: 39411 - DNA, 18 bp, Artificial Sequence
  Synthetic
cggcgatgcgctgcacta

SEQ ID NO: 39412 - DNA, 23 bp, Artificial Sequence
  Synthetic
aatagcgaccaatcaacaactga

SEQ ID NO: 39413 - DNA, 19 bp, Artificial Sequence
  Synthetic
ggcagcctgaatgcggagg

SEQ ID NO: 39414 - DNA, 19 bp, Artificial Sequence
  Synthetic
ggagtggcaacgccgggaa

SEQ ID NO: 39415 - DNA, 19 bp, Artificial Sequence
  Synthetic
ttgaagccgcggtcttgca

SEQ ID NO: 39416 - DNA, 19 bp, Artificial Sequence
  Synthetic
atgatgcggcagccttcgc

SEQ ID NO: 39417 - DNA, 19 bp, Artificial Sequence
  Synthetic
atcgggttcgcaatgccgt

SEQ ID NO: 39418 - DNA, 22 bp, Artificial Sequence
  Synthetic
caaagtccacccggaaaccacg

SEQ ID NO: 39419 - DNA, 20 bp, Artificial Sequence
  Synthetic
aggtttcgcaggattggcgg

SEQ ID NO: 39420 - DNA, 19 bp, Artificial Sequence
  Synthetic
aacacggcttcgcccaagg

SEQ ID NO: 39421 - DNA, 21 bp, Artificial Sequence
  Synthetic
ttttccgttgtaccgccggag

SEQ ID NO: 39422 - DNA, 21 bp, Artificial Sequence
  Synthetic
gatatgggggacagccacgtc

SEQ ID NO: 39423 - DNA, 20 bp, Artificial Sequence
  Synthetic
gggtcagcggaagaagtcgc

SEQ ID NO: 39424 - DNA, 22 bp, Artificial Sequence
  Synthetic
ccaaggcattttgcagggcttt

SEQ ID NO: 39425 - DNA, 20 bp, Artificial Sequence
  Synthetic
tccatcgcgccttcttcgtc

SEQ ID NO: 39426 - DNA, 18 bp, Artificial Sequence
  Synthetic
ggcggcgattttgcccga

SEQ ID NO: 39427 - DNA, 20 bp, Artificial Sequence
  Synthetic
aatccgggacaagcgtaagg

SEQ ID NO: 39428 - DNA, 20 bp, Artificial Sequence
  Synthetic
gactgtcgaagccgcagcat

SEQ ID NO: 39429 - DNA, 22 bp, Artificial Sequence
  Synthetic
ttggcttttgcttttttgcgcg

SEQ ID NO: 39430 - DNA, 20 bp, Artificial Sequence
  Synthetic
gccgcttcgtaaatcccttg

SEQ ID NO: 39431 - DNA, 21 bp, Artificial Sequence
  Synthetic
cggcatgtgtactgtaagcag

SEQ ID NO: 39432 - DNA, 23 bp, Artificial Sequence
  Synthetic
aatgcaaaaatcaaggctgatcc

SEQ ID NO: 39433 - DNA, 21 bp, Artificial Sequence
  Synthetic
cttcacggtctgcatcagtag

SEQ ID NO: 39434 - DNA, 20 bp, Artificial Sequence
  Synthetic
gcttgctacaggacgcagat

SEQ ID NO: 39435 - DNA, 23 bp, Artificial Sequence
  Synthetic
tcaacagcagatttcaacttcga

SEQ ID NO: 39436 - DNA, 20 bp, Artificial Sequence
  Synthetic
ggcgaccatgccgtacaagg

SEQ ID NO: 39437 - DNA, 19 bp, Artificial Sequence
  Synthetic
catcgccaaagccctcgcc

SEQ ID NO: 39438 - DNA, 22 bp, Artificial Sequence
  Synthetic
aagacaaaaccgacagcaccga

SEQ ID NO: 39439 - DNA, 19 bp, Artificial Sequence
  Synthetic
aaccgtccgcatcgaaccg

SEQ ID NO: 39440 - DNA, 22 bp, Artificial Sequence
  Synthetic
tttttgggacgcatccaaagcc

SEQ ID NO: 39441 - DNA, 22 bp, Artificial Sequence
  Synthetic
cgccgtttggacttgattgacg

SEQ ID NO: 39442 - DNA, 21 bp, Artificial Sequence
  Synthetic
cggttcgtatttggcgaccca

SEQ ID NO: 39443 - DNA, 19 bp, Artificial Sequence
  Synthetic
gcgcgcgcgtgtttgaaag

SEQ ID NO: 39444 - DNA, 22 bp, Artificial Sequence
  Synthetic
tgaatcgtggtttcgatggcgg

SEQ ID NO: 39445 - DNA, 20 bp, Artificial Sequence
  Synthetic
ggacgcggtggtcgttttgc

SEQ ID NO: 39446 - DNA, 20 bp, Artificial Sequence
  Synthetic
gccctgtctttcacggcagg

SEQ ID NO: 39447 - DNA, 19 bp, Artificial Sequence
  Synthetic
tacctacccttgccgccgc

SEQ ID NO: 39448 - DNA, 21 bp, Artificial Sequence
  Synthetic
ggcggtatcgtgttcggtacg

SEQ ID NO: 39449 - DNA, 18 bp, Artificial Sequence
  Synthetic
cggcgttgcccatgctgt

SEQ ID NO: 39450 - DNA, 19 bp, Artificial Sequence
  Synthetic
ttcaaaccggccagacgcg

SEQ ID NO: 39451 - DNA, 20 bp, Artificial Sequence
  Synthetic
ggtagatgtctgccagcgcg

SEQ ID NO: 39452 - DNA, 20 bp, Artificial Sequence
  Synthetic
cattcgcgccgacaatggct

SEQ ID NO: 39453 - DNA, 18 bp, Artificial Sequence
  Synthetic
ctcgaaatcgcccgggct

SEQ ID NO: 39454 - DNA, 20 bp, Artificial Sequence
  Synthetic
aacgccccttcatccgcttc

SEQ ID NO: 39455 - DNA, 22 bp, Artificial Sequence
  Synthetic
tccatcggtgcaatattcggca

SEQ ID NO: 39456 - DNA, 22 bp, Artificial Sequence
  Synthetic
cagcctgaccttatccctgctg

SEQ ID NO: 39457 - DNA, 19 bp, Artificial Sequence
  Synthetic
caaggcatcgccctgctcc

SEQ ID NO: 39458 - DNA, 22 bp, Artificial Sequence
  Synthetic
tgtcgaacttggttgccgatgt

SEQ ID NO: 39459 - DNA, 20 bp, Artificial Sequence
  Synthetic
caaagctgcgccatcccact

SEQ ID NO: 39460 - DNA, 20 bp, Artificial Sequence
  Synthetic
gcggtttgcaaggccgaaga

SEQ ID NO: 39461 - DNA, 20 bp, Artificial Sequence
  Synthetic
cgccgcctcactctacctgc

SEQ ID NO: 39462 - DNA, 22 bp, Artificial Sequence
  Synthetic
cgccttcggcttctataccgac

SEQ ID NO: 39463 - DNA, 20 bp, Artificial Sequence
  Synthetic
gccacgcttttgagctgctg

SEQ ID NO: 39464 - DNA, 22 bp, Artificial Sequence
  Synthetic
ttggatgcgaaccatatccccg

SEQ ID NO: 39465 - DNA, 21 bp, Artificial Sequence
  Synthetic
ctgtttgggtttcggttggcg

SEQ ID NO: 39466 - DNA, 22 bp, Artificial Sequence
  Synthetic
tctgcgattttggggctttcga

SEQ ID NO: 39467 - DNA, 20 bp, Artificial Sequence
  Synthetic
atacttcgccgacgacgctg

SEQ ID NO: 39468 - DNA, 19 bp, Artificial Sequence
  Synthetic
ccgagtgcgcgccatttgc

SEQ ID NO: 39469 - DNA, 21 bp, Artificial Sequence
  Synthetic
catcctcgccattttgcccga

SEQ ID NO: 39470 - DNA, 20 bp, Artificial Sequence
  Synthetic
gaacaggaatttcacgccgc

SEQ ID NO: 39471 - DNA, 18 bp, Artificial Sequence
  Synthetic
gcttctgcggcggcaatc

SEQ ID NO: 39472 - DNA, 22 bp, Artificial Sequence
  Synthetic
cattcgggggcgtttttttcgg

SEQ ID NO: 39473 - DNA, 22 bp, Artificial Sequence
  Synthetic
tgcccttcgaactctacaccgc

SEQ ID NO: 39474 - DNA, 18 bp, Artificial Sequence
  Synthetic
tgcctatgccggcggcta

SEQ ID NO: 39475 - DNA, 19 bp, Artificial Sequence
  Synthetic
gtatgcgccgcctgacacg

SEQ ID NO: 39476 - DNA, 19 bp, Artificial Sequence
  Synthetic
ggcgacattgcccttgcac

SEQ ID NO: 39477 - DNA, 18 bp, Artificial Sequence
  Synthetic
acctcgttgccttgcgcg

SEQ ID NO: 39478 - DNA, 22 bp, Artificial Sequence
  Synthetic
ggcgcgatgtgttctaatacgc

SEQ ID NO: 39479 - DNA, 18 bp, Artificial Sequence
  Synthetic
tcacccccatcggcacca

SEQ ID NO: 39480 - DNA, 21 bp, Artificial Sequence
  Synthetic
cctacctgcgccaagtgttcg

SEQ ID NO: 39481 - DNA, 20 bp, Artificial Sequence
  Synthetic
ggccatctgcgttccagcat

SEQ ID NO: 39482 - DNA, 18 bp, Artificial Sequence
  Synthetic
aagccgcaacagccgcct

SEQ ID NO: 39483 - DNA, 21 bp, Artificial Sequence
  Synthetic
tttggactaccttcccgccgc

SEQ ID NO: 39484 - DNA, 22 bp, Artificial Sequence
  Synthetic
ttcatcttccatcgtcagcggc

SEQ ID NO: 39485 - DNA, 18 bp, Artificial Sequence
  Synthetic
tgcggacagtttcggcgc

SEQ ID NO: 39486 - DNA, 25 bp, Artificial Sequence
  Synthetic
ggaaggtcgtgatttttaacgattc

SEQ ID NO: 39487 - DNA, 22 bp, Artificial Sequence
  Synthetic
acaaacaaactggcgaaccacg

SEQ ID NO: 39488 - DNA, 21 bp, Artificial Sequence
  Synthetic
tggacaaggcgaacaagaaga

SEQ ID NO: 39489 - DNA, 21 bp, Artificial Sequence
  Synthetic
aaaccacctactctgctgaca

SEQ ID NO: 39490 - DNA, 22 bp, Artificial Sequence
  Synthetic
gcaaaaccagcttttgagcgcg

SEQ ID NO: 39491 - DNA, 19 bp, Artificial Sequence
  Synthetic
ttgaagcgcgcgctgaaac

SEQ ID NO: 39492 - DNA, 22 bp, Artificial Sequence
  Synthetic
taccgtcaacgactacctcgcc

SEQ ID NO: 39493 - DNA, 20 bp, Artificial Sequence
  Synthetic
aaagcacattgacgcgggca

SEQ ID NO: 39494 - DNA, 24 bp, Artificial Sequence
  Synthetic
ctttgtttttattggcttccacgc

SEQ ID NO: 39495 - DNA, 22 bp, Artificial Sequence
  Synthetic
tggcgatttcatgcagacaggc

SEQ ID NO: 39496 - DNA, 19 bp, Artificial Sequence
  Synthetic
ataccgcaagctggaggcg

SEQ ID NO: 39497 - DNA, 22 bp, Artificial Sequence
  Synthetic
acactacccggaaggtgtgacc

SEQ ID NO: 39498 - DNA, 19 bp, Artificial Sequence
  Synthetic
tagcggtagccggcgtcca

SEQ ID NO: 39499 - DNA, 20 bp, Artificial Sequence
  Synthetic
gcaggagcggcattgtacgg

SEQ ID NO: 39500 - DNA, 22 bp, Artificial Sequence
  Synthetic
gcattggtttgaccttgacggc

SEQ ID NO: 39501 - DNA, 19 bp, Artificial Sequence
  Synthetic
aggccatgaacggacccgc

SEQ ID NO: 39502 - DNA, 19 bp, Artificial Sequence
  Synthetic
ccgtagaacagggcggcag

SEQ ID NO: 39503 - DNA, 21 bp, Artificial Sequence
  Synthetic
gtaggtctcggtgtcatcgcc

SEQ ID NO: 39504 - DNA, 21 bp, Artificial Sequence
  Synthetic
caacgccaaagcccaagtcct

SEQ ID NO: 39505 - DNA, 21 bp, Artificial Sequence
  Synthetic
ccaaagccgagccgaaactgc

SEQ ID NO: 39506 - DNA, 19 bp, Artificial Sequence
  Synthetic
gacggcggcaaacacatcg

SEQ ID NO: 39507 - DNA, 21 bp, Artificial Sequence
  Synthetic
gttttcgccacaccgcgtatc

SEQ ID NO: 39508 - DNA, 20 bp, Artificial Sequence
  Synthetic
ccgacaggctcatccccacg

SEQ ID NO: 39509 - DNA, 18 bp, Artificial Sequence
  Synthetic
aacgccgcttccgcatcc

SEQ ID NO: 39510 - DNA, 19 bp, Artificial Sequence
  Synthetic
cggtaggccgcgacaaacg

SEQ ID NO: 39511 - DNA, 19 bp, Artificial Sequence
  Synthetic
gcagaagcgggcgacatcc

SEQ ID NO: 39512 - DNA, 22 bp, Artificial Sequence
  Synthetic
gaaatcagccttcagcgcatcg

SEQ ID NO: 39513 - DNA, 18 bp, Artificial Sequence
  Synthetic
gcgcaccgtttccgcatc

SEQ ID NO: 39514 - DNA, 22 bp, Artificial Sequence
  Synthetic
tccgacaaacgcccgtattcct

SEQ ID NO: 39515 - DNA, 19 bp, Artificial Sequence
  Synthetic
gtttcggacacggcggcga

SEQ ID NO: 39516 - DNA, 20 bp, Artificial Sequence
  Synthetic
caccgtatcggggcgtttgc

SEQ ID NO: 39517 - DNA, 21 bp, Artificial Sequence
  Synthetic
taatgtccgcgcatatccgcc

SEQ ID NO: 39518 - DNA, 21 bp, Artificial Sequence
  Synthetic
cccgtacccaaatactcgccc

SEQ ID NO: 39519 - DNA, 22 bp, Artificial Sequence
  Synthetic
cagccgtatgttttgcaggtcg

SEQ ID NO: 39520 - DNA, 21 bp, Artificial Sequence
  Synthetic
atcgcgctagacatcccaacc

SEQ ID NO: 39521 - DNA, 19 bp, Artificial Sequence
  Synthetic
gcagccttgccgccgtcat

SEQ ID NO: 39522 - DNA, 18 bp, Artificial Sequence
  Synthetic
attgcgacaacggcgccg

SEQ ID NO: 39523 - DNA, 23 bp, Artificial Sequence
  Synthetic
atcaactatcctgctatcgtccc

SEQ ID NO: 39524 - DNA, 18 bp, Artificial Sequence
  Synthetic
ccgatgccgtgcgccaat

SEQ ID NO: 39525 - DNA, 21 bp, Artificial Sequence
  Synthetic
ggccggcaaacgccaaaacac

SEQ ID NO: 39526 - DNA, 22 bp, Artificial Sequence
  Synthetic
tttgaaaaggtcaacgcgctgg

SEQ ID NO: 39527 - DNA, 22 bp, Artificial Sequence
  Synthetic
ggatggtcatcatacaggcgcg

SEQ ID NO: 39528 - DNA, 20 bp, Artificial Sequence
  Synthetic
cgaaaacatcggggcggtca

SEQ ID NO: 39529 - DNA, 20 bp, Artificial Sequence
  Synthetic
tgaggttttcgagggccccg

SEQ ID NO: 39530 - DNA, 22 bp, Artificial Sequence
  Synthetic
aagaacttttcggcggcgaagc

SEQ ID NO: 39531 - DNA, 20 bp, Artificial Sequence
  Synthetic
cttcacgccttccttgcagt

SEQ ID NO: 39532 - DNA, 21 bp, Artificial Sequence
  Synthetic
ccgtcaaacttccaacgccca

SEQ ID NO: 39533 - DNA, 18 bp, Artificial Sequence
  Synthetic
catcggcagccaaggcca

SEQ ID NO: 39534 - DNA, 19 bp, Artificial Sequence
  Synthetic
cgattttgcccgaacgcgc

SEQ ID NO: 39535 - DNA, 19 bp, Artificial Sequence
  Synthetic
ccgaaagcgggcttgaccg

SEQ ID NO: 39536 - DNA, 19 bp, Artificial Sequence
  Synthetic
gggcggcttgtccaacgct

SEQ ID NO: 39537 - DNA, 18 bp, Artificial Sequence
  Synthetic
agccgactgcgccgttac

SEQ ID NO: 39538 - DNA, 19 bp, Artificial Sequence
  Synthetic
cgcgccggattcgatgcct

SEQ ID NO: 39539 - DNA, 19 bp, Artificial Sequence
  Synthetic
ttcgccgccttctttgccg

SEQ ID NO: 39540 - DNA, 21 bp, Artificial Sequence
  Synthetic
ttaccaaccccatcgccatcg

SEQ ID NO: 39541 - DNA, 17 bp, Artificial Sequence
  Synthetic
acggcttcgcacgcgat

SEQ ID NO: 39542 - DNA, 21 bp, Artificial Sequence
  Synthetic
cgaccaaccgtttctgtgccg

SEQ ID NO: 39543 - DNA, 19 bp, Artificial Sequence
  Synthetic
gcctgcccgccgtcaaaga

SEQ ID NO: 39544 - DNA, 20 bp, Artificial Sequence
  Synthetic
ccgcgcctccccatctacct

SEQ ID NO: 39545 - DNA, 22 bp, Artificial Sequence
  Synthetic
cataggccgtctgaaaggcagc

SEQ ID NO: 39546 - DNA, 22 bp, Artificial Sequence
  Synthetic
gcagcttcctctctgatacgcc

SEQ ID NO: 39547 - DNA, 18 bp, Artificial Sequence
  Synthetic
cctgcaccagcgcgacaa

SEQ ID NO: 39548 - DNA, 20 bp, Artificial Sequence
  Synthetic
aatgcacttcctccccgacg

SEQ ID NO: 39549 - DNA, 20 bp, Artificial Sequence
  Synthetic
aatcggcggattcgtcacgg

SEQ ID NO: 39550 - DNA, 21 bp, Artificial Sequence
  Synthetic
tgttgtcgatgccttggtcgt

SEQ ID NO: 39551 - DNA, 22 bp, Artificial Sequence
  Synthetic
gttgaccgcattcatcagcacg

SEQ ID NO: 39552 - DNA, 19 bp, Artificial Sequence
  Synthetic
gtgttccgcccggtgtgga

SEQ ID NO: 39553 - DNA, 21 bp, Artificial Sequence
  Synthetic
ggtcactacggcgtactcggc

SEQ ID NO: 39554 - DNA, 22 bp, Artificial Sequence
  Synthetic
ggtggcgatggatttgttcagc

SEQ ID NO: 39555 - DNA, 21 bp, Artificial Sequence
  Synthetic
ccatccttttgaggggcacga

SEQ ID NO: 39556 - DNA, 19 bp, Artificial Sequence
  Synthetic
accgccctgccctgacctt

SEQ ID NO: 39557 - DNA, 22 bp, Artificial Sequence
  Synthetic
cgccgttacggacattcctacg

SEQ ID NO: 39558 - DNA, 22 bp, Artificial Sequence
  Synthetic
gacaaaactgcccccatctccg

SEQ ID NO: 39559 - DNA, 19 bp, Artificial Sequence
  Synthetic
cgtcggtttgggcgacgct

SEQ ID NO: 39560 - DNA, 20 bp, Artificial Sequence
  Synthetic
cgcacaaatcgaagccgacg

SEQ ID NO: 39561 - DNA, 22 bp, Artificial Sequence
  Synthetic
gctgcctgaagtttcagacggc

SEQ ID NO: 39562 - DNA, 21 bp, Artificial Sequence
  Synthetic
ataccgagtttcagcgccgtg

SEQ ID NO: 39563 - DNA, 20 bp, Artificial Sequence
  Synthetic
ctaccgccgtatcaggggct

SEQ ID NO: 39564 - DNA, 21 bp, Artificial Sequence
  Synthetic
atacaccggcaaaagcacccg

SEQ ID NO: 39565 - DNA, 25 bp, Artificial Sequence
  Synthetic
tcaacttcaaacaaactgtctttcc

SEQ ID NO: 39566 - DNA, 21 bp, Artificial Sequence
  Synthetic
ccggcataggttacgaatgtc

SEQ ID NO: 39567 - DNA, 19 bp, Artificial Sequence
  Synthetic
cttgcgcgtccctgccgaa

SEQ ID NO: 39568 - DNA, 21 bp, Artificial Sequence
  Synthetic
cgtcaaagttcggacggcaac

SEQ ID NO: 39569 - DNA, 21 bp, Artificial Sequence
  Synthetic
ttcggtttcaagtagcgcgca

SEQ ID NO: 39570 - DNA, 21 bp, Artificial Sequence
  Synthetic
gaagtacaggtggtgcagcgt

SEQ ID NO: 39571 - DNA, 19 bp, Artificial Sequence
  Synthetic
catacgccgcacaacccgc

SEQ ID NO: 39572 - DNA, 19 bp, Artificial Sequence
  Synthetic
cgcccgagcctgcccaatt

SEQ ID NO: 39573 - DNA, 18 bp, Artificial Sequence
  Synthetic
gcccgtgccaaggcagaa

SEQ ID NO: 39574 - DNA, 21 bp, Artificial Sequence
  Synthetic
ggacgtggagcagatcgaggg

SEQ ID NO: 39575 - DNA, 19 bp, Artificial Sequence
  Synthetic
cgctgtcgcgcaacagggt

SEQ ID NO: 39576 - DNA, 20 bp, Artificial Sequence
  Synthetic
cagcatgagcgcccatttcg

SEQ ID NO: 39577 - DNA, 20 bp, Artificial Sequence
  Synthetic
gcatttccccgttcggaggc

SEQ ID NO: 39578 - DNA, 21 bp, Artificial Sequence
  Synthetic
ccgatgtctgcaatgccaacg

SEQ ID NO: 39579 - DNA, 19 bp, Artificial Sequence
  Synthetic
ggaaacgggcgatggacgg

SEQ ID NO: 39580 - DNA, 22 bp, Artificial Sequence
  Synthetic
ggacaatgccgagcctgaaacg

SEQ ID NO: 39581 - DNA, 21 bp, Artificial Sequence
  Synthetic
tttgattaacaggcaacccgt

SEQ ID NO: 39582 - DNA, 20 bp, Artificial Sequence
  Synthetic
ccagcgcaccgttttcaagc

SEQ ID NO: 39583 - DNA, 19 bp, Artificial Sequence
  Synthetic
gctgccgtacagacgtgcc

SEQ ID NO: 39584 - DNA, 20 bp, Artificial Sequence
  Synthetic
aaccggtttgggtacgctgc

SEQ ID NO: 39585 - DNA, 21 bp, Artificial Sequence
  Synthetic
cacgcacctttgttcctgcct

SEQ ID NO: 39586 - DNA, 18 bp, Artificial Sequence
  Synthetic
gcaccgcgtgggcaaagt

SEQ ID NO: 39587 - DNA, 16 bp, Artificial Sequence
  Synthetic
ttgccgccgcagcctt

SEQ ID NO: 39588 - DNA, 19 bp, Artificial Sequence
  Synthetic
cgcttcatcgccgccctga

SEQ ID NO: 39589 - DNA, 18 bp, Artificial Sequence
  Synthetic
ccctcgtgcgcgaacaca

SEQ ID NO: 39590 - DNA, 21 bp, Artificial Sequence
  Synthetic
gagctgcactatcggcaggag

SEQ ID NO: 39591 - DNA, 22 bp, Artificial Sequence
  Synthetic
gccgaacaacaaatgctgcacc

SEQ ID NO: 39592 - DNA, 18 bp, Artificial Sequence
  Synthetic
acgggtcagggaaacgcg

SEQ ID NO: 39593 - DNA, 20 bp, Artificial Sequence
  Synthetic
gtcggtgcgggtgtacatgc

SEQ ID NO: 39594 - DNA, 20 bp, Artificial Sequence
  Synthetic
cggcaagttcttggacggca

SEQ ID NO: 39595 - DNA, 18 bp, Artificial Sequence
  Synthetic
gcacgatttgcgctccgc

SEQ ID NO: 39596 - DNA, 21 bp, Artificial Sequence
  Synthetic
gcccgattttcccgactgacg

SEQ ID NO: 39597 - DNA, 22 bp, Artificial Sequence
  Synthetic
gcagccgcgcaagtttttcaat

SEQ ID NO: 39598 - DNA, 21 bp, Artificial Sequence
  Synthetic
cattcccgactgccgttcagc

SEQ ID NO: 39599 - DNA, 20 bp, Artificial Sequence
  Synthetic
cgccttactcaaacggcggc

SEQ ID NO: 39600 - DNA, 19 bp, Artificial Sequence
  Synthetic
gaccgccgacatcgaagca

SEQ ID NO: 39601 - DNA, 17 bp, Artificial Sequence
  Synthetic
aaagccgcgccgttgca

SEQ ID NO: 39602 - DNA, 21 bp, Artificial Sequence
  Synthetic
ccgacctgcccgccattaacc

SEQ ID NO: 39603 - DNA, 22 bp, Artificial Sequence
  Synthetic
cctcctaaaccgacactaccgc

SEQ ID NO: 39604 - DNA, 22 bp, Artificial Sequence
  Synthetic
aaccattttttgaaccgccgcc

SEQ ID NO: 39605 - DNA, 21 bp, Artificial Sequence
  Synthetic
gcgcataaacaggaacacgcc

SEQ ID NO: 39606 - DNA, 19 bp, Artificial Sequence
  Synthetic
ggctcgaagggttcggcag

SEQ ID NO: 39607 - DNA, 18 bp, Artificial Sequence
  Synthetic
tgtgcggcggcaactgtc

SEQ ID NO: 39608 - DNA, 21 bp, Artificial Sequence
  Synthetic
cgcgcatttctccgtccaaac

SEQ ID NO: 39609 - DNA, 21 bp, Artificial Sequence
  Synthetic
ccgtgtccaactcgacaagca

SEQ ID NO: 39610 - DNA, 22 bp, Artificial Sequence
  Synthetic
caacgttaccgccgtacaaacc

SEQ ID NO: 39611 - DNA, 20 bp, Artificial Sequence
  Synthetic
gacgtaaagggcggctttgc

SEQ ID NO: 39612 - DNA, 19 bp, Artificial Sequence
  Synthetic
cccggcatggagctttggg

SEQ ID NO: 39613 - DNA, 20 bp, Artificial Sequence
  Synthetic
gtccgacaaacttgccggca

SEQ ID NO: 39614 - DNA, 19 bp, Artificial Sequence
  Synthetic
caactcctgtgcacgcgcc

SEQ ID NO: 39615 - DNA, 22 bp, Artificial Sequence
  Synthetic
ggcagctcgacaaacacgatgt

SEQ ID NO: 39616 - DNA, 22 bp, Artificial Sequence
  Synthetic
cgcttcggcaatattcgaacgc

SEQ ID NO: 39617 - DNA, 19 bp, Artificial Sequence
  Synthetic
ggcggcgacattctgccga

SEQ ID NO: 39618 - DNA, 18 bp, Artificial Sequence
  Synthetic
actcggcaatccgcgcct

SEQ ID NO: 39619 - DNA, 20 bp, Artificial Sequence
  Synthetic
cgtccatcacggttgtcggc

SEQ ID NO: 39620 - DNA, 19 bp, Artificial Sequence
  Synthetic
gcaaaacctgcccgcctcc

SEQ ID NO: 39621 - DNA, 19 bp, Artificial Sequence
  Synthetic
caccgaaccgggagacgct

SEQ ID NO: 39622 - DNA, 20 bp, Artificial Sequence
  Synthetic
catggttacgccgaccagct

SEQ ID NO: 39623 - DNA, 19 bp, Artificial Sequence
  Synthetic
agggcgaacacgaggctca

SEQ ID NO: 39624 - DNA, 19 bp, Artificial Sequence
  Synthetic
ggtttgggtggcggcctga

SEQ ID NO: 39625 - DNA, 22 bp, Artificial Sequence
  Synthetic
gatgtgttcgcggcggatttgc

SEQ ID NO: 39626 - DNA, 18 bp, Artificial Sequence
  Synthetic
ctgctgctgcgcctgcaa

SEQ ID NO: 39627 - DNA, 19 bp, Artificial Sequence
  Synthetic
agcgttgagcgtggcttgg

SEQ ID NO: 39628 - DNA, 21 bp, Artificial Sequence
  Synthetic
ttggaaattcggcggcaaacc

SEQ ID NO: 39629 - DNA, 21 bp, Artificial Sequence
  Synthetic
tgattctggcgttgcagtccg

SEQ ID NO: 39630 - DNA, 20 bp, Artificial Sequence
  Synthetic
gcaaacctgcccgaaaacgc

SEQ ID NO: 39631 - DNA, 20 bp, Artificial Sequence
  Synthetic
cgatttgccgcaaacccctg

SEQ ID NO: 39632 - DNA, 19 bp, Artificial Sequence
  Synthetic
ccgctaccacgccgaagtc

SEQ ID NO: 39633 - DNA, 21 bp, Artificial Sequence
  Synthetic
ttcttgatgggcgtcttgcgt

SEQ ID NO: 39634 - DNA, 19 bp, Artificial Sequence
  Synthetic
gaaggcatcggaagcggca

SEQ ID NO: 39635 - DNA, 20 bp, Artificial Sequence
  Synthetic
cacgtttttcttggcggcgg

SEQ ID NO: 39636 - DNA, 20 bp, Artificial Sequence
  Synthetic
aaggtatcggctgcaacggc

SEQ ID NO: 39637 - DNA, 18 bp, Artificial Sequence
  Synthetic
acgactgccgcgctttca

SEQ ID NO: 39638 - DNA, 22 bp, Artificial Sequence
  Synthetic
tgcccgcttctttgagtatcgg

SEQ ID NO: 39639 - DNA, 24 bp, Artificial Sequence
  Synthetic
tggttttgttttggtaatggcaac

SEQ ID NO: 39640 - DNA, 22 bp, Artificial Sequence
  Synthetic
tgattaaccaaatcaacgccgc

SEQ ID NO: 39641 - DNA, 24 bp, Artificial Sequence
  Synthetic
cgatgtagaagagcctgaattacc

SEQ ID NO: 39642 - DNA, 22 bp, Artificial Sequence
  Synthetic
ttcatgaaacagaaatccgcca

SEQ ID NO: 39643 - DNA, 20 bp, Artificial Sequence
  Synthetic
tttttggaaagcctgccgaa

SEQ ID NO: 39644 - DNA, 19 bp, Artificial Sequence
  Synthetic
ctgaggcttgaccccgtcg

SEQ ID NO: 39645 - DNA, 20 bp, Artificial Sequence
  Synthetic
gatcgcctggcaatcctgtc

SEQ ID NO: 39646 - DNA, 21 bp, Artificial Sequence
  Synthetic
gcagaaaatgcctgctgaccg

SEQ ID NO: 39647 - DNA, 19 bp, Artificial Sequence
  Synthetic
cggatatggccgtcgcaca

SEQ ID NO: 39648 - DNA, 20 bp, Artificial Sequence
  Synthetic
gcagtgcgcccaatccattg

SEQ ID NO: 39649 - DNA, 21 bp, Artificial Sequence
  Synthetic
atatccggcatagggcttgcc

SEQ ID NO: 39650 - DNA, 19 bp, Artificial Sequence
  Synthetic
gaaggaaaccgcgcctcgt

SEQ ID NO: 39651 - DNA, 19 bp, Artificial Sequence
  Synthetic
gccggtgtgcagctcgaca

SEQ ID NO: 39652 - DNA, 22 bp, Artificial Sequence
  Synthetic
agttcctgactgccgtaccacg

SEQ ID NO: 39653 - DNA, 20 bp, Artificial Sequence
  Synthetic
ggccccagataggcgatggt

SEQ ID NO: 39654 - DNA, 19 bp, Artificial Sequence
  Synthetic
gcgagttgggacgggttgg

SEQ ID NO: 39655 - DNA, 20 bp, Artificial Sequence
  Synthetic
cgcatagcggcacaaaagcc

SEQ ID NO: 39656 - DNA, 19 bp, Artificial Sequence
  Synthetic
cgtaggcctcggcgtcatc

SEQ ID NO: 39657 - DNA, 19 bp, Artificial Sequence
  Synthetic
ggttgctacggcccgctga

SEQ ID NO: 39658 - DNA, 21 bp, Artificial Sequence
  Synthetic
aagggtcggtcaatggttcgc

SEQ ID NO: 39659 - DNA, 18 bp, Artificial Sequence
  Synthetic
cgctgatgttggcggggt

SEQ ID NO: 39660 - DNA, 19 bp, Artificial Sequence
  Synthetic
tgcggcaaggttgaccagc

SEQ ID NO: 39661 - DNA, 21 bp, Artificial Sequence
  Synthetic
gccttcccaatagggcggacg

SEQ ID NO: 39662 - DNA, 18 bp, Artificial Sequence
  Synthetic
agccctttcgccgccaaa

SEQ ID NO: 39663 - DNA, 18 bp, Artificial Sequence
  Synthetic
ccagcgcatcaacgtgcg

SEQ ID NO: 39664 - DNA, 19 bp, Artificial Sequence
  Synthetic
tgaccgacgcaatccacgg

SEQ ID NO: 39665 - DNA, 20 bp, Artificial Sequence
  Synthetic
cgacgccttcaaagccgagc

SEQ ID NO: 39666 - DNA, 19 bp, Artificial Sequence
  Synthetic
ccctgcgggtctttccacg

SEQ ID NO: 39667 - DNA, 22 bp, Artificial Sequence
  Synthetic
gccttatctttcaacgcgtcgc

SEQ ID NO: 39668 - DNA, 19 bp, Artificial Sequence
  Synthetic
gcgcggtcagcctgcgtat

SEQ ID NO: 39669 - DNA, 19 bp, Artificial Sequence
  Synthetic
cgtaggcgggcgtattggc

SEQ ID NO: 39670 - DNA, 18 bp, Artificial Sequence
  Synthetic
aacgggctgcttgtcggc

SEQ ID NO: 39671 - DNA, 25 bp, Artificial Sequence
  Synthetic
tctaacaatatcgccatatttgggc

SEQ ID NO: 39672 - DNA, 22 bp, Artificial Sequence
  Synthetic
cttcctgctgcatcagttcggc

SEQ ID NO: 39673 - DNA, 19 bp, Artificial Sequence
  Synthetic
gctactcgcgcgcccaaca

SEQ ID NO: 39674 - DNA, 22 bp, Artificial Sequence
  Synthetic
actacgcaaacgaagccgaaca

SEQ ID NO: 39675 - DNA, 22 bp, Artificial Sequence
  Synthetic
gtttccctcatgcacgaagccg

SEQ ID NO: 39676 - DNA, 22 bp, Artificial Sequence
  Synthetic
gcgacaatcccgtcctgattgc

SEQ ID NO: 39677 - DNA, 22 bp, Artificial Sequence
  Synthetic
aaacccacgaagcctcattggg

SEQ ID NO: 39678 - DNA, 18 bp, Artificial Sequence
  Synthetic
gcttgcctgcggcgcaat

SEQ ID NO: 39679 - DNA, 18 bp, Artificial Sequence
  Synthetic
acgccctgaacactgccg

SEQ ID NO: 39680 - DNA, 21 bp, Artificial Sequence
  Synthetic
cgataacaccgtcttcgcggc

SEQ ID NO: 39681 - DNA, 21 bp, Artificial Sequence
  Synthetic
gggcaaaccggcaatcgaatg

SEQ ID NO: 39682 - DNA, 19 bp, Artificial Sequence
  Synthetic
ctgcctgtcccaatgcggc

SEQ ID NO: 39683 - DNA, 19 bp, Artificial Sequence
  Synthetic
gttgcggcggtattgcagc

SEQ ID NO: 39684 - DNA, 22 bp, Artificial Sequence
  Synthetic
aacgatctcgacgtggaaaccc

SEQ ID NO: 39685 - DNA, 21 bp, Artificial Sequence
  Synthetic
aaacaatcccaccgtggtcgc

SEQ ID NO: 39686 - DNA, 21 bp, Artificial Sequence
  Synthetic
gtcgcaagaactcagccgcct

SEQ ID NO: 39687 - DNA, 19 bp, Artificial Sequence
  Synthetic
cacccgccttcggcttcga

SEQ ID NO: 39688 - DNA, 22 bp, Artificial Sequence
  Synthetic
agaaggattatctcgcgctcgc

SEQ ID NO: 39689 - DNA, 19 bp, Artificial Sequence
  Synthetic
gggcaggtggcgcaattcc

SEQ ID NO: 39690 - DNA, 19 bp, Artificial Sequence
  Synthetic
ccggacttgcccatacccg

SEQ ID NO: 39691 - DNA, 22 bp, Artificial Sequence
  Synthetic
cgctcgaaaccctcgtttcaga

SEQ ID NO: 39692 - DNA, 20 bp, Artificial Sequence
  Synthetic
gacagtgcgctggatgcaac

SEQ ID NO: 39693 - DNA, 22 bp, Artificial Sequence
  Synthetic
aaaacccagcctatcccgacac

SEQ ID NO: 39694 - DNA, 21 bp, Artificial Sequence
  Synthetic
ccgtgcagacggttactgggc

SEQ ID NO: 39695 - DNA, 18 bp, Artificial Sequence
  Synthetic
acctgccgctgctgacca

SEQ ID NO: 39696 - DNA, 22 bp, Artificial Sequence
  Synthetic
tttcgccaaatcggacggatcg

SEQ ID NO: 39697 - DNA, 20 bp, Artificial Sequence
  Synthetic
tgccgtacatcgccgaaagc

SEQ ID NO: 39698 - DNA, 20 bp, Artificial Sequence
  Synthetic
aaacgggcgattgcaaaccg

SEQ ID NO: 39699 - DNA, 19 bp, Artificial Sequence
  Synthetic
aaaccgtccgccgtatcgc

SEQ ID NO: 39700 - DNA, 18 bp, Artificial Sequence
  Synthetic
ttgcgcgtccctgccgaa

SEQ ID NO: 39701 - DNA, 19 bp, Artificial Sequence
  Synthetic
gacgcgcggtcatcaggga

SEQ ID NO: 39702 - DNA, 18 bp, Artificial Sequence
  Synthetic
tgaagggaacacgggcgc

SEQ ID NO: 39703 - DNA, 21 bp, Artificial Sequence
  Synthetic
aagaatttccgcaacatcgcc

SEQ ID NO: 39704 - DNA, 21 bp, Artificial Sequence
  Synthetic
cgtcttggtgttccgcatcgg

SEQ ID NO: 39705 - DNA, 21 bp, Artificial Sequence
  Synthetic
gcgttgcccaagtcgtatcgt

SEQ ID NO: 39706 - DNA, 20 bp, Artificial Sequence
  Synthetic
gagctgccgtccgataaccg

SEQ ID NO: 39707 - DNA, 18 bp, Artificial Sequence
  Synthetic
gttccgccgcaatgccga

SEQ ID NO: 39708 - DNA, 18 bp, Artificial Sequence
  Synthetic
ttcgcacccgtccgcaaa

SEQ ID NO: 39709 - DNA, 20 bp, Artificial Sequence
  Synthetic
cgaacggcgaagaaatgcgc

SEQ ID NO: 39710 - DNA, 19 bp, Artificial Sequence
  Synthetic
cacccgaaccgccgagcat

SEQ ID NO: 39711 - DNA, 22 bp, Artificial Sequence
  Synthetic
gtccgcaccggcaaaatcaaac

SEQ ID NO: 39712 - DNA, 20 bp, Artificial Sequence
  Synthetic
caggttgccttccacccttc

SEQ ID NO: 39713 - DNA, 19 bp, Artificial Sequence
  Synthetic
cctgctcactcagggcgac

SEQ ID NO: 39714 - DNA, 21 bp, Artificial Sequence
  Synthetic
tgcatcggttatcagccgctt

SEQ ID NO: 39715 - DNA, 22 bp, Artificial Sequence
  Synthetic
gcgaaggcgagatatggtttgc

SEQ ID NO: 39716 - DNA, 22 bp, Artificial Sequence
  Synthetic
acttgattttgcgccaaaccgg

SEQ ID NO: 39717 - DNA, 20 bp, Artificial Sequence
  Synthetic
cgaagccatcggcacactcg

SEQ ID NO: 39718 - DNA, 21 bp, Artificial Sequence
  Synthetic
agccggcatcaaactcatcca

SEQ ID NO: 39719 - DNA, 20 bp, Artificial Sequence
  Synthetic
gcttgttcagaccgcgcagg

SEQ ID NO: 39720 - DNA, 19 bp, Artificial Sequence
  Synthetic
gcatcagggcgtgggacag

SEQ ID NO: 39721 - DNA, 18 bp, Artificial Sequence
  Synthetic
cgcccttgtttgccgcct

SEQ ID NO: 39722 - DNA, 21 bp, Artificial Sequence
  Synthetic
gggaaccattacgccgtcggc

SEQ ID NO: 39723 - DNA, 19 bp, Artificial Sequence
  Synthetic
ttgccttttgcggtgcggc

SEQ ID NO: 39724 - DNA, 19 bp, Artificial Sequence
  Synthetic
ttcgccggtctgctgatcg

SEQ ID NO: 39725 - DNA, 19 bp, Artificial Sequence
  Synthetic
ccttctgcgacacgcccgt

SEQ ID NO: 39726 - DNA, 20 bp, Artificial Sequence
  Synthetic
cacgcccgaaaccgaaaccg

SEQ ID NO: 39727 - DNA, 20 bp, Artificial Sequence
  Synthetic
cgagagcatcgtcgggttgt

SEQ ID NO: 39728 - DNA, 21 bp, Artificial Sequence
  Synthetic
catgtgcgcgtaaccaacacc

SEQ ID NO: 39729 - DNA, 19 bp, Artificial Sequence
  Synthetic
gcgtttgccgcgtccaacg

SEQ ID NO: 39730 - DNA, 22 bp, Artificial Sequence
  Synthetic
tcgtgcagcttcatcgtcaaca

SEQ ID NO: 39731 - DNA, 22 bp, Artificial Sequence
  Synthetic
ccgaacaccccttttcagacgg

SEQ ID NO: 39732 - DNA, 19 bp, Artificial Sequence
  Synthetic
accgcgcccgccataaacg

SEQ ID NO: 39733 - DNA, 19 bp, Artificial Sequence
  Synthetic
cacaagtccgccggcaaca

SEQ ID NO: 39734 - DNA, 22 bp, Artificial Sequence
  Synthetic
tcttcggcagattcgacttgcg

SEQ ID NO: 39735 - DNA, 19 bp, Artificial Sequence
  Synthetic
ccagtttggacggcaggct

SEQ ID NO: 39736 - DNA, 22 bp, Artificial Sequence
  Synthetic
ggcagatttgttcgagccttgc

SEQ ID NO: 39737 - DNA, 21 bp, Artificial Sequence
  Synthetic
cggacaaagcctcggagaagc

SEQ ID NO: 39738 - DNA, 20 bp, Artificial Sequence
  Synthetic
tggtacgccgatgccgtact

SEQ ID NO: 39739 - DNA, 19 bp, Artificial Sequence
  Synthetic
acttctggacgctgctgcc

SEQ ID NO: 39740 - DNA, 19 bp, Artificial Sequence
  Synthetic
ggaagccgttccttccgct

SEQ ID NO: 39741 - DNA, 22 bp, Artificial Sequence
  Synthetic
cgtcgtcgctttcttcaaaggc

SEQ ID NO: 39742 - DNA, 22 bp, Artificial Sequence
  Synthetic
cttaaacgcgcttctttgccgc

SEQ ID NO: 39743 - DNA, 18 bp, Artificial Sequence
  Synthetic
cccagccggtgtgcgttt

SEQ ID NO: 39744 - DNA, 19 bp, Artificial Sequence
  Synthetic
caacgcgctgtccgactgg

SEQ ID NO: 39745 - DNA, 22 bp, Artificial Sequence
  Synthetic
ggtgcatacgccgaagtcatcg

SEQ ID NO: 39746 - DNA, 19 bp, Artificial Sequence
  Synthetic
atcgccgtggacgacatcg

SEQ ID NO: 39747 - DNA, 18 bp, Artificial Sequence
  Synthetic
ccatgcttgccgaacgcg

SEQ ID NO: 39748 - DNA, 21 bp, Artificial Sequence
  Synthetic
cgatagctgccgttacgcagc

SEQ ID NO: 39749 - DNA, 22 bp, Artificial Sequence
  Synthetic
cgcatcgagataaagctgcggc

SEQ ID NO: 39750 - DNA, 21 bp, Artificial Sequence
  Synthetic
catttccttctccgccacgcg

SEQ ID NO: 39751 - DNA, 18 bp, Artificial Sequence
  Synthetic
gccgccgttgccgaaaca

SEQ ID NO: 39752 - DNA, 22 bp, Artificial Sequence
  Synthetic
ggcatcttccgccgtttcaaac

SEQ ID NO: 39753 - DNA, 22 bp, Artificial Sequence
  Synthetic
ctcgtcctgatcgaaaccgacc

SEQ ID NO: 39754 - DNA, 20 bp, Artificial Sequence
  Synthetic
taaagggcagccccagcgtg

SEQ ID NO: 39755 - DNA, 18 bp, Artificial Sequence
  Synthetic
gcgacccagccgccaaat

SEQ ID NO: 39756 - DNA, 20 bp, Artificial Sequence
  Synthetic
cgctgatgacgctcgaaggc

SEQ ID NO: 39757 - DNA, 19 bp, Artificial Sequence
  Synthetic
gccgactgcacgtccgcat

SEQ ID NO: 39758 - DNA, 21 bp, Artificial Sequence
  Synthetic
ctgctgccgctgaaatccaca

SEQ ID NO: 39759 - DNA, 18 bp, Artificial Sequence
  Synthetic
ccgccacatcgggcgaaa

SEQ ID NO: 39760 - DNA, 20 bp, Artificial Sequence
  Synthetic
actgctccaaaccgacctgc

SEQ ID NO: 39761 - DNA, 18 bp, Artificial Sequence
  Synthetic
tcctgctgcaacgcaccc

SEQ ID NO: 39762 - DNA, 21 bp, Artificial Sequence
  Synthetic
agctgtcggcgatttgatccg

SEQ ID NO: 39763 - DNA, 22 bp, Artificial Sequence
  Synthetic
cggcagtgccatcatcaaaagc

SEQ ID NO: 39764 - DNA, 19 bp, Artificial Sequence
  Synthetic
ggcacgtccgtcacccaca

SEQ ID NO: 39765 - DNA, 19 bp, Artificial Sequence
  Synthetic
accgtggccgaagtgttcg

SEQ ID NO: 39766 - DNA, 20 bp, Artificial Sequence
  Synthetic
tcagacggcattcgggcaaa

SEQ ID NO: 39767 - DNA, 21 bp, Artificial Sequence
  Synthetic
accaattacgatgtgtgcgtt

SEQ ID NO: 39768 - DNA, 20 bp, Artificial Sequence
  Synthetic
acgtttggctgcgatatcag

SEQ ID NO: 39769 - DNA, 21 bp, Artificial Sequence
  Synthetic
tttggttgcatttgccaagac

SEQ ID NO: 39770 - DNA, 22 bp, Artificial Sequence
  Synthetic
gtatccgccaaacccttacgcg

SEQ ID NO: 39771 - DNA, 18 bp, Artificial Sequence
  Synthetic
acgcccaacgaggcttcg

SEQ ID NO: 39772 - DNA, 20 bp, Artificial Sequence
  Synthetic
gcgaaccggattccaaggcg

SEQ ID NO: 39773 - DNA, 22 bp, Artificial Sequence
  Synthetic
tcgtcaatcaccatcaccacgc

SEQ ID NO: 39774 - DNA, 20 bp, Artificial Sequence
  Synthetic
accagccccaacatccggaa

SEQ ID NO: 39775 - DNA, 22 bp, Artificial Sequence
  Synthetic
caaaacccaaggataggcctcc

SEQ ID NO: 39776 - DNA, 22 bp, Artificial Sequence
  Synthetic
attagacagggcggagatgtgc

SEQ ID NO: 39777 - DNA, 19 bp, Artificial Sequence
  Synthetic
cctgcgggcgatggacact

SEQ ID NO: 39778 - DNA, 20 bp, Artificial Sequence
  Synthetic
tttgtcggtttcgcggctgg

SEQ ID NO: 39779 - DNA, 21 bp, Artificial Sequence
  Synthetic
taacgcgcgataaaggggacg

SEQ ID NO: 39780 - DNA, 22 bp, Artificial Sequence
  Synthetic
aaggttgcggaatgtgtgagga

SEQ ID NO: 39781 - DNA, 22 bp, Artificial Sequence
  Synthetic
gctgcgacagaaagcaccaatg

SEQ ID NO: 39782 - DNA, 22 bp, Artificial Sequence
  Synthetic
aatggtgcgttccatgctgtcc

SEQ ID NO: 39783 - DNA, 19 bp, Artificial Sequence
  Synthetic
caaaccggccacctgtgca

SEQ ID NO: 39784 - DNA, 20 bp, Artificial Sequence
  Synthetic
gccccgtccaagaaagcgtc

SEQ ID NO: 39785 - DNA, 19 bp, Artificial Sequence
  Synthetic
ggcagcgtcgaccagcagt

SEQ ID NO: 39786 - DNA, 19 bp, Artificial Sequence
  Synthetic
cctgtccctcgtcgttgcc

SEQ ID NO: 39787 - DNA, 21 bp, Artificial Sequence
  Synthetic
tcgtcccctacttcaccccct

SEQ ID NO: 39788 - DNA, 20 bp, Artificial Sequence
  Synthetic
acgaagaatgcagccccgac

SEQ ID NO: 39789 - DNA, 22 bp, Artificial Sequence
  Synthetic
cacatcctcctccaacagctcc

SEQ ID NO: 39790 - DNA, 22 bp, Artificial Sequence
  Synthetic
tgggcaaagccttgaaacagcc

SEQ ID NO: 39791 - DNA, 20 bp, Artificial Sequence
  Synthetic
ccggttgcggacaagtcgat

SEQ ID NO: 39792 - DNA, 22 bp, Artificial Sequence
  Synthetic
ccacgcttttgcccaacttgac

SEQ ID NO: 39793 - DNA, 24 bp, Artificial Sequence
  Synthetic
gttcagacggcattgtttatctgt

SEQ ID NO: 39794 - DNA, 20 bp, Artificial Sequence
  Synthetic
aaatgtgggcaatatcgggc

SEQ ID NO: 39795 - DNA, 21 bp, Artificial Sequence
  Synthetic
tttgaaagcggatgggggacg

SEQ ID NO: 39796 - DNA, 21 bp, Artificial Sequence
  Synthetic
ttttccatgctgaccgtgccg

SEQ ID NO: 39797 - DNA, 22 bp, Artificial Sequence
  Synthetic
atttgccatattgccgccgaag

SEQ ID NO: 39798 - DNA, 22 bp, Artificial Sequence
  Synthetic
tgccggctgatattgaggtagc

SEQ ID NO: 39799 - DNA, 19 bp, Artificial Sequence
  Synthetic
cgggcgagcctttgagggt

SEQ ID NO: 39800 - DNA, 20 bp, Artificial Sequence
  Synthetic
ctgcttccgtaccggcgatc

SEQ ID NO: 39801 - DNA, 21 bp, Artificial Sequence
  Synthetic
cggtggaggacaggaatgtgc

SEQ ID NO: 39802 - DNA, 20 bp, Artificial Sequence
  Synthetic
cccccagcctggcatcgatg

SEQ ID NO: 39803 - DNA, 18 bp, Artificial Sequence
  Synthetic
ggtgcgccgcaaaccgat

SEQ ID NO: 39804 - DNA, 19 bp, Artificial Sequence
  Synthetic
ggtaacgtccgcgccccat

SEQ ID NO: 39805 - DNA, 19 bp, Artificial Sequence
  Synthetic
cgtcgcgccaggtttgacg

SEQ ID NO: 39806 - DNA, 21 bp, Artificial Sequence
  Synthetic
ccgtttggcagccagaattcg

SEQ ID NO: 39807 - DNA, 22 bp, Artificial Sequence
  Synthetic
tcgatacgcaacgccataacgt

SEQ ID NO: 39808 - DNA, 22 bp, Artificial Sequence
  Synthetic
agaacgtcggtgtctttgagca

SEQ ID NO: 39809 - DNA, 18 bp, Artificial Sequence
  Synthetic
gcacgccccaaaatcgcc

SEQ ID NO: 39810 - DNA, 22 bp, Artificial Sequence
  Synthetic
acacgttgtcgatttggcaccc

SEQ ID NO: 39811 - DNA, 19 bp, Artificial Sequence
  Synthetic
tccgacagggacggacagc

SEQ ID NO: 39812 - DNA, 19 bp, Artificial Sequence
  Synthetic
ggtcatgctggtcgcccat

SEQ ID NO: 39813 - DNA, 20 bp, Artificial Sequence
  Synthetic
actgtggcagaccgttaccg

SEQ ID NO: 39814 - DNA, 18 bp, Artificial Sequence
  Synthetic
cgggctgttgcgccaaca

SEQ ID NO: 39815 - DNA, 18 bp, Artificial Sequence
  Synthetic
ggcgcgctttggggtgtt

SEQ ID NO: 39816 - DNA, 22 bp, Artificial Sequence
  Synthetic
acgttttttgctgttggacggc

SEQ ID NO: 39817 - DNA, 20 bp, Artificial Sequence
  Synthetic
cagggttgccattcgggggt

SEQ ID NO: 39818 - DNA, 19 bp, Artificial Sequence
  Synthetic
ttccatcacttgcgccgcc

SEQ ID NO: 39819 - DNA, 19 bp, Artificial Sequence
  Synthetic
cggcgacggagtgcgtact

SEQ ID NO: 39820 - DNA, 20 bp, Artificial Sequence
  Synthetic
cccggcagtcgattacccag

SEQ ID NO: 39821 - DNA, 18 bp, Artificial Sequence
  Synthetic
catcggatgccgcgccaa

SEQ ID NO: 39822 - DNA, 21 bp, Artificial Sequence
  Synthetic
cgactgccgttccgaaggtca

SEQ ID NO: 39823 - DNA, 19 bp, Artificial Sequence
  Synthetic
cgccgaaccaaaccagccc

SEQ ID NO: 39824 - DNA, 19 bp, Artificial Sequence
  Synthetic
gcccgatggtgcgcctgaa

SEQ ID NO: 39825 - DNA, 18 bp, Artificial Sequence
  Synthetic
gcgcatcgccattgtccg

SEQ ID NO: 39826 - DNA, 21 bp, Artificial Sequence
  Synthetic
gcaaaccgcgtcgaatacgtc

SEQ ID NO: 39827 - DNA, 19 bp, Artificial Sequence
  Synthetic
cccgacgatggggctgaac

SEQ ID NO: 39828 - DNA, 21 bp, Artificial Sequence
  Synthetic
ggattttcagagcctccgccg

SEQ ID NO: 39829 - DNA, 20 bp, Artificial Sequence
  Synthetic
cgaagaaatcgcccgcaccg

SEQ ID NO: 39830 - DNA, 21 bp, Artificial Sequence
  Synthetic
aagccagcatcctgccggata

SEQ ID NO: 39831 - DNA, 22 bp, Artificial Sequence
  Synthetic
tgacctgtaccggtgcactttc

SEQ ID NO: 39832 - DNA, 22 bp, Artificial Sequence
  Synthetic
tacggatctggtgggaaagggc

SEQ ID NO: 39833 - DNA, 22 bp, Artificial Sequence
  Synthetic
ccgtgccacggttcgaaattcg

SEQ ID NO: 39834 - DNA, 18 bp, Artificial Sequence
  Synthetic
gcggcgggcaaaggcatt

SEQ ID NO: 39835 - DNA, 20 bp, Artificial Sequence
  Synthetic
cgcgtttcgaattccgctgg

SEQ ID NO: 39836 - DNA, 19 bp, Artificial Sequence
  Synthetic
gtaaccggccgtccgcaga

SEQ ID NO: 39837 - DNA, 22 bp, Artificial Sequence
  Synthetic
gtgaaggcgttgatgagttcgc

SEQ ID NO: 39838 - DNA, 21 bp, Artificial Sequence
  Synthetic
tgtgccgctgttttttcccgt

SEQ ID NO: 39839 - DNA, 19 bp, Artificial Sequence
  Synthetic
caaaatcctgcgccgccca

SEQ ID NO: 39840 - DNA, 22 bp, Artificial Sequence
  Synthetic
tggagcgaggcgtattacaccg

SEQ ID NO: 39841 - DNA, 22 bp, Artificial Sequence
  Synthetic
ggtgcttggtgtcgattttgcc

SEQ ID NO: 39842 - DNA, 21 bp, Artificial Sequence
  Synthetic
atccaccctgcccgcctttta

SEQ ID NO: 39843 - DNA, 21 bp, Artificial Sequence
  Synthetic
atccgctgttttgcttcgggc

SEQ ID NO: 39844 - DNA, 20 bp, Artificial Sequence
  Synthetic
cagcgcgccttgaatttcgc

SEQ ID NO: 39845 - DNA, 20 bp, Artificial Sequence
  Synthetic
atggcgatgcgcggtttgtg

SEQ ID NO: 39846 - DNA, 20 bp, Artificial Sequence
  Synthetic
ttttcatcgggcggggaagc

SEQ ID NO: 39847 - DNA, 20 bp, Artificial Sequence
  Synthetic
gcaggttcggtttttgcgcc

SEQ ID NO: 39848 - DNA, 18 bp, Artificial Sequence
  Synthetic
gctgccgatgcctttggc

SEQ ID NO: 39849 - DNA, 22 bp, Artificial Sequence
  Synthetic
caggttacgatggtgtggtccg

SEQ ID NO: 39850 - DNA, 22 bp, Artificial Sequence
  Synthetic
ttgaccgaggtgtttctgcagg

SEQ ID NO: 39851 - DNA, 19 bp, Artificial Sequence
  Synthetic
acggaacagacgggggcga

SEQ ID NO: 39852 - DNA, 19 bp, Artificial Sequence
  Synthetic
tgtttcatgcgccgtgcgg

SEQ ID NO: 39853 - DNA, 19 bp, Artificial Sequence
  Synthetic
cttgaaaccggcgttgcgg

SEQ ID NO: 39854 - DNA, 22 bp, Artificial Sequence
  Synthetic
aatcaaacccgaaaaacgcggc

SEQ ID NO: 39855 - DNA, 24 bp, Artificial Sequence
  Synthetic
tttccaagtcaagcctacattcat

SEQ ID NO: 39856 - DNA, 21 bp, Artificial Sequence
  Synthetic
aaccgcccgtaatccaaagca

SEQ ID NO: 39857 - DNA, 19 bp, Artificial Sequence
  Synthetic
ggccggcgtagttgtggct

SEQ ID NO: 39858 - DNA, 19 bp, Artificial Sequence
  Synthetic
gcgcttttcggcagggtgc

SEQ ID NO: 39859 - DNA, 19 bp, Artificial Sequence
  Synthetic
aagacgtacaccgccgcac

SEQ ID NO: 39860 - DNA, 19 bp, Artificial Sequence
  Synthetic
cccgaaaacggcaccgtgg

SEQ ID NO: 39861 - DNA, 19 bp, Artificial Sequence
  Synthetic
gggaatctgcccccggatg

SEQ ID NO: 39862 - DNA, 18 bp, Artificial Sequence
  Synthetic
gcccaaaatcggcgcggt

SEQ ID NO: 39863 - DNA, 20 bp, Artificial Sequence
  Synthetic
gtcgggcaagccagctttcg

SEQ ID NO: 39864 - DNA, 18 bp, Artificial Sequence
  Synthetic
atttccggcgcgcctgct

SEQ ID NO: 39865 - DNA, 22 bp, Artificial Sequence
  Synthetic
acgatttgtggaatcctgccga

SEQ ID NO: 39866 - DNA, 19 bp, Artificial Sequence
  Synthetic
tcgtcaaagccgcgtgtgg

SEQ ID NO: 39867 - DNA, 21 bp, Artificial Sequence
  Synthetic
ctcctcgtgctgctggtcatc

SEQ ID NO: 39868 - DNA, 20 bp, Artificial Sequence
  Synthetic
caaaaccacatccgccgcac

SEQ ID NO: 39869 - DNA, 18 bp, Artificial Sequence
  Synthetic
tgccgccgatgaagccct

SEQ ID NO: 39870 - DNA, 20 bp, Artificial Sequence
  Synthetic
caaagacccctacgccctgc

SEQ ID NO: 39871 - DNA, 20 bp, Artificial Sequence
  Synthetic
gagttgggcgcggttaacga

SEQ ID NO: 39872 - DNA, 19 bp, Artificial Sequence
  Synthetic
ggcaaagccgtggcacagg

SEQ ID NO: 39873 - DNA, 19 bp, Artificial Sequence
  Synthetic
gcggtgggcggcaggattt

SEQ ID NO: 39874 - DNA, 20 bp, Artificial Sequence
  Synthetic
cgataaagcccggggcgacg

SEQ ID NO: 39875 - DNA, 22 bp, Artificial Sequence
  Synthetic
ccgctgtccgccggataagttg

SEQ ID NO: 39876 - DNA, 22 bp, Artificial Sequence
  Synthetic
agggatgctgatgttggcaagg

SEQ ID NO: 39877 - DNA, 19 bp, Artificial Sequence
  Synthetic
tagctttcggtggcggcaa

SEQ ID NO: 39878 - DNA, 18 bp, Artificial Sequence
  Synthetic
ggcggcgttgcctgcaat

SEQ ID NO: 39879 - DNA, 21 bp, Artificial Sequence
  Synthetic
cttgcctgttttgcggtagcc

SEQ ID NO: 39880 - DNA, 23 bp, Artificial Sequence
  Synthetic
cgcatgttgtgagaaatgcttaa

SEQ ID NO: 39881 - DNA, 20 bp, Artificial Sequence
  Synthetic
aaacagcagcacaaccagaa

SEQ ID NO: 39882 - DNA, 21 bp, Artificial Sequence
  Synthetic
gcagaaaactggactttgcgt

SEQ ID NO: 39883 - DNA, 20 bp, Artificial Sequence
  Synthetic
cgggcccaggattaccttct

SEQ ID NO: 39884 - DNA, 21 bp, Artificial Sequence
  Synthetic
cccctagggtgttttacgagt

SEQ ID NO: 39885 - DNA, 20 bp, Artificial Sequence
  Synthetic
ggtcctttgggcattggaac

SEQ ID NO: 39886 - DNA, 25 bp, Artificial Sequence
  Synthetic
aaaattaagcattgaggacccaagt

SEQ ID NO: 39887 - DNA, 20 bp, Artificial Sequence
  Synthetic
ccgagacttgagccacacaa

SEQ ID NO: 39888 - DNA, 20 bp, Artificial Sequence
  Synthetic
gagtcccccaaaggagtgga

SEQ ID NO: 39889 - DNA, 20 bp, Artificial Sequence
  Synthetic
gggagaccgaagcgaggagg

SEQ ID NO: 39890 - DNA, 19 bp, Artificial Sequence
  Synthetic
cccaagctccttcccccca

SEQ ID NO: 39891 - DNA, 20 bp, Artificial Sequence
  Synthetic
gcgaggaggtggagatgcca

SEQ ID NO: 39892 - DNA, 22 bp, Artificial Sequence
  Synthetic
acttccatctggtccgttcggg

SEQ ID NO: 39893 - DNA, 25 bp, Artificial Sequence
  Synthetic
tgtgaaagcttgaatactactttgc

SEQ ID NO: 39894 - DNA, 22 bp, Artificial Sequence
  Synthetic
gaattgtggatgaaaagcgacg

SEQ ID NO: 39895 - DNA, 25 bp, Artificial Sequence
  Synthetic
tgaggatgaaacagataatatgcgt

SEQ ID NO: 39896 - DNA, 25 bp, Artificial Sequence
  Synthetic
agctatagtggaaaaacatacaggg

SEQ ID NO: 39897 - DNA, 25 bp, Artificial Sequence
  Synthetic
ttgcaagacataacaaatcaacaca

SEQ ID NO: 39898 - DNA, 20 bp, Artificial Sequence
  Synthetic
atggagaacctttgccagcg

SEQ ID NO: 39899 - DNA, 22 bp, Artificial Sequence
  Synthetic
atatgggacaggtgtgcaatgg

SEQ ID NO: 39900 - DNA, 20 bp, Artificial Sequence
  Synthetic
acacagcccggacagtcagt

SEQ ID NO: 39901 - DNA, 23 bp, Artificial Sequence
  Synthetic
gctttgaacttaccacatcctct

SEQ ID NO: 39902 - DNA, 20 bp, Artificial Sequence
  Synthetic
taggttgggtcaaaaggcca

SEQ ID NO: 39903 - DNA, 25 bp, Artificial Sequence
  Synthetic
ctagtgacagcaaggtatatcttcc

SEQ ID NO: 39904 - DNA, 21 bp, Artificial Sequence
  Synthetic
taatcctgacacagaacgcct

SEQ ID NO: 39905 - DNA, 22 bp, Artificial Sequence
  Synthetic
taaaggtgctgaatcaggcagg

SEQ ID NO: 39906 - DNA, 20 bp, Artificial Sequence
  Synthetic
ggactcatgacgctcgcgtg

SEQ ID NO: 39907 - DNA, 22 bp, Artificial Sequence
  Synthetic
ctcgtagaccgtagcacatgcc

SEQ ID NO: 39908 - DNA, 22 bp, Artificial Sequence
  Synthetic
tcggtgtccacctttttgtggt

SEQ ID NO: 39909 - DNA, 22 bp, Artificial Sequence
  Synthetic
acggactccttcttggctgacc

SEQ ID NO: 39910 - DNA, 22 bp, Artificial Sequence
  Synthetic
aaataacacatggggttgctgc

SEQ ID NO: 39911 - DNA, 21 bp, Artificial Sequence
  Synthetic
ggttcttggttacaggttccg

SEQ ID NO: 39912 - DNA, 20 bp, Artificial Sequence
  Synthetic
gcgtctcggaaagtgtcatg

SEQ ID NO: 39913 - DNA, 21 bp, Artificial Sequence
  Synthetic
taccgcaccttttacgctgca

SEQ ID NO: 39914 - DNA, 22 bp, Artificial Sequence
  Synthetic
gggagaccaaggggtatctggt

SEQ ID NO: 39915 - DNA, 22 bp, Artificial Sequence
  Synthetic
tcttggtcctaaatcccagtgt

SEQ ID NO: 39916 - DNA, 23 bp, Artificial Sequence
  Synthetic
ttaaccgatgaaggcactatccc

SEQ ID NO: 39917 - DNA, 21 bp, Artificial Sequence
  Synthetic
aggagcaaatttggacgagtg

SEQ ID NO: 39918 - DNA, 20 bp, Artificial Sequence
  Synthetic
gcaggagttgtgggcgtctt

SEQ ID NO: 39919 - DNA, 20 bp, Artificial Sequence
  Synthetic
ggagcgggtgagtgtaaccc

SEQ ID NO: 39920 - DNA, 25 bp, Artificial Sequence
  Synthetic
gtttcctcaaacaaagatcattggt

SEQ ID NO: 39921 - DNA, 22 bp, Artificial Sequence
  Synthetic
attgaggctttctcggtggtgc

SEQ ID NO: 39922 - DNA, 22 bp, Artificial Sequence
  Synthetic
aaccaagtgatgctgtgtgaac

SEQ ID NO: 39923 - DNA, 22 bp, Artificial Sequence
  Synthetic
gagaaccttatgtgtcatgcga

SEQ ID NO: 39924 - DNA, 20 bp, Artificial Sequence
  Synthetic
gcagagacaactggaaaggc

SEQ ID NO: 39925 - DNA, 20 bp, Artificial Sequence
  Synthetic
gcgagaagttacgctcagga

SEQ ID NO: 39926 - DNA, 21 bp, Artificial Sequence
  Synthetic
gtgcagagagtgtacaccaag

SEQ ID NO: 39927 - DNA, 22 bp, Artificial Sequence
  Synthetic
ttctgtgttccaaaggacgtcg

SEQ ID NO: 39928 - DNA, 20 bp, Artificial Sequence
  Synthetic
acagtaaggttacggccgat

SEQ ID NO: 39929 - DNA, 21 bp, Artificial Sequence
  Synthetic
gcaggagctgatgaaacagtt

SEQ ID NO: 39930 - DNA, 22 bp, Artificial Sequence
  Synthetic
acaaaggcaaaatgtcagcatg

SEQ ID NO: 39931 - DNA, 20 bp, Artificial Sequence
  Synthetic
tgggctccaatgctatggaa

SEQ ID NO: 39932 - DNA, 19 bp, Artificial Sequence
  Synthetic
agatttgggcgtgcccccg

SEQ ID NO: 39933 - DNA, 19 bp, Artificial Sequence
  Synthetic
gtgcgcgcgactcggaaga

SEQ ID NO: 39934 - DNA, 22 bp, Artificial Sequence
  Synthetic
gcccttcttcggagagccgttg

SEQ ID NO: 39935 - DNA, 22 bp, Artificial Sequence
  Synthetic
accagtttctttaaccccgggc

SEQ ID NO: 39936 - DNA, 20 bp, Artificial Sequence
  Synthetic
actatcccccacgaccgtgc

SEQ ID NO: 39937 - DNA, 20 bp, Artificial Sequence
  Synthetic
gcttccgcaagcacccagac

SEQ ID NO: 39938 - DNA, 19 bp, Artificial Sequence
  Synthetic
aggttggtccctggggcca

SEQ ID NO: 39939 - DNA, 20 bp, Artificial Sequence
  Synthetic
catgcctcttccaccctgcc

SEQ ID NO: 39940 - DNA, 20 bp, Artificial Sequence
  Synthetic
ccaaaggcccggtagtgcag

SEQ ID NO: 39941 - DNA, 19 bp, Artificial Sequence
  Synthetic
cgaaggcgctcgagttcgt

SEQ ID NO: 39942 - DNA, 20 bp, Artificial Sequence
  Synthetic
catacccgcgacaggagacg

SEQ ID NO: 39943 - DNA, 21 bp, Artificial Sequence
  Synthetic
gagaccgtccggcattttcga

SEQ ID NO: 39944 - DNA, 22 bp, Artificial Sequence
  Synthetic
tcacactgacacaccccatcac

SEQ ID NO: 39945 - DNA, 19 bp, Artificial Sequence
  Synthetic
tcacagatcgcgccaccca

SEQ ID NO: 39946 - DNA, 20 bp, Artificial Sequence
  Synthetic
cgcggggatggagtgaactc

SEQ ID NO: 39947 - DNA, 22 bp, Artificial Sequence
  Synthetic
accctgtaaccccctcctaagg

SEQ ID NO: 39948 - DNA, 22 bp, Artificial Sequence
  Synthetic
aagcacatagagggtgtgtggc

SEQ ID NO: 39949 - DNA, 21 bp, Artificial Sequence
  Synthetic
gatgaagcgagcctgagagcc

SEQ ID NO: 39950 - DNA, 21 bp, Artificial Sequence
  Synthetic
cagactgcttacggtttcgtc

SEQ ID NO: 39951 - DNA, 22 bp, Artificial Sequence
  Synthetic
atgtggagaccttgaatgagga

SEQ ID NO: 39952 - DNA, 20 bp, Artificial Sequence
  Synthetic
caggctgctggtgttatcag

SEQ ID NO: 39953 - DNA, 24 bp, Artificial Sequence
  Synthetic
ggactttaccgtcagtgtatacgt

SEQ ID NO: 39954 - DNA, 21 bp, Artificial Sequence
  Synthetic
cttaaaagggggtgcaccaat

SEQ ID NO: 39955 - DNA, 25 bp, Artificial Sequence
  Synthetic
ggtacagaggatgattatcaaggtc

SEQ ID NO: 39956 - DNA, 20 bp, Artificial Sequence
  Synthetic
aggtgcactcaacaaggcaa

SEQ ID NO: 39957 - DNA, 24 bp, Artificial Sequence
  Synthetic
tattgcagtcaatgacaaagctct

SEQ ID NO: 39958 - DNA, 22 bp, Artificial Sequence
  Synthetic
aataccctccaaaaaggctggt

SEQ ID NO: 39959 - DNA, 22 bp, Artificial Sequence
  Synthetic
agaaacagtttctttggctggc

SEQ ID NO: 39960 - DNA, 23 bp, Artificial Sequence
  Synthetic
acatgtctgctttaaaccacaca

SEQ ID NO: 39961 - DNA, 23 bp, Artificial Sequence
  Synthetic
tcaagcctgtgtcgtataaactc

SEQ ID NO: 39962 - DNA, 23 bp, Artificial Sequence
  Synthetic
actcccttgattcttatccagct

SEQ ID NO: 39963 - DNA, 20 bp, Artificial Sequence
  Synthetic
atggttgcacctcttcgact

SEQ ID NO: 39964 - DNA, 22 bp, Artificial Sequence
  Synthetic
cgcttcacctctactttgacaa

SEQ ID NO: 39965 - DNA, 20 bp, Artificial Sequence
  Synthetic
ggcaaagttgaagggtgcat

SEQ ID NO: 39966 - DNA, 24 bp, Artificial Sequence
  Synthetic
gttctagcatgctacaatggttca

SEQ ID NO: 39967 - DNA, 21 bp, Artificial Sequence
  Synthetic
tcaaacaggaattgccgtctt

SEQ ID NO: 39968 - DNA, 25 bp, Artificial Sequence
  Synthetic
tactcttggtattatggcaattgct

SEQ ID NO: 39969 - DNA, 22 bp, Artificial Sequence
  Synthetic
gtgctactcttcaggctattgc

SEQ ID NO: 39970 - DNA, 22 bp, Artificial Sequence
  Synthetic
cggaatgtggaaaggttatggc

SEQ ID NO: 39971 - DNA, 22 bp, Artificial Sequence
  Synthetic
acgatttcggtgatttcgtaca

SEQ ID NO: 39972 - DNA, 20 bp, Artificial Sequence
  Synthetic
catgtgtggcggctcactat

SEQ ID NO: 39973 - DNA, 24 bp, Artificial Sequence
  Synthetic
catgcaaaagtactctacactcca

SEQ ID NO: 39974 - DNA, 23 bp, Artificial Sequence
  Synthetic
tattggcgatcctgctcaattac

SEQ ID NO: 39975 - DNA, 24 bp, Artificial Sequence
  Synthetic
agaatttcttacacgcaatcctgc

SEQ ID NO: 39976 - DNA, 25 bp, Artificial Sequence
  Synthetic
tgtaactggactttttaaggactgt

SEQ ID NO: 39977 - DNA, 22 bp, Artificial Sequence
  Synthetic
agagatgctgtgggtactaacc

SEQ ID NO: 39978 - DNA, 22 bp, Artificial Sequence
  Synthetic
tgaaagaacgtgttgtctgtgt

SEQ ID NO: 39979 - DNA, 24 bp, Artificial Sequence
  Synthetic
tggaaatccaaaggctatcaagtg

SEQ ID NO: 39980 - DNA, 23 bp, Artificial Sequence
  Synthetic
ctccagctttcgataaaagtgca

SEQ ID NO: 39981 - DNA, 20 bp, Artificial Sequence
  Synthetic
cgaagcacctgtttccatca

SEQ ID NO: 39982 - DNA, 24 bp, Artificial Sequence
  Synthetic
ctacccaaaactacaagcaagtca

SEQ ID NO: 39983 - DNA, 24 bp, Artificial Sequence
  Synthetic
ccttttcgcttgatgtttcagaaa

SEQ ID NO: 39984 - DNA, 24 bp, Artificial Sequence
  Synthetic
agatgatgtaagacaaatagcgcc

SEQ ID NO: 39985 - DNA, 22 bp, Artificial Sequence
  Synthetic
ttggctaccaaccttacagagt

SEQ ID NO: 39986 - DNA, 24 bp, Artificial Sequence
  Synthetic
caattcatgcagatcaactcacac

SEQ ID NO: 39987 - DNA, 25 bp, Artificial Sequence
  Synthetic
cagaagttcaatggacttacagtgt

SEQ ID NO: 39988 - DNA, 21 bp, Artificial Sequence
  Synthetic
caggagaggaacttcaccaca

SEQ ID NO: 39989 - DNA, 20 bp, Artificial Sequence
  Synthetic
gcaggtatggaggcgcaatt

SEQ ID NO: 39990 - DNA, 20 bp, Artificial Sequence
  Synthetic
cgcttcgattgtgtgcgtac

SEQ ID NO: 39991 - DNA, 20 bp, Artificial Sequence
  Synthetic
ttgtggccagtaacacttgc

SEQ ID NO: 39992 - DNA, 22 bp, Artificial Sequence
  Synthetic
acaaattaggagcgtcgcagcg

SEQ ID NO: 39993 - DNA, 24 bp, Artificial Sequence
  Synthetic
actactaaaagaaccttgcccatc

SEQ ID NO: 39994 - DNA, 25 bp, Artificial Sequence
  Synthetic
ctaggggtaatacttatagcactgc

SEQ ID NO: 39995 - DNA, 21 bp, Artificial Sequence
  Synthetic
actgcgtcttggttcacagct

SEQ ID NO: 39996 - DNA, 20 bp, Artificial Sequence
  Synthetic
cgccaaaaacgtactgccac

SEQ ID NO: 39997 - DNA, 21 bp, Artificial Sequence
  Synthetic
attcccaccaacagagcctaa

SEQ ID NO: 39998 - DNA, 24 bp, Artificial Sequence
  Synthetic
gaaagagccaccacattttcatcg

SEQ ID NO: 39999 - DNA, 22 bp, Artificial Sequence
  Synthetic
ctgtcaaaggtcaagcacttct

SEQ ID NO: 40000 - DNA, 22 bp, Artificial Sequence
  Synthetic
gtgtgctcagtgtgcttcctcc

SEQ ID NO: 40001 - DNA, 23 bp, Artificial Sequence
  Synthetic
attcagtgagcaatggatctagc

SEQ ID NO: 40002 - DNA, 24 bp, Artificial Sequence
  Synthetic
aggagattccactataacatccca

SEQ ID NO: 40003 - DNA, 24 bp, Artificial Sequence
  Synthetic
tgggcaattcttaacaactgatga

SEQ ID NO: 40004 - DNA, 23 bp, Artificial Sequence
  Synthetic
ttgcaagctattacacacactgg

SEQ ID NO: 40005 - DNA, 24 bp, Artificial Sequence
  Synthetic
atatccaacctagcacatctgtgt

SEQ ID NO: 40006 - DNA, 21 bp, Artificial Sequence
  Synthetic
agaaggacaaccataccccag

SEQ ID NO: 40007 - DNA, 25 bp, Artificial Sequence
  Synthetic
ttactgccaccacaaagataggtat

SEQ ID NO: 40008 - DNA, 25 bp, Artificial Sequence
  Synthetic
gctccagagagaagagtagttactc

SEQ ID NO: 40009 - DNA, 23 bp, Artificial Sequence
  Synthetic
accctgaagtattctggtcaact

SEQ ID NO: 40010 - DNA, 21 bp, Artificial Sequence
  Synthetic
ctacctttcctgtggctgaga

SEQ ID NO: 40011 - DNA, 21 bp, Artificial Sequence
  Synthetic
tcagttgctgctgtctgatct

SEQ ID NO: 40012 - DNA, 20 bp, Artificial Sequence
  Synthetic
cacctcacagaccaccgaac

SEQ ID NO: 40013 - DNA, 23 bp, Artificial Sequence
  Synthetic
cgccttgttcagtttgaatctga

SEQ ID NO: 40014 - DNA, 25 bp, Artificial Sequence
  Synthetic
ggtgttgatacagcttcaaatacca

SEQ ID NO: 40015 - DNA, 20 bp, Artificial Sequence
  Synthetic
gaggttggaagaggaggtcc

SEQ ID NO: 40016 - DNA, 24 bp, Artificial Sequence
  Synthetic
acctattccagatgtagaaggtgt

SEQ ID NO: 40017 - DNA, 22 bp, Artificial Sequence
  Synthetic
accttctgacattggagatgct

SEQ ID NO: 40018 - DNA, 24 bp, Artificial Sequence
  Synthetic
tgaatgagacacaacaagttcagt

SEQ ID NO: 40019 - DNA, 21 bp, Artificial Sequence
  Synthetic
attgtcgcctgatgatgaacc

SEQ ID NO: 40020 - DNA, 21 bp, Artificial Sequence
  Synthetic
aaggcgactctcaaagatccc

SEQ ID NO: 40021 - DNA, 24 bp, Artificial Sequence
  Synthetic
cccgcctagtaacttttgaatttg

SEQ ID NO: 40022 - DNA, 23 bp, Artificial Sequence
  Synthetic
actgagatcagagcatctgttgg

SEQ ID NO: 40023 - DNA, 21 bp, Artificial Sequence
  Synthetic
gcgaacaatggagaagatgca

SEQ ID NO: 40024 - DNA, 22 bp, Artificial Sequence
  Synthetic
caagtcctgcttgcctgcttgt

SEQ ID NO: 40025 - DNA, 23 bp, Artificial Sequence
  Synthetic
attcaagcgcaagttggaaaatt

SEQ ID NO: 40026 - DNA, 25 bp, Artificial Sequence
  Synthetic
tgatgagtcgttatgattttgagcg

SEQ ID NO: 40027 - DNA, 20 bp, Artificial Sequence
  Synthetic
ggttccagatgagcgtctgc

SEQ ID NO: 40028 - DNA, 20 bp, Artificial Sequence
  Synthetic
catgtcatcttggggcttgg

SEQ ID NO: 40029 - DNA, 23 bp, Artificial Sequence
  Synthetic
cattttggatgttcggtcagttg

SEQ ID NO: 40030 - DNA, 25 bp, Artificial Sequence
  Synthetic
tgtcgatatcagcaatagtagcatc

SEQ ID NO: 40031 - DNA, 25 bp, Artificial Sequence
  Synthetic
ttagcattttcaaaaaagcgttcgc

SEQ ID NO: 40032 - DNA, 24 bp, Artificial Sequence
  Synthetic
gctggtaatgcttcaggaatcaat

SEQ ID NO: 40033 - DNA, 25 bp, Artificial Sequence
  Synthetic
atctgtaatgatgctggttttgttg

SEQ ID NO: 40034 - DNA, 25 bp, Artificial Sequence
  Synthetic
ttgtaatatccatgacatcttcggc

SEQ ID NO: 40035 - DNA, 20 bp, Artificial Sequence
  Synthetic
aaaagaccatccacgccttc

SEQ ID NO: 40036 - DNA, 25 bp, Artificial Sequence
  Synthetic
ttccgcctattttttcagctaaagc

SEQ ID NO: 40037 - DNA, 23 bp, Artificial Sequence
  Synthetic
cagttaccgaatactcttcaccg

SEQ ID NO: 40038 - DNA, 20 bp, Artificial Sequence
  Synthetic
gagcgtcattccaagcacaa

SEQ ID NO: 40039 - DNA, 20 bp, Artificial Sequence
  Synthetic
gcagcaactgttcaggaagc

SEQ ID NO: 40040 - DNA, 22 bp, Artificial Sequence
  Synthetic
gtggcgattttagcagatttgg

SEQ ID NO: 40041 - DNA, 21 bp, Artificial Sequence
  Synthetic
gttcctatggcaccacctgcg

SEQ ID NO: 40042 - DNA, 24 bp, Artificial Sequence
  Synthetic
cttcaaagaagaagtggcttctgc

SEQ ID NO: 40043 - DNA, 24 bp, Artificial Sequence
  Synthetic
tattgttggtactggtttagctgg

SEQ ID NO: 40044 - DNA, 20 bp, Artificial Sequence
  Synthetic
gtgtggatgatgacggccag

SEQ ID NO: 40045 - DNA, 21 bp, Artificial Sequence
  Synthetic
ctgctgaaagctggtttgtgt

SEQ ID NO: 40046 - DNA, 25 bp, Artificial Sequence
  Synthetic
gaaatcacagaagaatggttgtacc

SEQ ID NO: 40047 - DNA, 22 bp, Artificial Sequence
  Synthetic
ctggtccagctgtttttctagc

SEQ ID NO: 40048 - DNA, 22 bp, Artificial Sequence
  Synthetic
tattgcaagaactctaggcggt

SEQ ID NO: 40049 - DNA, 21 bp, Artificial Sequence
  Synthetic
tggcgttgggcaaaaaaactc

SEQ ID NO: 40050 - DNA, 24 bp, Artificial Sequence
  Synthetic
ttgatcttgagctttcaccaatga

SEQ ID NO: 40051 - DNA, 25 bp, Artificial Sequence
  Synthetic
aatgaactaaaagcaggacaagtct

SEQ ID NO: 40052 - DNA, 22 bp, Artificial Sequence
  Synthetic
gagaagtggtcaaactttcccg

SEQ ID NO: 40053 - DNA, 21 bp, Artificial Sequence
  Synthetic
aagcaccctaatcacgctttg

SEQ ID NO: 40054 - DNA, 21 bp, Artificial Sequence
  Synthetic
ttatcagatgaccgagggcat

SEQ ID NO: 40055 - DNA, 21 bp, Artificial Sequence
  Synthetic
atttcgggctacatttcccca

SEQ ID NO: 40056 - DNA, 20 bp, Artificial Sequence
  Synthetic
agaaaagccctttgtacgcc

SEQ ID NO: 40057 - DNA, 22 bp, Artificial Sequence
  Synthetic
ctttttagggcgtgattgtcgc

SEQ ID NO: 40058 - DNA, 23 bp, Artificial Sequence
  Synthetic
aaaatggtcgcccagatttacca

SEQ ID NO: 40059 - DNA, 20 bp, Artificial Sequence
  Synthetic
gggtttacgtgaccaccgtg

SEQ ID NO: 40060 - DNA, 23 bp, Artificial Sequence
  Synthetic
tacttgctacatgacatggcaaa

SEQ ID NO: 40061 - DNA, 22 bp, Artificial Sequence
  Synthetic
gagatgtttttgggactgggaa

SEQ ID NO: 40062 - DNA, 25 bp, Artificial Sequence
  Synthetic
aaagccaggtagtaaaaccattacc

SEQ ID NO: 40063 - DNA, 20 bp, Artificial Sequence
  Synthetic
caacacgtccaggttgccaa

SEQ ID NO: 40064 - DNA, 24 bp, Artificial Sequence
  Synthetic
aaaatcgtattagaaggttgccgt

SEQ ID NO: 40065 - DNA, 20 bp, Artificial Sequence
  Synthetic
ttgaagccatcaaagtggcc

SEQ ID NO: 40066 - DNA, 22 bp, Artificial Sequence
  Synthetic
tcgttgcttatgccaacaaaga

SEQ ID NO: 40067 - DNA, 23 bp, Artificial Sequence
  Synthetic
tggtagggaagacagaatctcaa

SEQ ID NO: 40068 - DNA, 24 bp, Artificial Sequence
  Synthetic
aagcacattattttggaccgttcc

SEQ ID NO: 40069 - DNA, 22 bp, Artificial Sequence
  Synthetic
aatcattggcagagcaccaaga

SEQ ID NO: 40070 - DNA, 25 bp, Artificial Sequence
  Synthetic
aacaatcgatttaaccatcccattg

SEQ ID NO: 40071 - DNA, 23 bp, Artificial Sequence
  Synthetic
tcctgattgaacttgagacaacc

SEQ ID NO: 40072 - DNA, 20 bp, Artificial Sequence
  Synthetic
atagcatcagggtccttgcg

SEQ ID NO: 40073 - DNA, 20 bp, Artificial Sequence
  Synthetic
aatgacctcggcgaacaaca

SEQ ID NO: 40074 - DNA, 23 bp, Artificial Sequence
  Synthetic
tatcgtattcgtcaacccaatcc

SEQ ID NO: 40075 - DNA, 20 bp, Artificial Sequence
  Synthetic
aggttctaccatccatgcgt

SEQ ID NO: 40076 - DNA, 21 bp, Artificial Sequence
  Synthetic
cttcatcaataggctgcggag

SEQ ID NO: 40077 - DNA, 23 bp, Artificial Sequence
  Synthetic
tgctatttctccatgctgttcaa

SEQ ID NO: 40078 - DNA, 25 bp, Artificial Sequence
  Synthetic
aatagccataaagtcataacgctca

SEQ ID NO: 40079 - DNA, 21 bp, Artificial Sequence
  Synthetic
tcaagaacaaagccttgcgat

SEQ ID NO: 40080 - DNA, 25 bp, Artificial Sequence
  Synthetic
cctctggtaataggtctttagcttc

SEQ ID NO: 40081 - DNA, 20 bp, Artificial Sequence
  Synthetic
tggttttttcgtccgccagt

SEQ ID NO: 40082 - DNA, 20 bp, Artificial Sequence
  Synthetic
tgccaaggccgattctgaag

SEQ ID NO: 40083 - DNA, 20 bp, Artificial Sequence
  Synthetic
tgttcgattggaaggccgtg

SEQ ID NO: 40084 - DNA, 23 bp, Artificial Sequence
  Synthetic
ataacgaaaaaagcctcgtctca

SEQ ID NO: 40085 - DNA, 22 bp, Artificial Sequence
  Synthetic
agagtcaagttggtaagcctct

SEQ ID NO: 40086 - DNA, 25 bp, Artificial Sequence
  Synthetic
attatagataatgggcacgagtgga

SEQ ID NO: 40087 - DNA, 23 bp, Artificial Sequence
  Synthetic
ggtgtatctcctaggctatcgtc

SEQ ID NO: 40088 - DNA, 22 bp, Artificial Sequence
  Synthetic
acggatagggaccgaactgtct

SEQ ID NO: 40089 - DNA, 22 bp, Artificial Sequence
  Synthetic
agttacggggtcattttgccga

SEQ ID NO: 40090 - DNA, 20 bp, Artificial Sequence
  Synthetic
ctactgcgtccctccatcac

SEQ ID NO: 40091 - DNA, 20 bp, Artificial Sequence
  Synthetic
tcagcgtctttcatcatgcg

SEQ ID NO: 40092 - DNA, 24 bp, Artificial Sequence
  Synthetic
ggagttttcgtacgttctacaagg

SEQ ID NO: 40093 - DNA, 25 bp, Artificial Sequence
  Synthetic
atatcccttttgaaagacttctgca

SEQ ID NO: 40094 - DNA, 20 bp, Artificial Sequence
  Synthetic
tcttcactagagcgacgctg

SEQ ID NO: 40095 - DNA, 20 bp, Artificial Sequence
  Synthetic
agtccaaacccacggtaagg

SEQ ID NO: 40096 - DNA, 24 bp, Artificial Sequence
  Synthetic
tatcagattcatgcaatcgaagcc

SEQ ID NO: 40097 - DNA, 23 bp, Artificial Sequence
  Synthetic
gaagccattcatgataaagcggt

SEQ ID NO: 40098 - DNA, 25 bp, Artificial Sequence
  Synthetic
agatgacaaaatctaaacagcctca

SEQ ID NO: 40099 - DNA, 24 bp, Artificial Sequence
  Synthetic
tgatcaattgattcagttgcagga

SEQ ID NO: 40100 - DNA, 21 bp, Artificial Sequence
  Synthetic
aggacaagcgtacattgaggt

SEQ ID NO: 40101 - DNA, 20 bp, Artificial Sequence
  Synthetic
ccccttgagatgtccatggt

SEQ ID NO: 40102 - DNA, 23 bp, Artificial Sequence
  Synthetic
atcaggctctcctttttaacgtg

SEQ ID NO: 40103 - DNA, 20 bp, Artificial Sequence
  Synthetic
tggtttctgtcgtccctgtt

SEQ ID NO: 40104 - DNA, 25 bp, Artificial Sequence
  Synthetic
ttaggatctaaagcaacactagctg

SEQ ID NO: 40105 - DNA, 22 bp, Artificial Sequence
  Synthetic
tctttccttttgcacgcgtggg

SEQ ID NO: 40106 - DNA, 20 bp, Artificial Sequence
  Synthetic
gcccatgcctcccctttgag

SEQ ID NO: 40107 - DNA, 22 bp, Artificial Sequence
  Synthetic
ccctacacctgttacgtaccgc

SEQ ID NO: 40108 - DNA, 20 bp, Artificial Sequence
  Synthetic
gcgtgtgcggcgcgttttac

SEQ ID NO: 40109 - DNA, 21 bp, Artificial Sequence
  Synthetic
atgttgggctacagcactccc

SEQ ID NO: 40110 - DNA, 22 bp, Artificial Sequence
  Synthetic
atttgttggcggccgattaccc

SEQ ID NO: 40111 - DNA, 19 bp, Artificial Sequence
  Synthetic
cgccctgccctgctttgga

SEQ ID NO: 40112 - DNA, 20 bp, Artificial Sequence
  Synthetic
agcttgcggggtcgatggaa

SEQ ID NO: 40113 - DNA, 22 bp, Artificial Sequence
  Synthetic
gggtcacccctgatgttgtcag

SEQ ID NO: 40114 - DNA, 20 bp, Artificial Sequence
  Synthetic
gatcgctgagggccgtatgg

SEQ ID NO: 40115 - DNA, 20 bp, Artificial Sequence
  Synthetic
ccgtgttaaccggttccgca

SEQ ID NO: 40116 - DNA, 20 bp, Artificial Sequence
  Synthetic
gttcccacccggcatactgg

SEQ ID NO: 40117 - DNA, 24 bp, Artificial Sequence
  Synthetic
gcatgggatggttacttatcttct

SEQ ID NO: 40118 - DNA, 25 bp, Artificial Sequence
  Synthetic
ggtatgtttggtctttacgatgaca

SEQ ID NO: 40119 - DNA, 25 bp, Artificial Sequence
  Synthetic
tcgttttatggttgatcctacaact

SEQ ID NO: 40120 - DNA, 20 bp, Artificial Sequence
  Synthetic
cactgctggtgtttgcatca

SEQ ID NO: 40121 - DNA, 24 bp, Artificial Sequence
  Synthetic
aatgaaaatctcttgcatggaggc

SEQ ID NO: 40122 - DNA, 22 bp, Artificial Sequence
  Synthetic
ggttttgaaaaggcagcacttt

SEQ ID NO: 40123 - DNA, 23 bp, Artificial Sequence
  Synthetic
agacataaattgcgttcacgtgt

SEQ ID NO: 40124 - DNA, 23 bp, Artificial Sequence
  Synthetic
agcgtattaatgttgttcctggt

SEQ ID NO: 40125 - DNA, 21 bp, Artificial Sequence
  Synthetic
gtcggtgttacaatgcatggt

SEQ ID NO: 40126 - DNA, 25 bp, Artificial Sequence
  Synthetic
attgtgaacgtgttgttaaacttca

SEQ ID NO: 40127 - DNA, 25 bp, Artificial Sequence
  Synthetic
cccttccttgataatagcttcttcc

SEQ ID NO: 40128 - DNA, 20 bp, Artificial Sequence
  Synthetic
aggatcttgtcagctggtgt

SEQ ID NO: 40129 - DNA, 22 bp, Artificial Sequence
  Synthetic
ttgtggtgattgtctgcgtaag

SEQ ID NO: 40130 - DNA, 25 bp, Artificial Sequence
  Synthetic
tctgtaacattcatagaaacgagca

SEQ ID NO: 40131 - DNA, 21 bp, Artificial Sequence
  Synthetic
cagttgcagtctgctgaatgg

SEQ ID NO: 40132 - DNA, 20 bp, Artificial Sequence
  Synthetic
ggctaccacccgatgcaata

SEQ ID NO: 40133 - DNA, 25 bp, Artificial Sequence
  Synthetic
ttggttttgtgctaatcagagtaca

SEQ ID NO: 40134 - DNA, 20 bp, Artificial Sequence
  Synthetic
gccaccgttactgtgaatgt

SEQ ID NO: 40135 - DNA, 23 bp, Artificial Sequence
  Synthetic
tatggcctgtacctggtcttaaa

SEQ ID NO: 40136 - DNA, 22 bp, Artificial Sequence
  Synthetic
cactgtgcgtgaaattgttgtt

SEQ ID NO: 40137 - DNA, 25 bp, Artificial Sequence
  Synthetic
atgaccgctgttaatgagtctagat

SEQ ID NO: 40138 - DNA, 25 bp, Artificial Sequence
  Synthetic
agttgacagattaattactggacgg

SEQ ID NO: 40139 - DNA, 21 bp, Artificial Sequence
  Synthetic
agggtcatgtttcaacctcgc

SEQ ID NO: 40140 - DNA, 24 bp, Artificial Sequence
  Synthetic
tttggttagttctgataaggcacc

SEQ ID NO: 40141 - DNA, 21 bp, Artificial Sequence
  Synthetic
aactccgttgtgttacatgca

SEQ ID NO: 40142 - DNA, 22 bp, Artificial Sequence
  Synthetic
gtttggggtgtccgtgaaaatt

SEQ ID NO: 40143 - DNA, 21 bp, Artificial Sequence
  Synthetic
aggcagttccatctttagcgt

SEQ ID NO: 40144 - DNA, 22 bp, Artificial Sequence
  Synthetic
tcagtgtctgtgtttttgggac

SEQ ID NO: 40145 - DNA, 22 bp, Artificial Sequence
  Synthetic
agtttttttgggaggtttgggc

SEQ ID NO: 40146 - DNA, 25 bp, Artificial Sequence
  Synthetic
tttctgacataccaaacattgttgc

SEQ ID NO: 40147 - DNA, 25 bp, Artificial Sequence
  Synthetic
catcttctgttgtacaagaaacagc

SEQ ID NO: 40148 - DNA, 21 bp, Artificial Sequence
  Synthetic
aaccagggggacggttaaggg

SEQ ID NO: 40149 - DNA, 21 bp, Artificial Sequence
  Synthetic
tgagacagcagaggatgactt

SEQ ID NO: 40150 - DNA, 24 bp, Artificial Sequence
  Synthetic
cggacatcctttgtttgagatctc

SEQ ID NO: 40151 - DNA, 20 bp, Artificial Sequence
  Synthetic
acaaatgttcctcgtcggct

SEQ ID NO: 40152 - DNA, 25 bp, Artificial Sequence
  Synthetic
tgctggttttattaataattgcgct

SEQ ID NO: 40153 - DNA, 23 bp, Artificial Sequence
  Synthetic
atttgctgccaaacttatctggt

SEQ ID NO: 40154 - DNA, 22 bp, Artificial Sequence
  Synthetic
cttggagagtgaacaacagctt

SEQ ID NO: 40155 - DNA, 24 bp, Artificial Sequence
  Synthetic
caggtagaaactgaatgcaactcg

SEQ ID NO: 40156 - DNA, 25 bp, Artificial Sequence
  Synthetic
acagtttgatttgtcagaaatggtg

SEQ ID NO: 40157 - DNA, 24 bp, Artificial Sequence
  Synthetic
gttaggagacttggtatgcaaaca

SEQ ID NO: 40158 - DNA, 22 bp, Artificial Sequence
  Synthetic
attcctgtaggagaaggtggtg

SEQ ID NO: 40159 - DNA, 22 bp, Artificial Sequence
  Synthetic
actgcggctgtattacatgttg

SEQ ID NO: 40160 - DNA, 22 bp, Artificial Sequence
  Synthetic
caagtacacctgtttctaggcc

SEQ ID NO: 40161 - DNA, 22 bp, Artificial Sequence
  Synthetic
tgctcaaattttcaacaggccg

SEQ ID NO: 40162 - DNA, 21 bp, Artificial Sequence
  Synthetic
cctttttggcagcatcgtttg

SEQ ID NO: 40163 - DNA, 24 bp, Artificial Sequence
  Synthetic
tgaaaggttttcatggcaaagagc

SEQ ID NO: 40164 - DNA, 25 bp, Artificial Sequence
  Synthetic
caaatgtccaaattacgattggacc

SEQ ID NO: 40165 - DNA, 23 bp, Artificial Sequence
  Synthetic
ttatcaccagaagagggagacaa

SEQ ID NO: 40166 - DNA, 20 bp, Artificial Sequence
  Synthetic
ggctacgggtgaaacctctt

SEQ ID NO: 40167 - DNA, 22 bp, Artificial Sequence
  Synthetic
ttccaacaggggggattgatct

SEQ ID NO: 40168 - DNA, 25 bp, Artificial Sequence
  Synthetic
cctgagacatttcctgaattgaaac

SEQ ID NO: 40169 - DNA, 25 bp, Artificial Sequence
  Synthetic
ttacaggagcaactgatgtagatgg

SEQ ID NO: 40170 - DNA, 21 bp, Artificial Sequence
  Synthetic
cttgaaatggatgctggggtt

SEQ ID NO: 40171 - DNA, 25 bp, Artificial Sequence
  Synthetic
gatgtccaatgagattaaacatggc

SEQ ID NO: 40172 - DNA, 20 bp, Artificial Sequence
  Synthetic
gctcgttggaggatggtttg

SEQ ID NO: 40173 - DNA, 22 bp, Artificial Sequence
  Synthetic
ggttatgaatgccttgggagtg

SEQ ID NO: 40174 - DNA, 20 bp, Artificial Sequence
  Synthetic
atgtgccggattatgcctcc

SEQ ID NO: 40175 - DNA, 25 bp, Artificial Sequence
  Synthetic
caaatgcaattctgaatgcatcact

SEQ ID NO: 40176 - DNA, 21 bp, Artificial Sequence
  Synthetic
ttggtacggtttcaggcatca

SEQ ID NO: 40177 - DNA, 24 bp, Artificial Sequence
  Synthetic
tttttgctttgtgttgctttgttg

SEQ ID NO: 40178 - DNA, 25 bp, Artificial Sequence
  Synthetic
ttgttgtattgttgttagatgccag

SEQ ID NO: 40179 - DNA, 22 bp, Artificial Sequence
  Synthetic
agagcagtcagaaaacctgtca

SEQ ID NO: 40180 - DNA, 23 bp, Artificial Sequence
  Synthetic
gccgcaacacaaatgtaaaaagc

SEQ ID NO: 40181 - DNA, 20 bp, Artificial Sequence
  Synthetic
ctcgcatgctgcttagcttt

SEQ ID NO: 40182 - DNA, 20 bp, Artificial Sequence
  Synthetic
gctgcgttttttggtgggtt

SEQ ID NO: 40183 - DNA, 21 bp, Artificial Sequence
  Synthetic
acctgatttgttgccaggaga

SEQ ID NO: 40184 - DNA, 23 bp, Artificial Sequence
  Synthetic
ccattgaattgcaactgttaggg

SEQ ID NO: 40185 - DNA, 22 bp, Artificial Sequence
  Synthetic
taccaccatcaacaccagttgc

SEQ ID NO: 40186 - DNA, 25 bp, Artificial Sequence
  Synthetic
atgtcagtggtaaatcctgataggg

SEQ ID NO: 40187 - DNA, 23 bp, Artificial Sequence
  Synthetic
gagcgtgtccacctctagaatta

SEQ ID NO: 40188 - DNA, 22 bp, Artificial Sequence
  Synthetic
agagaaccttatgtgtcatgcg

SEQ ID NO: 40189 - DNA, 25 bp, Artificial Sequence
  Synthetic
atgaaactttcaaagtcattggtgg

SEQ ID NO: 40190 - DNA, 22 bp, Artificial Sequence
  Synthetic
tctcagctggctgacaggatcg

SEQ ID NO: 40191 - DNA, 18 bp, Artificial Sequence
  Synthetic
ctggagacgcgggcgaaa

SEQ ID NO: 40192 - DNA, 19 bp, Artificial Sequence
  Synthetic
ccgtcctggcggttgacgt

SEQ ID NO: 40193 - DNA, 19 bp, Artificial Sequence
  Synthetic
cgcaccccctcgttgcgaa

SEQ ID NO: 40194 - DNA, 21 bp, Artificial Sequence
  Synthetic
cgacgccgtgacgtatgaaga

SEQ ID NO: 40195 - DNA, 22 bp, Artificial Sequence
  Synthetic
aaatccgttccatcgaccattt

SEQ ID NO: 40196 - DNA, 20 bp, Artificial Sequence
  Synthetic
agcatcgacttttcggccaa

SEQ ID NO: 40197 - DNA, 23 bp, Artificial Sequence
  Synthetic
acaacgacatatggaagagcaaa

SEQ ID NO: 40198 - DNA, 22 bp, Artificial Sequence
  Synthetic
cctatatcgcaacatcaccgtc

SEQ ID NO: 40199 - DNA, 20 bp, Artificial Sequence
  Synthetic
gtgtctgtgtcgatgcttgg

SEQ ID NO: 40200 - DNA, 22 bp, Artificial Sequence
  Synthetic
tttctacaatggctcgagttcg

SEQ ID NO: 40201 - DNA, 20 bp, Artificial Sequence
  Synthetic
gttcatccgcccgtaactga

SEQ ID NO: 40202 - DNA, 20 bp, Artificial Sequence
  Synthetic
gtgattggaaaccgtcgctt

SEQ ID NO: 40203 - DNA, 20 bp, Artificial Sequence
  Synthetic
ggattacgttcgctgcaacg

SEQ ID NO: 40204 - DNA, 24 bp, Artificial Sequence
  Synthetic
gtccatgagattttcaatccggag

SEQ ID NO: 40205 - DNA, 21 bp, Artificial Sequence
  Synthetic
gatgaaactgtcgaatgccca

SEQ ID NO: 40206 - DNA, 20 bp, Artificial Sequence
  Synthetic
aaccagtatcttgcggcatg

SEQ ID NO: 40207 - DNA, 21 bp, Artificial Sequence
  Synthetic
aggaactcatgttgcctctgg

SEQ ID NO: 40208 - DNA, 20 bp, Artificial Sequence
  Synthetic
gtttgctttcctgcacgaga

SEQ ID NO: 40209 - DNA, 19 bp, Artificial Sequence
  Synthetic
cggccgccgacgaacacaa

SEQ ID NO: 40210 - DNA, 22 bp, Artificial Sequence
  Synthetic
ggacctctgttagcgttctggc

SEQ ID NO: 40211 - DNA, 23 bp, Artificial Sequence
  Synthetic
tatgcaaactaagaggggtagcc

SEQ ID NO: 40212 - DNA, 22 bp, Artificial Sequence
  Synthetic
gcaattgagctcagtgtcatca

SEQ ID NO: 40213 - DNA, 24 bp, Artificial Sequence
  Synthetic
ggtcatcaagatacagcaagaagt

SEQ ID NO: 40214 - DNA, 20 bp, Artificial Sequence
  Synthetic
caggatatgcagccgacctg

SEQ ID NO: 40215 - DNA, 21 bp, Artificial Sequence
  Synthetic
ctctgttctgccacgacgtgt

SEQ ID NO: 40216 - DNA, 18 bp, Artificial Sequence
  Synthetic
tcctcgagtgacgccgga

SEQ ID NO: 40217 - DNA, 19 bp, Artificial Sequence
  Synthetic
gcggacgacttggagctgc

SEQ ID NO: 40218 - DNA, 19 bp, Artificial Sequence
  Synthetic
ggtccacacgccagtctgc

SEQ ID NO: 40219 - DNA, 19 bp, Artificial Sequence
  Synthetic
cccccactcgaatcgcgca

SEQ ID NO: 40220 - DNA, 21 bp, Artificial Sequence
  Synthetic
actcaaagaaagctccgcgcg

SEQ ID NO: 40221 - DNA, 19 bp, Artificial Sequence
  Synthetic
gcgagacggtacagcgcgt

SEQ ID NO: 40222 - DNA, 19 bp, Artificial Sequence
  Synthetic
cgagcatgtcggaggtggc

SEQ ID NO: 40223 - DNA, 20 bp, Artificial Sequence
  Synthetic
ctccgcgcatgtgatgatgt

SEQ ID NO: 40224 - DNA, 22 bp, Artificial Sequence
  Synthetic
ccatcagaatcgtcagtggatg

SEQ ID NO: 40225 - DNA, 21 bp, Artificial Sequence
  Synthetic
cgatcccatattgtccagcac

SEQ ID NO: 40226 - DNA, 21 bp, Artificial Sequence
  Synthetic
ttccgccaacaaatacagtgt

SEQ ID NO: 40227 - DNA, 22 bp, Artificial Sequence
  Synthetic
agcaaacctgtatctctcttgc

SEQ ID NO: 40228 - DNA, 22 bp, Artificial Sequence
  Synthetic
atagctgcatgaaggttccatg

SEQ ID NO: 40229 - DNA, 22 bp, Artificial Sequence
  Synthetic
atcgcgacaagttgctaagaat

SEQ ID NO: 40230 - DNA, 20 bp, Artificial Sequence
  Synthetic
cggtgccatgtttctgtgaa

SEQ ID NO: 40231 - DNA, 20 bp, Artificial Sequence
  Synthetic
agagcgttttcggaactgtc

SEQ ID NO: 40232 - DNA, 25 bp, Artificial Sequence
  Synthetic
ggtatagtccggataatttcatggc

SEQ ID NO: 40233 - DNA, 21 bp, Artificial Sequence
  Synthetic
gggtctctgttctgccacgac

SEQ ID NO: 40234 - DNA, 19 bp, Artificial Sequence
  Synthetic
tccctgggcacggtccaca

SEQ ID NO: 40235 - DNA, 19 bp, Artificial Sequence
  Synthetic
gcgctgtcggttccgcaca

SEQ ID NO: 40236 - DNA, 21 bp, Artificial Sequence
  Synthetic
ggaagacctagagctgccgga

SEQ ID NO: 40237 - DNA, 24 bp, Artificial Sequence
  Synthetic
aatctcactcagttattctgctgg

SEQ ID NO: 40238 - DNA, 22 bp, Artificial Sequence
  Synthetic
aaggaagaggcaacacccttgg

SEQ ID NO: 40239 - DNA, 25 bp, Artificial Sequence
  Synthetic
actgaaagcgaacttcagtgtaatc

SEQ ID NO: 40240 - DNA, 20 bp, Artificial Sequence
  Synthetic
cggctccacagctagaactt

SEQ ID NO: 40241 - DNA, 21 bp, Artificial Sequence
  Synthetic
atgccacaaaccattgtctcc

SEQ ID NO: 40242 - DNA, 23 bp, Artificial Sequence
  Synthetic
ggatggtttttagttgaggctgt

SEQ ID NO: 40243 - DNA, 25 bp, Artificial Sequence
  Synthetic
ggatttaaatgctaaactgtgtggt

SEQ ID NO: 40244 - DNA, 24 bp, Artificial Sequence
  Synthetic
aatgcagcagcgtttttaaaaagt

SEQ ID NO: 40245 - DNA, 23 bp, Artificial Sequence
  Synthetic
gcttgcagaaccaaagaaatgtt

SEQ ID NO: 40246 - DNA, 24 bp, Artificial Sequence
  Synthetic
agcaacaacaaaatcaggaacagt

SEQ ID NO: 40247 - DNA, 20 bp, Artificial Sequence
  Synthetic
ttgtgcagcctattccacct

SEQ ID NO: 40248 - DNA, 23 bp, Artificial Sequence
  Synthetic
tgtgaataaaccattgctggagc

SEQ ID NO: 40249 - DNA, 23 bp, Artificial Sequence
  Synthetic
gttgacaccagaggaaaaacagt

SEQ ID NO: 40250 - DNA, 20 bp, Artificial Sequence
  Synthetic
agtagaccatctgcaggagc

SEQ ID NO: 40251 - DNA, 21 bp, Artificial Sequence
  Synthetic
ggaagctgtaaaacgaaggct

SEQ ID NO: 40252 - DNA, 21 bp, Artificial Sequence
  Synthetic
aaaacgatggagacgctatgc

SEQ ID NO: 40253 - DNA, 23 bp, Artificial Sequence
  Synthetic
ccaaatatgggtgtaaaggcaca

SEQ ID NO: 40254 - DNA, 22 bp, Artificial Sequence
  Synthetic
accacagccagagagtcctacg

SEQ ID NO: 40255 - DNA, 22 bp, Artificial Sequence
  Synthetic
tttgtctgctttaatgtgccgc

SEQ ID NO: 40256 - DNA, 25 bp, Artificial Sequence
  Synthetic
ggaaatacctatgcaaacatttgct

SEQ ID NO: 40257 - DNA, 22 bp, Artificial Sequence
  Synthetic
tgcctttacaacacgtagaggt

SEQ ID NO: 40258 - DNA, 22 bp, Artificial Sequence
  Synthetic
cctattttcttgcagatggcgg

SEQ ID NO: 40259 - DNA, 23 bp, Artificial Sequence
  Synthetic
ataacctgtcaaaaggatcagcc

SEQ ID NO: 40260 - DNA, 24 bp, Artificial Sequence
  Synthetic
tgcaaacatctgcactttagtgtt

SEQ ID NO: 40261 - DNA, 22 bp, Artificial Sequence
  Synthetic
aaggtcaagcacttctgtttcc

SEQ ID NO: 40262 - DNA, 22 bp, Artificial Sequence
  Synthetic
tgaagccaaagatcggacaggg

SEQ ID NO: 40263 - DNA, 25 bp, Artificial Sequence
  Synthetic
taaccagaggagattcaacaatcac

SEQ ID NO: 40264 - DNA, 25 bp, Artificial Sequence
  Synthetic
tgactactgatgatatgcaatcacc

SEQ ID NO: 40265 - DNA, 25 bp, Artificial Sequence
  Synthetic
taccatttcttagcattgcatcagc

SEQ ID NO: 40266 - DNA, 20 bp, Artificial Sequence
  Synthetic
acacatgttgggagaggctt

SEQ ID NO: 40267 - DNA, 25 bp, Artificial Sequence
  Synthetic
ttccaaggaccaatttctttagacg

SEQ ID NO: 40268 - DNA, 22 bp, Artificial Sequence
  Synthetic
cacaaccgtttttgtttctggc

SEQ ID NO: 40269 - DNA, 20 bp, Artificial Sequence
  Synthetic
ctggtgactgtcctcctgat

SEQ ID NO: 40270 - DNA, 20 bp, Artificial Sequence
  Synthetic
gcaaccaattccacccccaa

SEQ ID NO: 40271 - DNA, 21 bp, Artificial Sequence
  Synthetic
ggactgatacgagtcagcaga

SEQ ID NO: 40272 - DNA, 22 bp, Artificial Sequence
  Synthetic
cgtaaacgtaaacgctcagaca

SEQ ID NO: 40273 - DNA, 23 bp, Artificial Sequence
  Synthetic
aattccactgaaggtcaactgtt

SEQ ID NO: 40274 - DNA, 22 bp, Artificial Sequence
  Synthetic
cacaggtcagcaagcaaaatgt

SEQ ID NO: 40275 - DNA, 25 bp, Artificial Sequence
  Synthetic
aaacttgaggacaaacaattccagc

SEQ ID NO: 40276 - DNA, 20 bp, Artificial Sequence
  Synthetic
gtgctttgggcgctatggaa

SEQ ID NO: 40277 - DNA, 22 bp, Artificial Sequence
  Synthetic
ccaacaacacaggtttggtaca

SEQ ID NO: 40278 - DNA, 25 bp, Artificial Sequence
  Synthetic
ctttgtccatacagccactatgatt

SEQ ID NO: 40279 - DNA, 21 bp, Artificial Sequence
  Synthetic
attacccacagcacatccagt

SEQ ID NO: 40280 - DNA, 21 bp, Artificial Sequence
  Synthetic
aattgacagatgtgagtgccc

SEQ ID NO: 40281 - DNA, 25 bp, Artificial Sequence
  Synthetic
ctggttgaagaaattcactgaatgc

SEQ ID NO: 40282 - DNA, 20 bp, Artificial Sequence
  Synthetic
caaagcacttcagccctgtg

SEQ ID NO: 40283 - DNA, 21 bp, Artificial Sequence
  Synthetic
caagaccagggctacatctca

SEQ ID NO: 40284 - DNA, 22 bp, Artificial Sequence
  Synthetic
gccccagagaaaattaaggctg

SEQ ID NO: 40285 - DNA, 23 bp, Artificial Sequence
  Synthetic
ttacaccaattatgatggcagct

SEQ ID NO: 40286 - DNA, 20 bp, Artificial Sequence
  Synthetic
tccaaagaacacgcaggacc

SEQ ID NO: 40287 - DNA, 24 bp, Artificial Sequence
  Synthetic
tgtttcagaactggggaattgaac

SEQ ID NO: 40288 - DNA, 21 bp, Artificial Sequence
  Synthetic
gccacgcccggatatgaggta

SEQ ID NO: 40289 - DNA, 25 bp, Artificial Sequence
  Synthetic
agggtatttaaaccagttaagtccg

SEQ ID NO: 40290 - DNA, 23 bp, Artificial Sequence
  Synthetic
cgaagctgtacctacttcagttt

SEQ ID NO: 40291 - DNA, 20 bp, Artificial Sequence
  Synthetic
gaacggggcagaggtggaca

SEQ ID NO: 40292 - DNA, 21 bp, Artificial Sequence
  Synthetic
tgcttttgcctggtgaagggc

SEQ ID NO: 40293 - DNA, 22 bp, Artificial Sequence
  Synthetic
gacgagctcgtcgcttgacagc

SEQ ID NO: 40294 - DNA, 20 bp, Artificial Sequence
  Synthetic
gcatggcctcgtgttctggg

SEQ ID NO: 40295 - DNA, 22 bp, Artificial Sequence
  Synthetic
cgtgcacttggggaacttgtca

SEQ ID NO: 40296 - DNA, 21 bp, Artificial Sequence
  Synthetic
tgacgggttgcaggtggtagt

SEQ ID NO: 40297 - DNA, 18 bp, Artificial Sequence
  Synthetic
actcgggggcaaaggcgt

SEQ ID NO: 40298 - DNA, 19 bp, Artificial Sequence
  Synthetic
acgtgcgaggggtagcggt

SEQ ID NO: 40299 - DNA, 19 bp, Artificial Sequence
  Synthetic
tgaccaggtccacgctggt

SEQ ID NO: 40300 - DNA, 22 bp, Artificial Sequence
  Synthetic
aagaaggcggggccaagattgg

SEQ ID NO: 40301 - DNA, 21 bp, Artificial Sequence
  Synthetic
cgaaggaccccatccaggtgt

SEQ ID NO: 40302 - DNA, 22 bp, Artificial Sequence
  Synthetic
tgttcgcctgcgtaggacttac

SEQ ID NO: 40303 - DNA, 21 bp, Artificial Sequence
  Synthetic
ttaagggtggtggcgatgtgc

SEQ ID NO: 40304 - DNA, 20 bp, Artificial Sequence
  Synthetic
gctcgatcatttccccgcgg

SEQ ID NO: 40305 - DNA, 19 bp, Artificial Sequence
  Synthetic
gcctgttgcacgcgggtga

SEQ ID NO: 40306 - DNA, 19 bp, Artificial Sequence
  Synthetic
atccaggtaatgccggcgg

SEQ ID NO: 40307 - DNA, 21 bp, Artificial Sequence
  Synthetic
ggtattggcactcccgtctcg

SEQ ID NO: 40308 - DNA, 19 bp, Artificial Sequence
  Synthetic
ccctgggcctgatgcacct

SEQ ID NO: 40309 - DNA, 19 bp, Artificial Sequence
  Synthetic
tgagcgacgacctgggcgt

SEQ ID NO: 40310 - DNA, 19 bp, Artificial Sequence
  Synthetic
ccagccgtccggtctagca

SEQ ID NO: 40311 - DNA, 18 bp, Artificial Sequence
  Synthetic
ttgacgcccaactcgcgg

SEQ ID NO: 40312 - DNA, 22 bp, Artificial Sequence
  Synthetic
atatgtgcagcagagcgtaggg

SEQ ID NO: 40313 - DNA, 20 bp, Artificial Sequence
  Synthetic
cgagtacgacatgcccgacc

SEQ ID NO: 40314 - DNA, 19 bp, Artificial Sequence
  Synthetic
ggactcggccgacgatagc

SEQ ID NO: 40315 - DNA, 18 bp, Artificial Sequence
  Synthetic
cgccgagctcatgccctt

SEQ ID NO: 40316 - DNA, 19 bp, Artificial Sequence
  Synthetic
ccgtggacgcggtcattga

SEQ ID NO: 40317 - DNA, 22 bp, Artificial Sequence
  Synthetic
ttaaggtgcgccccattaagca

SEQ ID NO: 40318 - DNA, 20 bp, Artificial Sequence
  Synthetic
gccaaccggctgatgcccaa

SEQ ID NO: 40319 - DNA, 21 bp, Artificial Sequence
  Synthetic
cagtgtctggagcgggcttaa

SEQ ID NO: 40320 - DNA, 20 bp, Artificial Sequence
  Synthetic
ccctgcaggtagacgagccg

SEQ ID NO: 40321 - DNA, 22 bp, Artificial Sequence
  Synthetic
gggcctgggagtgaaaagtctg

SEQ ID NO: 40322 - DNA, 22 bp, Artificial Sequence
  Synthetic
cagtgtgaacctctacgccacc

SEQ ID NO: 40323 - DNA, 22 bp, Artificial Sequence
  Synthetic
tcccctacccgcttattggaga

SEQ ID NO: 40324 - DNA, 19 bp, Artificial Sequence
  Synthetic
atgagcggctccagcgaac

SEQ ID NO: 40325 - DNA, 20 bp, Artificial Sequence
  Synthetic
cagcgccctggccttatcgc

SEQ ID NO: 40326 - DNA, 20 bp, Artificial Sequence
  Synthetic
gctctaccgcttccttgcgc

SEQ ID NO: 40327 - DNA, 19 bp, Artificial Sequence
  Synthetic
ctcatctgcagggcgccca

SEQ ID NO: 40328 - DNA, 19 bp, Artificial Sequence
  Synthetic
cgtggtcccacagggcact

SEQ ID NO: 40329 - DNA, 19 bp, Artificial Sequence
  Synthetic
ctttcggcgcttggtgggc

SEQ ID NO: 40330 - DNA, 21 bp, Artificial Sequence
  Synthetic
ctggagcatggctacctggga

SEQ ID NO: 40331 - DNA, 20 bp, Artificial Sequence
  Synthetic
ccgttaacctcccgcccaag

SEQ ID NO: 40332 - DNA, 21 bp, Artificial Sequence
  Synthetic
tcctgcctggggatcctacac

SEQ ID NO: 40333 - DNA, 22 bp, Artificial Sequence
  Synthetic
gtttttcccgaacgcctaaggc

SEQ ID NO: 40334 - DNA, 19 bp, Artificial Sequence
  Synthetic
taagcaccagcggcagggc

SEQ ID NO: 40335 - DNA, 21 bp, Artificial Sequence
  Synthetic
tcacccgcagttgcttgtacc

SEQ ID NO: 40336 - DNA, 22 bp, Artificial Sequence
  Synthetic
ttcgacgcagttagagaagcgg

SEQ ID NO: 40337 - DNA, 24 bp, Artificial Sequence
  Synthetic
gaacagccacgatgtaacattacc

SEQ ID NO: 40338 - DNA, 22 bp, Artificial Sequence
  Synthetic
tggtttttaaagtgcaagccca

SEQ ID NO: 40339 - DNA, 25 bp, Artificial Sequence
  Synthetic
gaatcaaaaattccctcagctactg

SEQ ID NO: 40340 - DNA, 21 bp, Artificial Sequence
  Synthetic
taggagacccatctacaggcc

SEQ ID NO: 40341 - DNA, 25 bp, Artificial Sequence
  Synthetic
catacacactacaaaacagttcacc

SEQ ID NO: 40342 - DNA, 21 bp, Artificial Sequence
  Synthetic
aggtgggctaactttgcaaga

SEQ ID NO: 40343 - DNA, 22 bp, Artificial Sequence
  Synthetic
aatccacacagtttcctggcga

SEQ ID NO: 40344 - DNA, 21 bp, Artificial Sequence
  Synthetic
cgtgaccatcgtaccaaatgc

SEQ ID NO: 40345 - DNA, 22 bp, Artificial Sequence
  Synthetic
taaaaccagcagcacatggtaa

SEQ ID NO: 40346 - DNA, 22 bp, Artificial Sequence
  Synthetic
ttccaaacggtctcgaaggacg

SEQ ID NO: 40347 - DNA, 21 bp, Artificial Sequence
  Synthetic
cgccccctccactttcataat

SEQ ID NO: 40348 - DNA, 22 bp, Artificial Sequence
  Synthetic
ccacaatgtggtagcttacacc

SEQ ID NO: 40349 - DNA, 22 bp, Artificial Sequence
  Synthetic
cgccaaaaaaaaacacacacgc

SEQ ID NO: 40350 - DNA, 22 bp, Artificial Sequence
  Synthetic
cctggtcaaagaagtaccgttt

SEQ ID NO: 40351 - DNA, 24 bp, Artificial Sequence
  Synthetic
taaagccataacaagtagtgctgg

SEQ ID NO: 40352 - DNA, 21 bp, Artificial Sequence
  Synthetic
atcactcgatcagcaaccaca

SEQ ID NO: 40353 - DNA, 25 bp, Artificial Sequence
  Synthetic
catcgacaacccaaaagaaaacaag

SEQ ID NO: 40354 - DNA, 21 bp, Artificial Sequence
  Synthetic
gcgaggaactagtccaaaccc

SEQ ID NO: 40355 - DNA, 24 bp, Artificial Sequence
  Synthetic
ttctacaaaggaacaaaagacggc

SEQ ID NO: 40356 - DNA, 25 bp, Artificial Sequence
  Synthetic
aacaagatacacaacaaacaatgca

SEQ ID NO: 40357 - DNA, 22 bp, Artificial Sequence
  Synthetic
atggaagctctaggaggtcaag

SEQ ID NO: 40358 - DNA, 20 bp, Artificial Sequence
  Synthetic
tagggcaggagtatcaacgg

SEQ ID NO: 40359 - DNA, 22 bp, Artificial Sequence
  Synthetic
ccacagctgctcaaataactgc

SEQ ID NO: 40360 - DNA, 25 bp, Artificial Sequence
  Synthetic
tggaaaaatacatggttaccctctt

SEQ ID NO: 40361 - DNA, 25 bp, Artificial Sequence
  Synthetic
ctttctggatccaccacaatttcag

SEQ ID NO: 40362 - DNA, 21 bp, Artificial Sequence
  Synthetic
ttgcccactgtgaatgagact

SEQ ID NO: 40363 - DNA, 25 bp, Artificial Sequence
  Synthetic
atcaacaaccccatgaccattaaat

SEQ ID NO: 40364 - DNA, 23 bp, Artificial Sequence
  Synthetic
atttcccaatcttggtgaggatg

SEQ ID NO: 40365 - DNA, 20 bp, Artificial Sequence
  Synthetic
agttgcagctctagcagact

SEQ ID NO: 40366 - DNA, 25 bp, Artificial Sequence
  Synthetic
aagtactgtccaatgcattatcaca

SEQ ID NO: 40367 - DNA, 23 bp, Artificial Sequence
  Synthetic
gcaatgctgtcttgttatgatgc

SEQ ID NO: 40368 - DNA, 22 bp, Artificial Sequence
  Synthetic
attgaacagaaatcagccggct

SEQ ID NO: 40369 - DNA, 23 bp, Artificial Sequence
  Synthetic
ataccagcagaaatgctagcaag

SEQ ID NO: 40370 - DNA, 24 bp, Artificial Sequence
  Synthetic
atgataaataatgaccttgggcca

SEQ ID NO: 40371 - DNA, 21 bp, Artificial Sequence
  Synthetic
aatttccagcatggtggaggc

SEQ ID NO: 40372 - DNA, 25 bp, Artificial Sequence
  Synthetic
ttaaggctgacatgtgtattttgca

SEQ ID NO: 40373 - DNA, 22 bp, Artificial Sequence
  Synthetic
cagggtggttactacctgtggc

SEQ ID NO: 40374 - DNA, 22 bp, Artificial Sequence
  Synthetic
gggtaatatgtgcgtttggtgt

SEQ ID NO: 40375 - DNA, 25 bp, Artificial Sequence
  Synthetic
gtgcgcactatattggtatagaaca

SEQ ID NO: 40376 - DNA, 20 bp, Artificial Sequence
  Synthetic
tccagtacccctaccgctgg

SEQ ID NO: 40377 - DNA, 22 bp, Artificial Sequence
  Synthetic
tttttcagatggctttgtggcg

SEQ ID NO: 40378 - DNA, 21 bp, Artificial Sequence
  Synthetic
gctcgccactttttcaatcgc

SEQ ID NO: 40379 - DNA, 23 bp, Artificial Sequence
  Synthetic
cacccgcagtactaatttaacca

SEQ ID NO: 40380 - DNA, 20 bp, Artificial Sequence
  Synthetic
ccttgtgcatgtgctgtttg

SEQ ID NO: 40381 - DNA, 22 bp, Artificial Sequence
  Synthetic
tttgtgttgccgaccgttttcg

SEQ ID NO: 40382 - DNA, 20 bp, Artificial Sequence
  Synthetic
ttgctggtttggcattgctt

SEQ ID NO: 40383 - DNA, 20 bp, Artificial Sequence
  Synthetic
ggtctgaaccaacggcaaca

SEQ ID NO: 40384 - DNA, 21 bp, Artificial Sequence
  Synthetic
cacccatacagcagctacttg

SEQ ID NO: 40385 - DNA, 19 bp, Artificial Sequence
  Synthetic
gacagcgggaaccccacgt

SEQ ID NO: 40386 - DNA, 19 bp, Artificial Sequence
  Synthetic
acgccccagccgtcaatca

SEQ ID NO: 40387 - DNA, 22 bp, Artificial Sequence
  Synthetic
cggatggaaaacatatcgcacg

SEQ ID NO: 40388 - DNA, 22 bp, Artificial Sequence
  Synthetic
gggttgcagacaaaagtgattg

SEQ ID NO: 40389 - DNA, 21 bp, Artificial Sequence
  Synthetic
gttgttggatgctctgcgtgc

SEQ ID NO: 40390 - DNA, 21 bp, Artificial Sequence
  Synthetic
tccgtgctccttcattgtcgg

SEQ ID NO: 40391 - DNA, 21 bp, Artificial Sequence
  Synthetic
taccgggacagcctctggatg

SEQ ID NO: 40392 - DNA, 21 bp, Artificial Sequence
  Synthetic
ttaacctcggcctcggttgga

SEQ ID NO: 40393 - DNA, 22 bp, Artificial Sequence
  Synthetic
gcagggactcaagaggacccca

SEQ ID NO: 40394 - DNA, 22 bp, Artificial Sequence
  Synthetic
ctgaagggccatgccacctatg

SEQ ID NO: 40395 - DNA, 22 bp, Artificial Sequence
  Synthetic
ggcataccacgtgtgtgatggg

SEQ ID NO: 40396 - DNA, 19 bp, Artificial Sequence
  Synthetic
gcaaggcgggccagaggtt

SEQ ID NO: 40397 - DNA, 21 bp, Artificial Sequence
  Synthetic
attgcgcaacatggtaaggcg

SEQ ID NO: 40398 - DNA, 19 bp, Artificial Sequence
  Synthetic
cgcggtcgggggttctgat

SEQ ID NO: 40399 - DNA, 19 bp, Artificial Sequence
  Synthetic
ccggaggggagttgcctgt

SEQ ID NO: 40400 - DNA, 20 bp, Artificial Sequence
  Synthetic
gcggtcatgacggagaccaa

SEQ ID NO: 40401 - DNA, 21 bp, Artificial Sequence
  Synthetic
gggatacacccgctcactcgc

SEQ ID NO: 40402 - DNA, 21 bp, Artificial Sequence
  Synthetic
ccaactggtgtgagaggggga

SEQ ID NO: 40403 - DNA, 19 bp, Artificial Sequence
  Synthetic
ccagcccccacacatcacc

SEQ ID NO: 40404 - DNA, 19 bp, Artificial Sequence
  Synthetic
tcaggatcccgccggagat

SEQ ID NO: 40405 - DNA, 19 bp, Artificial Sequence
  Synthetic
cgccggacagctcctcgat

SEQ ID NO: 40406 - DNA, 20 bp, Artificial Sequence
  Synthetic
ggagcgggtgaaggaatggg

SEQ ID NO: 40407 - DNA, 19 bp, Artificial Sequence
  Synthetic
agtgccccaggggtctctg

SEQ ID NO: 40408 - DNA, 21 bp, Artificial Sequence
  Synthetic
ccagctggtaaacaccaccga

SEQ ID NO: 40409 - DNA, 21 bp, Artificial Sequence
  Synthetic
ctcctgtaggaggccggcttg

SEQ ID NO: 40410 - DNA, 22 bp, Artificial Sequence
  Synthetic
tgaaaccggtatgtccaggggt

SEQ ID NO: 40411 - DNA, 22 bp, Artificial Sequence
  Synthetic
agaggttagggtaggtgtccgg

SEQ ID NO: 40412 - DNA, 20 bp, Artificial Sequence
  Synthetic
ctgtgtatggtgcaaacggc

SEQ ID NO: 40413 - DNA, 22 bp, Artificial Sequence
  Synthetic
actgcgcctagcgttatggagg

SEQ ID NO: 40414 - DNA, 20 bp, Artificial Sequence
  Synthetic
cgtcaagggggagacggaga

SEQ ID NO: 40415 - DNA, 22 bp, Artificial Sequence
  Synthetic
ggacatagcatggaagacgaac

SEQ ID NO: 40416 - DNA, 21 bp, Artificial Sequence
  Synthetic
cagcaggctgacagtgtttac

SEQ ID NO: 40417 - DNA, 22 bp, Artificial Sequence
  Synthetic
tcgcagcctcagcagaatcaac

SEQ ID NO: 40418 - DNA, 22 bp, Artificial Sequence
  Synthetic
caggtaccagtgtgcaggtcag

SEQ ID NO: 40419 - DNA, 21 bp, Artificial Sequence
  Synthetic
cctcgcggttcactctctctg

SEQ ID NO: 40420 - DNA, 22 bp, Artificial Sequence
  Synthetic
tgtgtattaccatggtggcagt

SEQ ID NO: 40421 - DNA, 25 bp, Artificial Sequence
  Synthetic
agagccttatggtgattctatgttc

SEQ ID NO: 40422 - DNA, 20 bp, Artificial Sequence
  Synthetic
ggaacttcggtgtaccccct

SEQ ID NO: 40423 - DNA, 20 bp, Artificial Sequence
  Synthetic
gttttcggttgcgtgcagtt

SEQ ID NO: 40424 - DNA, 25 bp, Artificial Sequence
  Synthetic
gttgcaaagtaaaaatagacgtgct

SEQ ID NO: 40425 - DNA, 22 bp, Artificial Sequence
  Synthetic
tcctcatcaacacccagaggga

SEQ ID NO: 40426 - DNA, 20 bp, Artificial Sequence
  Synthetic
ggattggtgggagtacaggc

SEQ ID NO: 40427 - DNA, 21 bp, Artificial Sequence
  Synthetic
aatgcaggcagacctagcata

SEQ ID NO: 40428 - DNA, 23 bp, Artificial Sequence
  Synthetic
gtgccacttgaaattacagcatc

SEQ ID NO: 40429 - DNA, 23 bp, Artificial Sequence
  Synthetic
ctttggatgttagccattcaggt

SEQ ID NO: 40430 - DNA, 25 bp, Artificial Sequence
  Synthetic
gatttccctggctttgtataacagt

SEQ ID NO: 40431 - DNA, 24 bp, Artificial Sequence
  Synthetic
taatggcgcgagttttgaaaatgg

SEQ ID NO: 40432 - DNA, 23 bp, Artificial Sequence
  Synthetic
gtaaaggtactggtggttctacg

SEQ ID NO: 40433 - DNA, 20 bp, Artificial Sequence
  Synthetic
gataacaacccccgcagttt

SEQ ID NO: 40434 - DNA, 21 bp, Artificial Sequence
  Synthetic
accttttgttgcttgtggacc

SEQ ID NO: 40435 - DNA, 21 bp, Artificial Sequence
  Synthetic
ggttcgccagcaataaaacca

SEQ ID NO: 40436 - DNA, 25 bp, Artificial Sequence
  Synthetic
tcaaagaatggcatctaagattgga

SEQ ID NO: 40437 - DNA, 22 bp, Artificial Sequence
  Synthetic
ctcaggacaattgctatgggac

SEQ ID NO: 40438 - DNA, 20 bp, Artificial Sequence
  Synthetic
tctaacagctgaagcgccag

SEQ ID NO: 40439 - DNA, 22 bp, Artificial Sequence
  Synthetic
gcggacgataaaggtactgatc

SEQ ID NO: 40440 - DNA, 23 bp, Artificial Sequence
  Synthetic
ctcacagatgaagctgacattgc

SEQ ID NO: 40441 - DNA, 20 bp, Artificial Sequence
  Synthetic
agacgaggcagacaatggag

SEQ ID NO: 40442 - DNA, 23 bp, Artificial Sequence
  Synthetic
caaacaagctattggcatgatgc

SEQ ID NO: 40443 - DNA, 20 bp, Artificial Sequence
  Synthetic
ccaccaccttcagcaccacc

SEQ ID NO: 40444 - DNA, 21 bp, Artificial Sequence
  Synthetic
acgctctagtaccccactacg

SEQ ID NO: 40445 - DNA, 21 bp, Artificial Sequence
  Synthetic
gcccaaaatactcttggcagc

SEQ ID NO: 40446 - DNA, 20 bp, Artificial Sequence
  Synthetic
gattgcagcgcagatcgttt

SEQ ID NO: 40447 - DNA, 24 bp, Artificial Sequence
  Synthetic
gttactagctcttccaggaagtct

SEQ ID NO: 40448 - DNA, 21 bp, Artificial Sequence
  Synthetic
tctagggcatcacacacagat

SEQ ID NO: 40449 - DNA, 24 bp, Artificial Sequence
  Synthetic
cgctttatagtacatccagacaca

SEQ ID NO: 40450 - DNA, 20 bp, Artificial Sequence
  Synthetic
actgtccattgtgtgccctc

SEQ ID NO: 40451 - DNA, 20 bp, Artificial Sequence
  Synthetic
ggcgccgctattaatgacat

SEQ ID NO: 40452 - DNA, 25 bp, Artificial Sequence
  Synthetic
ttgataatgaatggactgaggaagc

SEQ ID NO: 40453 - DNA, 20 bp, Artificial Sequence
  Synthetic
cgacttggaaggcttgaagc

SEQ ID NO: 40454 - DNA, 20 bp, Artificial Sequence
  Synthetic
acagatgaaggcacaactgc

SEQ ID NO: 40455 - DNA, 21 bp, Artificial Sequence
  Synthetic
gtcgcgtgcagtacagtagac

SEQ ID NO: 40456 - DNA, 21 bp, Artificial Sequence
  Synthetic
actgtagaaggtgcatgcaga

SEQ ID NO: 40457 - DNA, 20 bp, Artificial Sequence
  Synthetic
ggtgtgccagatcagctgtg

SEQ ID NO: 40458 - DNA, 24 bp, Artificial Sequence
  Synthetic
cattacggaagagcaggaaattgc

SEQ ID NO: 40459 - DNA, 20 bp, Artificial Sequence
  Synthetic
ggaggacttcaaaccgcgga

SEQ ID NO: 40460 - DNA, 22 bp, Artificial Sequence
  Synthetic
ccaaaacgaatagtggtggagg

SEQ ID NO: 40461 - DNA, 21 bp, Artificial Sequence
  Synthetic
aggaacttttacggtcgacgg

SEQ ID NO: 40462 - DNA, 21 bp, Artificial Sequence
  Synthetic
atgttgctcctgaatgtgacg

SEQ ID NO: 40463 - DNA, 23 bp, Artificial Sequence
  Synthetic
actagaaaacgtcccagaactga

SEQ ID NO: 40464 - DNA, 20 bp, Artificial Sequence
  Synthetic
gctttggaccatctgcggta

SEQ ID NO: 40465 - DNA, 22 bp, Artificial Sequence
  Synthetic
agattgtgtatctggtgtgcca

SEQ ID NO: 40466 - DNA, 20 bp, Artificial Sequence
  Synthetic
attagggcatccgtcgggaa

SEQ ID NO: 40467 - DNA, 20 bp, Artificial Sequence
  Synthetic
ctgtgcgtatggacctgcag

SEQ ID NO: 40468 - DNA, 25 bp, Artificial Sequence
  Synthetic
acatgagggcagaaatcataagaat

SEQ ID NO: 40469 - DNA, 20 bp, Artificial Sequence
  Synthetic
ccacgtactgtgcaccatct

SEQ ID NO: 40470 - DNA, 24 bp, Artificial Sequence
  Synthetic
agaggatgaggatgaagtagacaa

SEQ ID NO: 40471 - DNA, 25 bp, Artificial Sequence
  Synthetic
ttgggagacattagtaatcagcaat

SEQ ID NO: 40472 - DNA, 22 bp, Artificial Sequence
  Synthetic
taccctcagatccaacgtatcc

SEQ ID NO: 40473 - DNA, 21 bp, Artificial Sequence
  Synthetic
cctatatgtgccgcttttgct

SEQ ID NO: 40474 - DNA, 20 bp, Artificial Sequence
  Synthetic
cagacgaaaacgggcctctg

SEQ ID NO: 40475 - DNA, 23 bp, Artificial Sequence
  Synthetic
cggccatatattggttagcactc

SEQ ID NO: 40476 - DNA, 21 bp, Artificial Sequence
  Synthetic
ctttacaacacgtaggggtgg

SEQ ID NO: 40477 - DNA, 20 bp, Artificial Sequence
  Synthetic
ggcggcctagtgaaaccaag

SEQ ID NO: 40478 - DNA, 21 bp, Artificial Sequence
  Synthetic
tatagggtctttagggtccgc

SEQ ID NO: 40479 - DNA, 23 bp, Artificial Sequence
  Synthetic
gccttatgtgaagaggtcaacat

SEQ ID NO: 40480 - DNA, 22 bp, Artificial Sequence
  Synthetic
ttaacagaggacgacgacaagg

SEQ ID NO: 40481 - DNA, 20 bp, Artificial Sequence
  Synthetic
gggtttgggtattggtagcg

SEQ ID NO: 40482 - DNA, 20 bp, Artificial Sequence
  Synthetic
aatgctggggaatgtcctcc

SEQ ID NO: 40483 - DNA, 25 bp, Artificial Sequence
  Synthetic
tgacttaatgattaagggtacaggc

SEQ ID NO: 40484 - DNA, 25 bp, Artificial Sequence
  Synthetic
agcacaaaggtttaatgtgttttgg

SEQ ID NO: 40485 - DNA, 22 bp, Artificial Sequence
  Synthetic
gctctatcaaaacccaaccact

SEQ ID NO: 40486 - DNA, 22 bp, Artificial Sequence
  Synthetic
acaccaagtgtcaaactccaat

SEQ ID NO: 40487 - DNA, 20 bp, Artificial Sequence
  Synthetic
gtggatacgctgcagacaaa

SEQ ID NO: 40488 - DNA, 20 bp, Artificial Sequence
  Synthetic
agttccctagcactggcaat

SEQ ID NO: 40489 - DNA, 20 bp, Artificial Sequence
  Synthetic
gaaatcagagcatccgtcgg

SEQ ID NO: 40490 - DNA, 24 bp, Artificial Sequence
  Synthetic
gatcaatgatcggaacttctggag

SEQ ID NO: 40491 - DNA, 21 bp, Artificial Sequence
  Synthetic
ggatccagtaaaagacggctg

SEQ ID NO: 40492 - DNA, 24 bp, Artificial Sequence
  Synthetic
caggctactggggatttatgaagc

SEQ ID NO: 40493 - DNA, 20 bp, Artificial Sequence
  Synthetic
aagacgcacaggacaattgg

SEQ ID NO: 40494 - DNA, 23 bp, Artificial Sequence
  Synthetic
taaagggcctgcaaatactacca

SEQ ID NO: 40495 - DNA, 20 bp, Artificial Sequence
  Synthetic
tgttggtgagggacgggtta

SEQ ID NO: 40496 - DNA, 20 bp, Artificial Sequence
  Synthetic
tgggatgttgctcctgcatg

SEQ ID NO: 40497 - DNA, 25 bp, Artificial Sequence
  Synthetic
agttatttagtaggccctactggat

SEQ ID NO: 40498 - DNA, 22 bp, Artificial Sequence
  Synthetic
gaatgtcctctgaattaggggc

SEQ ID NO: 40499 - DNA, 24 bp, Artificial Sequence
  Synthetic
tttaggtactggctacattccaca

SEQ ID NO: 40500 - DNA, 20 bp, Human papillomavirus type 175
tagagttgacacctgttgta

SEQ ID NO: 40501 - DNA, 20 bp, Human papillomavirus type 175
acacctgttgtagtacttgt

SEQ ID NO: 40502 - DNA, 20 bp, Human papillomavirus type 175
tagtacttgtggaacaggtg

SEQ ID NO: 40503 - DNA, 20 bp, Human papillomavirus type 175
tggaacaggtgtccgtctct

SEQ ID NO: 40504 - DNA, 20 bp, Human papillomavirus type 175
tggccacaaggtcagccatc

SEQ ID NO: 40505 - DNA, 20 bp, Human papillomavirus type 175
tcctgactggattagaaagc

SEQ ID NO: 40506 - DNA, 20 bp, Human papillomavirus type 175
cctgactggattagaaagca

SEQ ID NO: 40507 - DNA, 20 bp, Human papillomavirus type 175
ctgactggattagaaagcat

SEQ ID NO: 40508 - DNA, 20 bp, Human papillomavirus type 175
gaaagcatacacaattaaat

SEQ ID NO: 40509 - DNA, 20 bp, Human papillomavirus type 175
aatcatgaaacagctgcagc

SEQ ID NO: 40510 - DNA, 20 bp, Human papillomavirus type 175
ctggttgcaaaatcttatta

SEQ ID NO: 40511 - DNA, 20 bp, Human papillomavirus type 175
tggttgcaaaatcttattaa

SEQ ID NO: 40512 - DNA, 20 bp, Human papillomavirus type 175
caaaatcttattaatacaaa

SEQ ID NO: 40513 - DNA, 20 bp, Human papillomavirus type 175
ttaatacaaaaataggtttt

SEQ ID NO: 40514 - DNA, 20 bp, Human papillomavirus type 175
atacaaaaataggttttcta

SEQ ID NO: 40515 - DNA, 20 bp, Human papillomavirus type 175
agcattggcaacttgttaga

SEQ ID NO: 40516 - DNA, 20 bp, Human papillomavirus type 175
gcaacttgttagaaaaatta

SEQ ID NO: 40517 - DNA, 20 bp, Human papillomavirus type 175
ttagaaaaattaatgtgcta

SEQ ID NO: 40518 - DNA, 20 bp, Human papillomavirus type 175
gaaaaattaatgtgctatat

SEQ ID NO: 40519 - DNA, 20 bp, Human papillomavirus type 175
atgtgctatattattatgct

SEQ ID NO: 40520 - DNA, 20 bp, Human papillomavirus type 175
ccccaccgcagagcctccca

SEQ ID NO: 40521 - DNA, 20 bp, Human papillomavirus type 175
cccaccgcagagcctcccac

SEQ ID NO: 40522 - DNA, 20 bp, Human papillomavirus type 175
cctcttcgctttcgtgggat

SEQ ID NO: 40523 - DNA, 20 bp, Human papillomavirus type 175
gctttcgtgggatcttgtat

SEQ ID NO: 40524 - DNA, 20 bp, Human papillomavirus type 175
cgtgggatcttgtatgccgc

SEQ ID NO: 40525 - DNA, 20 bp, Human papillomavirus type 175
cagcaacaggtcttacagga

SEQ ID NO: 40526 - DNA, 20 bp, Human papillomavirus type 175
caagtcctgtaagacctgtt

SEQ ID NO: 40527 - DNA, 20 bp, Human papillomavirus type 175
ctggaaccgttcgatgtccg

SEQ ID NO: 40528 - DNA, 20 bp, Human papillomavirus type 175
gatgtccgcttcccacttct

SEQ ID NO: 40529 - DNA, 20 bp, Human papillomavirus type 175
ccacttctccagcagatacc

SEQ ID NO: 40530 - DNA, 20 bp, Human papillomavirus type 175
gttatgcatcacatagaatg

SEQ ID NO: 40531 - DNA, 20 bp, Human papillomavirus type 175
tgcatcacatagaatgcttg

SEQ ID NO: 40532 - DNA, 20 bp, Human papillomavirus type 175
tagcatttcaaaatcaggct

SEQ ID NO: 40533 - DNA, 20 bp, Human papillomavirus type 175
caaaatcaggctcagagaaa

SEQ ID NO: 40534 - DNA, 20 bp, Human papillomavirus type 175
aaaatcaggctcagagaaag

SEQ ID NO: 40535 - DNA, 20 bp, Human papillomavirus type 175
aggggaacatataggcctgg

SEQ ID NO: 40536 - DNA, 20 bp, Human papillomavirus type 175
ggggaacatataggcctgga

SEQ ID NO: 40537 - DNA, 20 bp, Human papillomavirus type 175
gagactttgggaggtcctga

SEQ ID NO: 40538 - DNA, 20 bp, Human papillomavirus type 175
gggaggtcctgaaacatttg

SEQ ID NO: 40539 - DNA, 20 bp, Human papillomavirus type 175
ggaggtcctgaaacatttga

SEQ ID NO: 40540 - DNA, 20 bp, Human papillomavirus type 175
agaatttcaacaagacttgc

SEQ ID NO: 40541 - DNA, 20 bp, Human papillomavirus type 175
gaatttcaacaagacttgca

SEQ ID NO: 40542 - DNA, 20 bp, Human papillomavirus type 175
caacaagacttgcaagaggt

SEQ ID NO: 40543 - DNA, 20 bp, Human papillomavirus type 175
aacaagacttgcaagaggta

SEQ ID NO: 40544 - DNA, 20 bp, Human papillomavirus type 175
caagaggtagctgctgctcc

SEQ ID NO: 40545 - DNA, 20 bp, Human papillomavirus type 175
ttaacccacaggcagaaagt

SEQ ID NO: 40546 - DNA, 20 bp, Human papillomavirus type 175
acccacaggcagaaagtagt

SEQ ID NO: 40547 - DNA, 20 bp, Human papillomavirus type 175
tatagatgcattagctgagt

SEQ ID NO: 40548 - DNA, 20 bp, Human papillomavirus type 175
atagatgcattagctgagtc

SEQ ID NO: 40549 - DNA, 20 bp, Human papillomavirus type 175
tagatgcattagctgagtct

SEQ ID NO: 40550 - DNA, 20 bp, Human papillomavirus type 175
aggcattggattaacaggaa

SEQ ID NO: 40551 - DNA, 20 bp, Human papillomavirus type 175
ggcattggattaacaggaaa

SEQ ID NO: 40552 - DNA, 20 bp, Human papillomavirus type 175
gattaacaggaaatcctttg

SEQ ID NO: 40553 - DNA, 20 bp, Human papillomavirus type 175
acaggaaatcctttgttcaa

SEQ ID NO: 40554 - DNA, 20 bp, Human papillomavirus type 175
gttcaataaatatgctgacg

SEQ ID NO: 40555 - DNA, 20 bp, Human papillomavirus type 175
tatcactcaccagtaaataa

SEQ ID NO: 40556 - DNA, 20 bp, Human papillomavirus type 175
ctccctacacgtattttcca

SEQ ID NO: 40557 - DNA, 20 bp, Human papillomavirus type 175
tccaaccacaagcggttcct

SEQ ID NO: 40558 - DNA, 20 bp, Human papillomavirus type 175
ccaaccacaagcggttcctt

SEQ ID NO: 40559 - DNA, 20 bp, Human papillomavirus type 175
caaccacaagcggttcctta

SEQ ID NO: 40560 - DNA, 20 bp, Human papillomavirus type 175
tggactatggatctgtctga

SEQ ID NO: 40561 - DNA, 20 bp, Human papillomavirus type 175
gcattaggtaaaaagttttt

SEQ ID NO: 40562 - DNA, 20 bp, Human papillomavirus type 175
cattaggtaaaaagttttta

SEQ ID NO: 40563 - DNA, 20 bp, Human papillomavirus type 175
ggtaaaaagtttttatatca

SEQ ID NO: 40564 - DNA, 20 bp, Human papillomavirus type 175
atataaaaactttttaccta

SEQ ID NO: 40565 - DNA, 20 bp, Human papillomavirus type 175
aattgcatccttaggactta

SEQ ID NO: 40566 - DNA, 20 bp, Human papillomavirus type 175
attgcatccttaggacttag

SEQ ID NO: 40567 - DNA, 20 bp, Human papillomavirus type 175
catccttaggacttagttac

SEQ ID NO: 40568 - DNA, 20 bp, Human papillomavirus type 175
ggacttagttacagactgct

SEQ ID NO: 40569 - DNA, 20 bp, Human papillomavirus type 175
gttacagactgctgtggaca

SEQ ID NO: 40570 - DNA, 20 bp, Human papillomavirus type 163
agttcgtggtcgttggcgtg

SEQ ID NO: 40571 - DNA, 20 bp, Human papillomavirus type 175
gttcgtggtcgttggcgtgc

SEQ ID NO: 40572 - DNA, 20 bp, Human papillomavirus type 163
gtggtcgttggcgtgcttat

SEQ ID NO: 40573 - DNA, 20 bp, Human papillomavirus type 163
gcgtgcttattgcaggcatt

SEQ ID NO: 40574 - DNA, 20 bp, Human papillomavirus type 163
ttgcaggcattgtactgaaa

SEQ ID NO: 40575 - DNA, 20 bp, Human papillomavirus type 163
gaacaacttattctcgacga

SEQ ID NO: 40576 - DNA, 20 bp, Human papillomavirus type 163
ttctcgacgaaggactttct

SEQ ID NO: 40577 - DNA, 20 bp, Human papillomavirus type 163
tcgacgaaggactttctctt

SEQ ID NO: 40578 - DNA, 20 bp, Human papillomavirus type 163
ctctttgttgtccatcctgt

SEQ ID NO: 40579 - DNA, 20 bp, Human papillomavirus type 163
tctttgttgtccatcctgtg

SEQ ID NO: 40580 - DNA, 20 bp, Human papillomavirus type 163
tacaatgcacaggcaactgt

SEQ ID NO: 40581 - DNA, 20 bp, Human papillomavirus type 163
taaaagtccagaagttgcag

SEQ ID NO: 40582 - DNA, 20 bp, Human papillomavirus type 163
cagttgccgatttgagtcca

SEQ ID NO: 40583 - DNA, 20 bp, Human papillomavirus type 163
ccgatttgagtccacagttg

SEQ ID NO: 40584 - DNA, 20 bp, Human papillomavirus type 163
tggacttttagaatactttc

SEQ ID NO: 40585 - DNA, 20 bp, Human papillomavirus type 163
tataaatttactgatggtgc

SEQ ID NO: 40586 - DNA, 20 bp, Human papillomavirus type 163
actgatggtgcatggaaatc

SEQ ID NO: 40587 - DNA, 20 bp, Human papillomavirus type 163
ctgatggtgcatggaaatct

SEQ ID NO: 40588 - DNA, 20 bp, Human papillomavirus type 163
ctttagaaagcttggcgccc

SEQ ID NO: 40589 - DNA, 20 bp, Human papillomavirus type 163
tttagaaagcttggcgccca

SEQ ID NO: 40590 - DNA, 20 bp, Human papillomavirus type 163
gggagattctcccgattttt

SEQ ID NO: 40591 - DNA, 20 bp, Human papillomavirus type 163
ggagattctcccgatttttg

SEQ ID NO: 40592 - DNA, 20 bp, Human papillomavirus type 163
tcccgatttttggagtcgtc

SEQ ID NO: 40593 - DNA, 20 bp, Human papillomavirus type 163
ttggagtcgtctcctagcag

SEQ ID NO: 40594 - DNA, 20 bp, Human papillomavirus type 163
tggagtcgtctcctagcagg

SEQ ID NO: 40595 - DNA, 20 bp, Human papillomavirus type 163
gacaattacaagcggacgct

SEQ ID NO: 40596 - DNA, 20 bp, Human papillomavirus type 163
caagcggacgcttgggatcc

SEQ ID NO: 40597 - DNA, 20 bp, Human papillomavirus type 163
ggatccgccaataattcttg

SEQ ID NO: 40598 - DNA, 20 bp, Human papillomavirus type 163
ttgtaaggggtctacccaac

SEQ ID NO: 40599 - DNA, 20 bp, Human papillomavirus type 163
taaggggtctacccaacacg

SEQ ID NO: 40600 - DNA, 20 bp, Human papillomavirus type 163
tcaactcctagtagagtaaa

SEQ ID NO: 40601 - DNA, 20 bp, Human papillomavirus type 163
ctgttgacactataggccca

SEQ ID NO: 40602 - DNA, 20 bp, Human papillomavirus type 163
acactataggcccatctgag

SEQ ID NO: 40603 - DNA, 20 bp, Human papillomavirus type 163
caatagatgttattgatcct

SEQ ID NO: 40604 - DNA, 20 bp, Human papillomavirus type 163
gaactacctcagatgggcct

SEQ ID NO: 40605 - DNA, 20 bp, Human papillomavirus type 163
ttgcagctagtggacatcca

SEQ ID NO: 40606 - DNA, 20 bp, Human papillomavirus type 163
cagctagtggacatccaacc

SEQ ID NO: 40607 - DNA, 20 bp, Human papillomavirus type 163
ttagcaatgcagaagaaggt

SEQ ID NO: 40608 - DNA, 20 bp, Human papillomavirus type 163
gcaatgcagaagaaggtgta

SEQ ID NO: 40609 - DNA, 20 bp, Human papillomavirus type 163
gatgtgcaacctatagaacc

SEQ ID NO: 40610 - DNA, 20 bp, Human papillomavirus type 163
tgaaatgatacctttggaga

SEQ ID NO: 40611 - DNA, 20 bp, Human papillomavirus type 163
ggagacattacacaccagag

SEQ ID NO: 40612 - DNA, 20 bp, Human papillomavirus type 163
gagacattacacaccagagc

SEQ ID NO: 40613 - DNA, 20 bp, Human papillomavirus type 163
cacaccagagctgaatttga

SEQ ID NO: 40614 - DNA, 20 bp, Human papillomavirus type 163
gaaattgaagcccctcccag

SEQ ID NO: 40615 - DNA, 20 bp, Human papillomavirus type 163
gagcaggatgtagcagaggc

SEQ ID NO: 40616 - DNA, 20 bp, Human papillomavirus type 163
agcaggatgtagcagaggcg

SEQ ID NO: 40617 - DNA, 20 bp, Human papillomavirus type 163
cagcgcccgatctggatttt

SEQ ID NO: 40618 - DNA, 20 bp, Human papillomavirus type 163
tgctgacattagagtattag

SEQ ID NO: 40619 - DNA, 20 bp, Human papillomavirus type 163
gctgacattagagtattagg

SEQ ID NO: 40620 - DNA, 20 bp, Human papillomavirus type 163
attatatgattttgaaagcc

SEQ ID NO: 40621 - DNA, 20 bp, Human papillomavirus type 163
ttatatgattttgaaagcca

SEQ ID NO: 40622 - DNA, 20 bp, Human papillomavirus type 163
tatgattttgaaagccatga

SEQ ID NO: 40623 - DNA, 20 bp, Human papillomavirus type 163
tgaaagccatgattttatac

SEQ ID NO: 40624 - DNA, 20 bp, Human papillomavirus type 163
gaaagccatgattttatact

SEQ ID NO: 40625 - DNA, 20 bp, Human papillomavirus type 163
actgtaggtcacccatactt

SEQ ID NO: 40626 - DNA, 20 bp, Human papillomavirus type 163
cctattcgggatgttcaaga

SEQ ID NO: 40627 - DNA, 20 bp, Human papillomavirus type 163
ctattcgggatgttcaagat

SEQ ID NO: 40628 - DNA, 20 bp, Human papillomavirus type 163
gggatgttcaagataaaaca

SEQ ID NO: 40629 - DNA, 20 bp, Human papillomavirus type 163
aagataaaacaaaaatatta

SEQ ID NO: 40630 - DNA, 20 bp, Human papillomavirus type 163
aacagagcgatgataatcgc

SEQ ID NO: 40631 - DNA, 20 bp, Human papillomavirus type 163
agaccctaagcaaacccaac

SEQ ID NO: 40632 - DNA, 20 bp, Human papillomavirus type 163
gaccctaagcaaacccaact

SEQ ID NO: 40633 - DNA, 20 bp, Human papillomavirus type 163
attgtaggctgtgctccacc

SEQ ID NO: 40634 - DNA, 20 bp, Human papillomavirus type 163
ttgtaggctgtgctccacca

SEQ ID NO: 40635 - DNA, 20 bp, Human papillomavirus type 163
ggaacacctagtggttctct

SEQ ID NO: 40636 - DNA, 20 bp, Human papillomavirus type 163
gaacacctagtggttctcta

SEQ ID NO: 40637 - DNA, 20 bp, Human papillomavirus type 163
tctagtttccagtgaatccc

SEQ ID NO: 40638 - DNA, 20 bp, Human papillomavirus type 163
ccagtgaatcccaagtattt

SEQ ID NO: 40639 - DNA, 20 bp, Human papillomavirus type 163
cagtgaatcccaagtattta

SEQ ID NO: 40640 - DNA, 20 bp, Hepatitis C virus
gtatgagtgtcgtacagcct

SEQ ID NO: 40641 - DNA, 20 bp, Hepatitis C virus
ccgggaagactgggtccttt

SEQ ID NO: 40642 - DNA, 20 bp, Hepatitis C virus
ccggcaattccggtgtactc

SEQ ID NO: 40643 - DNA, 20 bp, Hepatitis C virus
cggtgtactcaccggttccg

SEQ ID NO: 40644 - DNA, 20 bp, Hepatitis C virus
cgcagaccactatggctctc

SEQ ID NO: 40645 - DNA, 20 bp, Hepatitis C virus
agttcccgggtggcgggcag

SEQ ID NO: 40646 - DNA, 20 bp, Hepatitis C virus
ccgggtggcgggcagatcgt

SEQ ID NO: 40647 - DNA, 20 bp, Hepatitis C virus
gcggagtctacttgttgccg

SEQ ID NO: 40648 - DNA, 20 bp, Hepatitis C virus
ttgccgcgcaggggccctag

SEQ ID NO: 40649 - DNA, 20 bp, Hepatitis C virus
ccgcgcaggggccctagatt

SEQ ID NO: 40650 - DNA, 20 bp, Hepatitis C virus
gccgacctcatggggtacat

SEQ ID NO: 40651 - DNA, 20 bp, Hepatitis C virus
ccgacctcatggggtacatc

SEQ ID NO: 40652 - DNA, 20 bp, Hepatitis C virus
ccagggctctggcacatggt

SEQ ID NO: 40653 - DNA, 20 bp, Hepatitis C virus
gagttctggaggacggggtc

SEQ ID NO: 40654 - DNA, 20 bp, Hepatitis C virus
cgttcgcgagggtaatacta

SEQ ID NO: 40655 - DNA, 20 bp, Hepatitis C virus
gcgagggtaatactagcagg

SEQ ID NO: 40656 - DNA, 20 bp, Hepatitis C virus
ggaaccagtggcccccactt

SEQ ID NO: 40657 - DNA, 20 bp, Hepatitis C virus
ggcggtccgctatcgcggag

SEQ ID NO: 40658 - DNA, 20 bp, Hepatitis C virus
gcggtccgctatcgcggagc

SEQ ID NO: 40659 - DNA, 20 bp, Hepatitis C virus
tcaatggttgccgcttacgc

SEQ ID NO: 40660 - DNA, 20 bp, Hepatitis C virus
ccgcttacgctgtgagagtg

SEQ ID NO: 40661 - DNA, 20 bp, Hepatitis C virus
cgctgtgagagtgcccggtg

SEQ ID NO: 40662 - DNA, 20 bp, Hepatitis C virus
acaaggccggcgcccagttc

SEQ ID NO: 40663 - DNA, 20 bp, Hepatitis C virus
tgcatcatgtcccacgccat

SEQ ID NO: 40664 - DNA, 20 bp, Hepatitis C virus
atagcggccctcttctacac

SEQ ID NO: 40665 - DNA, 20 bp, Hepatitis C virus
tacacacataggttcaattc

SEQ ID NO: 40666 - DNA, 20 bp, Hepatitis C virus
aattctagtggctgtcccga

SEQ ID NO: 40667 - DNA, 20 bp, Hepatitis C virus
tagtggctgtcccgagagga

SEQ ID NO: 40668 - DNA, 20 bp, Hepatitis C virus
ttgtaaacctctcagtgact

SEQ ID NO: 40669 - DNA, 20 bp, Hepatitis C virus
acgaagacctgcggaggtcc

SEQ ID NO: 40670 - DNA, 20 bp, Hepatitis C virus
ctctgggcaccctggggacg

SEQ ID NO: 40671 - DNA, 20 bp, Hepatitis C virus
cacggaggacctccgcaggt

SEQ ID NO: 40672 - DNA, 20 bp, Hepatitis C virus
cactacggagctcgcaatac

SEQ ID NO: 40673 - DNA, 20 bp, Hepatitis C virus
cgagctccgtagtggaatgg

SEQ ID NO: 40674 - DNA, 20 bp, Hepatitis C virus
atccacctcaacgcggccag

SEQ ID NO: 40675 - DNA, 20 bp, Hepatitis C virus
cgggaacccatggtatctgg

SEQ ID NO: 40676 - DNA, 20 bp, Hepatitis C virus
ccgcaaggctggccgcgttg

SEQ ID NO: 40677 - DNA, 20 bp, Hepatitis C virus
aggtggatcaagttctccag

SEQ ID NO: 40678 - DNA, 20 bp, Hepatitis C virus
tccagagcggcttcagcctg

SEQ ID NO: 40679 - DNA, 20 bp, Hepatitis C virus
ccttacaaggtgtgaagcag

SEQ ID NO: 40680 - DNA, 20 bp, Hepatitis C virus
cttacaaggtgtgaagcagc

SEQ ID NO: 40681 - DNA, 20 bp, Hepatitis C virus
caaggtgtgaagcagcactc

SEQ ID NO: 40682 - DNA, 20 bp, Hepatitis C virus
agaggagggacccacgtttg

SEQ ID NO: 40683 - DNA, 20 bp, Hepatitis C virus
ggagtgctgcttcacacctt

SEQ ID NO: 40684 - DNA, 20 bp, Hepatitis C virus
tatttataaccatctcgccc

SEQ ID NO: 40685 - DNA, 20 bp, Hepatitis C virus
ataaccatctcgcccccctg

SEQ ID NO: 40686 - DNA, 20 bp, Hepatitis C virus
taaccatctcgcccccctgg

SEQ ID NO: 40687 - DNA, 20 bp, Hepatitis C virus
ggccgttgcagtcgagcccg

SEQ ID NO: 40688 - DNA, 20 bp, Hepatitis C virus
gccgttgcagtcgagcccgt

SEQ ID NO: 40689 - DNA, 20 bp, Hepatitis C virus
tccacctcaacgcagacctt

SEQ ID NO: 40690 - DNA, 20 bp, Hepatitis C virus
ctggggaccaatgtgggcgg

SEQ ID NO: 40691 - DNA, 20 bp, Hepatitis C virus
gtccccaggaaggtctgcgt

SEQ ID NO: 40692 - DNA, 20 bp, Hepatitis C virus
aggtggacaacacctgcacc

SEQ ID NO: 40693 - DNA, 20 bp, Hepatitis C virus
aaggctcctcgggagggcct

SEQ ID NO: 40694 - DNA, 20 bp, Hepatitis C virus
tgcccccaaagtcattgcgt

SEQ ID NO: 40695 - DNA, 20 bp, Hepatitis C virus
cgttggcatcttcagagctg

SEQ ID NO: 40696 - DNA, 20 bp, Hepatitis C virus
gcatcttcagagctgctgtc

SEQ ID NO: 40697 - DNA, 20 bp, Hepatitis C virus
agagctgctgtctgcacccg

SEQ ID NO: 40698 - DNA, 20 bp, Hepatitis C virus
ggtttggtgcctacatgtcc

SEQ ID NO: 40699 - DNA, 20 bp, Hepatitis C virus
ggtgcctacatgtccaaggc

SEQ ID NO: 40700 - DNA, 20 bp, Hepatitis C virus
gtgcctacatgtccaaggct

SEQ ID NO: 40701 - DNA, 20 bp, Hepatitis C virus
tggaattgatccaagtgtgc

SEQ ID NO: 40702 - DNA, 20 bp, Hepatitis C virus
atccaagtgtgcgcaccggc

SEQ ID NO: 40703 - DNA, 20 bp, Hepatitis C virus
ccttctatgggaaagccatc

SEQ ID NO: 40704 - DNA, 20 bp, Hepatitis C virus
tatgggaaagccatccccct

SEQ ID NO: 40705 - DNA, 20 bp, Hepatitis C virus
tctgtcattccaaaaagaaa

SEQ ID NO: 40706 - DNA, 20 bp, Hepatitis C virus
ctgtcattccaaaaagaaat

SEQ ID NO: 40707 - DNA, 20 bp, Hepatitis C virus
tgtcattccaaaaagaaatg

SEQ ID NO: 40708 - DNA, 20 bp, Hepatitis C virus
actattgagaccaccacagt

SEQ ID NO: 40709 - DNA, 20 bp, Hepatitis C virus
agaccaccacagtcccgcaa

SEQ ID NO: 40710 - DNA, 20 bp, Hepatitis C virus
tgtctcgcgctctcagagac

SEQ ID NO: 40711 - DNA, 20 bp, Hepatitis C virus
cgggactgtggtggtctcaa

SEQ ID NO: 40712 - DNA, 20 bp, Hepatitis C virus
gccgtgtggtccttggatcc

SEQ ID NO: 40713 - DNA, 20 bp, Hepatitis C virus
gatccaacgtggtgacggcc

SEQ ID NO: 40714 - DNA, 20 bp, Hepatitis C virus
tataccagcactttgatgag

SEQ ID NO: 40715 - DNA, 20 bp, Hepatitis C virus
ataccagcactttgatgaga

SEQ ID NO: 40716 - DNA, 20 bp, Hepatitis C virus
taccagcactttgatgagat

SEQ ID NO: 40717 - DNA, 20 bp, Hepatitis C virus
accgcctcagttactagccc

SEQ ID NO: 40718 - DNA, 20 bp, Hepatitis C virus
ctagcccccttgctacatcg

SEQ ID NO: 40719 - DNA, 20 bp, Hepatitis C virus
ctacatcgaccacactacta

SEQ ID NO: 40720 - DNA, 20 bp, Hepatitis C virus
gcaagccagttagcgccgcc

SEQ ID NO: 40721 - DNA, 20 bp, Hepatitis C virus
gcgccgccgtctgctgccac

SEQ ID NO: 40722 - DNA, 20 bp, Hepatitis C virus
agttgtgggagttgtttgtg

SEQ ID NO: 40723 - DNA, 20 bp, Hepatitis C virus
gttgtgggagttgtttgtgc

SEQ ID NO: 40724 - DNA, 20 bp, Hepatitis C virus
tgggagttgtttgtgccgcg

SEQ ID NO: 40725 - DNA, 20 bp, Hepatitis C virus
tttgtgccgcgatcatcaaa

SEQ ID NO: 40726 - DNA, 20 bp, Hepatitis C virus
gtgccgcgatcatcaaacgg

SEQ ID NO: 40727 - DNA, 20 bp, Hepatitis C virus
gcatcttggttgaaggccaa

SEQ ID NO: 40728 - DNA, 20 bp, Hepatitis C virus
catcttggttgaaggccaag

SEQ ID NO: 40729 - DNA, 20 bp, Hepatitis C virus
gttgaaggccaaggtacttc

SEQ ID NO: 40730 - DNA, 20 bp, Hepatitis C virus
aaggccaaggtacttcccag

SEQ ID NO: 40731 - DNA, 20 bp, Hepatitis C virus
ccagccttccagggatccca

SEQ ID NO: 40732 - DNA, 20 bp, Hepatitis C virus
ygtggtgggagtgacggcgg

SEQ ID NO: 40733 - DNA, 20 bp, Hepatitis C virus
cttcccccgaattcttcagc

SEQ ID NO: 40734 - DNA, 20 bp, Hepatitis C virus
ccccgaattcttcagctttg

SEQ ID NO: 40735 - DNA, 20 bp, Hepatitis C virus
ttcagctttgtggacggggt

SEQ ID NO: 40736 - DNA, 20 bp, Hepatitis C virus
agctttgtggacggggtgcg

SEQ ID NO: 40737 - DNA, 20 bp, Hepatitis C virus
caccacccaggcggaagcgg

SEQ ID NO: 40738 - DNA, 20 bp, Hepatitis C virus
tccaactcacagagtccgcg

SEQ ID NO: 40739 - DNA, 20 bp, Hepatitis C virus
gataaccgcccgcttccgcc

SEQ ID NO: 40740 - DNA, 20 bp, Hepatitis C virus
cgcctgggtggtggaacagg

SEQ ID NO: 40741 - DNA, 20 bp, Hepatitis C virus
gggtacggggcaaaggaagt

SEQ ID NO: 40742 - DNA, 20 bp, Hepatitis C virus
ggtacggggcaaaggaagtc

SEQ ID NO: 40743 - DNA, 20 bp, Hepatitis C virus
cgcccaaggcaatgtctcac

SEQ ID NO: 40744 - DNA, 20 bp, Hepatitis C virus
ctacaggacatgaccacccc

SEQ ID NO: 40745 - DNA, 20 bp, Hepatitis C virus
attcttggccattatggtgg

SEQ ID NO: 40746 - DNA, 20 bp, Hepatitis C virus
gattccactgtcacagaaca

SEQ ID NO: 40747 - DNA, 20 bp, Hepatitis C virus
attccactgtcacagaacaa

SEQ ID NO: 40748 - DNA, 20 bp, Hepatitis C virus
cactgtcacagaacaagaca

SEQ ID NO: 40749 - DNA, 20 bp, Hepatitis C virus
atgatggtgcgagcctcggg

SEQ ID NO: 40750 - DNA, 20 bp, Hepatitis C virus
cagcactgatagatctcgct

SEQ ID NO: 40751 - DNA, 20 bp, Hepatitis C virus
cctggtctgcggcgatgact

SEQ ID NO: 40752 - DNA, 20 bp, Hepatitis C virus
ctggtctgcggcgatgactt

SEQ ID NO: 40753 - DNA, 20 bp, Hepatitis C virus
gtggtcatttgcgagagcaa

SEQ ID NO: 40754 - DNA, 20 bp, Hepatitis C virus
gcgagagcaagggagtcgaa

SEQ ID NO: 40755 - DNA, 20 bp, Hepatitis C virus
cgagagcaagggagtcgaac

SEQ ID NO: 40756 - DNA, 20 bp, Hepatitis C virus
caggcgctggccggctcgat

SEQ ID NO: 40757 - DNA, 20 bp, Hepatitis C virus
cgagctggttcagcgtttgc

SEQ ID NO: 40758 - DNA, 20 bp, Hepatitis C virus
gagctggttcagcgtttgcg

SEQ ID NO: 40759 - DNA, 20 bp, Hepatitis C virus
gatcttggtcctgacagccc

SEQ ID NO: 40760 - DNA, 20 bp, Hepatitis C virus
atcttggtcctgacagccca

SEQ ID NO: 40761 - DNA, 20 bp, Influenza C virus
cagcaataacaggaggaaaa

SEQ ID NO: 40762 - DNA, 20 bp, Influenza C virus
agcaataacaggaggaaaat

SEQ ID NO: 40763 - DNA, 20 bp, Influenza C virus
agaatgaacatcttccccta

SEQ ID NO: 40764 - DNA, 20 bp, Influenza C virus
ccctaatgtctggagaagcc

SEQ ID NO: 40765 - DNA, 20 bp, Influenza C virus
tggtggcttctccagacatt

SEQ ID NO: 40766 - DNA, 20 bp, Influenza C virus
ttgggagtggagtcaatgat

SEQ ID NO: 40767 - DNA, 20 bp, Influenza C virus
ggagtggagtcaatgatgaa

SEQ ID NO: 40768 - DNA, 20 bp, Influenza C virus
tttggtcatctctgaaggcc

SEQ ID NO: 40769 - DNA, 20 bp, Influenza C virus
ggtcatctctgaaggccctc

SEQ ID NO: 40770 - DNA, 20 bp, Influenza C virus
gtcatctctgaaggccctca

SEQ ID NO: 40771 - DNA, 20 bp, Influenza B virus
ccccttattctcatggaacg

SEQ ID NO: 40772 - DNA, 20 bp, Influenza B virus
ttctcatggaacgggaacag

SEQ ID NO: 40773 - DNA, 20 bp, Influenza B virus
tcatggaacgggaacaggct

SEQ ID NO: 40774 - DNA, 20 bp, Influenza B virus
gaacacacgagtactcaaac

SEQ ID NO: 40775 - DNA, 20 bp, Influenza B virus
ttttcccttgtttgagtact

SEQ ID NO: 40776 - DNA, 20 bp, Influenza B virus
caagcagggtcacagaatgc

SEQ ID NO: 40777 - DNA, 20 bp, Influenza B virus
aagcagggtcacagaatgcc

SEQ ID NO: 40778 - DNA, 20 bp, Influenza B virus
actcaggggagacagacctt

SEQ ID NO: 40779 - DNA, 20 bp, Influenza B virus
gattggacggtgtgtagaaa

SEQ ID NO: 40780 - DNA, 20 bp, Influenza B virus
attggacggtgtgtagaaac

SEQ ID NO: 40781 - DNA, 20 bp, Influenza B virus
acccgtaggtggaaacgaaa

SEQ ID NO: 40782 - DNA, 20 bp, Influenza B virus
cccgtaggtggaaacgaaaa

SEQ ID NO: 40783 - DNA, 20 bp, Influenza B virus
ctgagcattttagccactgc

SEQ ID NO: 40784 - DNA, 20 bp, Influenza B virus
tagccactgcatttgatagt

SEQ ID NO: 40785 - DNA, 20 bp, Influenza B virus
agccactgcatttgatagtt

SEQ ID NO: 40786 - DNA, 20 bp, Influenza B virus
ttcatagctgactatagata

SEQ ID NO: 40787 - DNA, 20 bp, Influenza B virus
atagctgactatagatacac

SEQ ID NO: 40788 - DNA, 20 bp, Influenza B virus
gtaggtgtatctatagtcag

SEQ ID NO: 40789 - DNA, 20 bp, Influenza B virus
taggtgtatctatagtcagc

SEQ ID NO: 40790 - DNA, 20 bp, Influenza B virus
tatggctgtttgtgccgttg

SEQ ID NO: 40791 - DNA, 20 bp, Influenza B virus
acaatttgagaaacctgcat

SEQ ID NO: 40792 - DNA, 20 bp, Influenza B virus
caatttgagaaacctgcata

SEQ ID NO: 40793 - DNA, 20 bp, Influenza B virus
gagaaacctgcatattccag

SEQ ID NO: 40794 - DNA, 20 bp, Influenza B virus
agaaacctgcatattccaga

SEQ ID NO: 40795 - DNA, 20 bp, Influenza B virus
cagaaataatattaaaatac

SEQ ID NO: 40796 - DNA, 20 bp, Influenza B virus
ttgaggaacaatgctacgct

SEQ ID NO: 40797 - DNA, 20 bp, Influenza B virus
aggaacaatgctacgctaag

SEQ ID NO: 40798 - DNA, 20 bp, Influenza B virus
caacctttttgaggcttgct

SEQ ID NO: 40799 - DNA, 20 bp, Influenza B virus
ttgaggcttgctttaacagt

SEQ ID NO: 40800 - DNA, 20 bp, Influenza B virus
tgaggcttgctttaacagtg

SEQ ID NO: 40801 - DNA, 20 bp, Influenza A virus
atctcatactcctgttcaca

SEQ ID NO: 40802 - DNA, 20 bp, Influenza A virus
tctcatactcctgttcacag

SEQ ID NO: 40803 - DNA, 20 bp, Influenza A virus
acagcagtgaggggggacca

SEQ ID NO: 40804 - DNA, 20 bp, Influenza A virus
gataccatgccaataattcc

SEQ ID NO: 40805 - DNA, 20 bp, Influenza A virus
cacagaaaaggtcgacacaa

SEQ ID NO: 40806 - DNA, 20 bp, Influenza A virus
taagtgtgccagaatggtcc

SEQ ID NO: 40807 - DNA, 20 bp, Influenza A virus
gtgttacccaggcagcttca

SEQ ID NO: 40808 - DNA, 20 bp, Influenza A virus
tgttacccaggcagcttcaa

SEQ ID NO: 40809 - DNA, 20 bp, Influenza A virus
cccaggcagcttcaatgact

SEQ ID NO: 40810 - DNA, 20 bp, Influenza A virus
aatgactatgaagaattgaa

SEQ ID NO: 40811 - DNA, 20 bp, Influenza A virus
tccggttgccaaaggatcgt

SEQ ID NO: 40812 - DNA, 20 bp, Influenza A virus
ccaaaggatcgtacaacaat

SEQ ID NO: 40813 - DNA, 20 bp, Influenza A virus
ggggagtgcaccatcctaat

SEQ ID NO: 40814 - DNA, 20 bp, Influenza A virus
gggagtgcaccatcctaatg

SEQ ID NO: 40815 - DNA, 20 bp, Influenza A virus
ttctgcctcatcattaggat

SEQ ID NO: 40816 - DNA, 20 bp, Influenza A virus
caccagagtatgggttcaaa

SEQ ID NO: 40817 - DNA, 20 bp, Influenza A virus
aaaatatcgaaaagaggtag

SEQ ID NO: 40818 - DNA, 20 bp, Influenza A virus
agggatcatgaagacagaag

SEQ ID NO: 40819 - DNA, 20 bp, Influenza A virus
agaactgtgaaaccaaatgc

SEQ ID NO: 40820 - DNA, 20 bp, Influenza A virus
ggcatttggtttcacagttc

SEQ ID NO: 40821 - DNA, 20 bp, Influenza A virus
tttggggcaatagctggttt

SEQ ID NO: 40822 - DNA, 20 bp, Influenza A virus
ggggcaatagctggttttat

SEQ ID NO: 40823 - DNA, 20 bp, Influenza A virus
gggcaatagctggttttata

SEQ ID NO: 40824 - DNA, 20 bp, Influenza A virus
tatagaaggaggatggcaag

SEQ ID NO: 40825 - DNA, 20 bp, Influenza A virus
atagaaggaggatggcaagg

SEQ ID NO: 40826 - DNA, 20 bp, Respiratory syncytial virus
tcacttgagactataataat

SEQ ID NO: 40827 - DNA, 20 bp, Respiratory syncytial virus
agactataataatatcacta

SEQ ID NO: 40828 - DNA, 20 bp, Respiratory syncytial virus
gtgatattattatagtctca

SEQ ID NO: 40829 - DNA, 20 bp, Respiratory syncytial virus
ttatagtctcaagtgacaat

SEQ ID NO: 40830 - DNA, 20 bp, Respiratory syncytial virus
tagtctcaagtgacaatggt

SEQ ID NO: 40831 - DNA, 20 bp, Respiratory syncytial virus
gcaaagtcaagttgaatgat

SEQ ID NO: 40832 - DNA, 20 bp, Respiratory syncytial virus
aatgatacactcaacaaaga

SEQ ID NO: 40833 - DNA, 20 bp, Respiratory syncytial virus
tgtcatccagcaaatacacc

SEQ ID NO: 40834 - DNA, 20 bp, Respiratory syncytial virus
gatggtgtatttgctggatg

SEQ ID NO: 40835 - DNA, 20 bp, Respiratory syncytial virus
gctggatgacagaagttgat

SEQ ID NO: 40836 - DNA, 20 bp, Respiratory syncytial virus
ggagggctaataatgtccta

SEQ ID NO: 40837 - DNA, 20 bp, Respiratory syncytial virus
taaaggcttactacccaagg

SEQ ID NO: 40838 - DNA, 20 bp, Respiratory syncytial virus
ctacccaaggatatagccaa

SEQ ID NO: 40839 - DNA, 20 bp, Respiratory syncytial virus
tatgaagtgtttgaaaaata

SEQ ID NO: 40840 - DNA, 20 bp, Respiratory syncytial virus
gaaaaatatcctcactttat

SEQ ID NO: 40841 - DNA, 20 bp, Respiratory syncytial virus
cctcacttctccagtgtagt

SEQ ID NO: 40842 - DNA, 20 bp, Respiratory syncytial virus
ctcacttctccagtgtagta

SEQ ID NO: 40843 - DNA, 20 bp, Respiratory syncytial virus
tccagtgtagtattaggcaa

SEQ ID NO: 40844 - DNA, 20 bp, Respiratory syncytial virus
ggcaatgctgctggcctagg

SEQ ID NO: 40845 - DNA, 20 bp, Respiratory syncytial virus
tgcagcatcatatagatctt

SEQ ID NO: 40846 - DNA, 20 bp, Respiratory syncytial virus
gtttaagagaagacatgata

SEQ ID NO: 40847 - DNA, 20 bp, Respiratory syncytial virus
aagagaagacatgatagaaa

SEQ ID NO: 40848 - DNA, 20 bp, Respiratory syncytial virus
agagaagacatgatagaaaa

SEQ ID NO: 40849 - DNA, 20 bp, Respiratory syncytial virus
atgaccaatgacagactaga

SEQ ID NO: 40850 - DNA, 20 bp, Respiratory syncytial virus
ccatagcttctagtctgtca

SEQ ID NO: 40851 - DNA, 20 bp, Respiratory syncytial virus
tggattggctgattggcgta

SEQ ID NO: 40852 - DNA, 20 bp, Respiratory syncytial virus
ggattggctgattggcgtat

SEQ ID NO: 40853 - DNA, 20 bp, Respiratory syncytial virus
gattggctgattggcgtata

SEQ ID NO: 40854 - DNA, 20 bp, Respiratory syncytial virus
gctgattggcgtatagatgt

SEQ ID NO: 40855 - DNA, 20 bp, Respiratory syncytial virus
gcgtatagatgtttggttgg

SEQ ID NO: 40856 - DNA, 20 bp, Respiratory syncytial virus
attaagagtcatgataaact

SEQ ID NO: 40857 - DNA, 20 bp, Respiratory syncytial virus
agagtcatgataaactcaag

SEQ ID NO: 40858 - DNA, 20 bp, Respiratory syncytial virus
gctgggcatttgtgctagca

SEQ ID NO: 40859 - DNA, 20 bp, Respiratory syncytial virus
ctgggcatttgtgctagcac

SEQ ID NO: 40860 - DNA, 20 bp, Respiratory syncytial virus
gtgctagcactgcacttctt

SEQ ID NO: 40861 - DNA, 20 bp, Respiratory syncytial virus
aaaaatgccatcacaaatgc

SEQ ID NO: 40862 - DNA, 20 bp, Respiratory syncytial virus
ctcaggattactgttagtca

SEQ ID NO: 40863 - DNA, 20 bp, Respiratory syncytial virus
ctgttagtcatcacagtgac

SEQ ID NO: 40864 - DNA, 20 bp, Respiratory syncytial virus
gtcatcacagtgactgacaa

SEQ ID NO: 40865 - DNA, 20 bp, Respiratory syncytial virus
atgtatttgaatgctccttt

SEQ ID NO: 40866 - DNA, 20 bp, Respiratory syncytial virus
ttcatcagatctagtactca

SEQ ID NO: 40867 - DNA, 20 bp, Respiratory syncytial virus
atcagatctagtactcaaat

SEQ ID NO: 40868 - DNA, 20 bp, Respiratory syncytial virus
ataaaaatatccacatgggg

SEQ ID NO: 40869 - DNA, 20 bp, Respiratory syncytial virus
gaggaaatccaactaatcac

SEQ ID NO: 40870 - DNA, 20 bp, Respiratory syncytial virus
gttggatttcctccaatgat

SEQ ID NO: 40871 - DNA, 20 bp, Respiratory syncytial virus
ttcatatcatcgtgcttata

SEQ ID NO: 40872 - DNA, 20 bp, Respiratory syncytial virus
atatcatcgtgcttatacaa

SEQ ID NO: 40873 - DNA, 20 bp, Respiratory syncytial virus
tacaagttaaatcttaaatc

SEQ ID NO: 40874 - DNA, 20 bp, Respiratory syncytial virus
aatcttaaatctatagcaca

SEQ ID NO: 40875 - DNA, 20 bp, Respiratory syncytial virus
aatctatagcacaaatcaca

SEQ ID NO: 40876 - DNA, 20 bp, Respiratory syncytial virus
tcactttgaagtgttcaact

SEQ ID NO: 40877 - DNA, 20 bp, Respiratory syncytial virus
cactttgaagtgttcaactt

SEQ ID NO: 40878 - DNA, 20 bp, Respiratory syncytial virus
actttgaagtgttcaacttt

SEQ ID NO: 40879 - DNA, 20 bp, Respiratory syncytial virus
gaagtgttcaactttgtacc

SEQ ID NO: 40880 - DNA, 20 bp, Respiratory syncytial virus
aagtgttcaactttgtacct

SEQ ID NO: 40881 - DNA, 20 bp, Respiratory syncytial virus
tatagacttgtgaagggctt

SEQ ID NO: 40882 - DNA, 20 bp, Respiratory syncytial virus
tgaagggcttggattgccat

SEQ ID NO: 40883 - DNA, 20 bp, Respiratory syncytial virus
gattgccatcggaggaggtt

SEQ ID NO: 40884 - DNA, 20 bp, Respiratory syncytial virus
ccatcggaggaggttgagtg

SEQ ID NO: 40885 - DNA, 20 bp, Respiratory syncytial virus
agtggagggttcccttttga

SEQ ID NO: 40886 - DNA, 20 bp, Respiratory syncytial virus
ccaatcctcaaaacaaatgc

SEQ ID NO: 40887 - DNA, 20 bp, Respiratory syncytial virus
ccgcaatccttgctgcagtc

SEQ ID NO: 40888 - DNA, 20 bp, Respiratory syncytial virus
ctgcagtcacactctgtttt

SEQ ID NO: 40889 - DNA, 20 bp, Respiratory syncytial virus
tgcttccagtcaaaacatca

SEQ ID NO: 40890 - DNA, 20 bp, Respiratory syncytial virus
gcttccagtcaaaacatcac

SEQ ID NO: 40891 - DNA, 20 bp, Respiratory syncytial virus
tcaaatggagttagtgtctt

SEQ ID NO: 40892 - DNA, 20 bp, Respiratory syncytial virus
gtgtcttaaccagcaaagtg

SEQ ID NO: 40893 - DNA, 20 bp, Respiratory syncytial virus
accagcaaagtgttagacct

SEQ ID NO: 40894 - DNA, 20 bp, Respiratory syncytial virus
gacctcaaaaactatataga

SEQ ID NO: 40895 - DNA, 20 bp, Respiratory syncytial virus
atctatatagtttttgaggt

SEQ ID NO: 40896 - DNA, 20 bp, Respiratory syncytial virus
aacaagaaccgacagaggat

SEQ ID NO: 40897 - DNA, 20 bp, Respiratory syncytial virus
acaagaaccgacagaggatg

SEQ ID NO: 40898 - DNA, 20 bp, Respiratory syncytial virus
cttcccactagctgaaacat

SEQ ID NO: 40899 - DNA, 20 bp, Respiratory syncytial virus
ttcccactagctgaaacatg

SEQ ID NO: 40900 - DNA, 20 bp, Respiratory syncytial virus
ccactagctgaaacatgtaa

SEQ ID NO: 40901 - DNA, 20 bp, Respiratory syncytial virus
catttagtaactaaataaaa

SEQ ID NO: 40902 - DNA, 20 bp, Respiratory syncytial virus
agtaactaaataaaaatagc

SEQ ID NO: 40903 - DNA, 20 bp, Respiratory syncytial virus
gtaactaaataaaaatagca

SEQ ID NO: 40904 - DNA, 20 bp, Respiratory syncytial virus
ttacaatggtttcatatctg

SEQ ID NO: 40905 - DNA, 20 bp, Respiratory syncytial virus
caatggtttcatatctgctc

SEQ ID NO: 40906 - DNA, 20 bp, Respiratory syncytial virus
gacagaacagaagagtatgc

SEQ ID NO: 40907 - DNA, 20 bp, Respiratory syncytial virus
gagtgctagagagttatata

SEQ ID NO: 40908 - DNA, 20 bp, Respiratory syncytial virus
tataggatctataaataata

SEQ ID NO: 40909 - DNA, 20 bp, Respiratory syncytial virus
ccatgagcaaactcctcact

SEQ ID NO: 40910 - DNA, 20 bp, Respiratory syncytial virus
tttgatgtcatcactgttga

SEQ ID NO: 40911 - DNA, 20 bp, Respiratory syncytial virus
gacaggcaaagaaagagaac

SEQ ID NO: 40912 - DNA, 20 bp, Respiratory syncytial virus
acaggcaaagaaagagaact

SEQ ID NO: 40913 - DNA, 20 bp, Respiratory syncytial virus
gcaatgcaaccaggaatgtt

SEQ ID NO: 40914 - DNA, 20 bp, Respiratory syncytial virus
caatgcaaccaggaatgttc

SEQ ID NO: 40915 - DNA, 20 bp, Respiratory syncytial virus
gaacttgtctgaacattcct

SEQ ID NO: 40916 - DNA, 20 bp, Respiratory syncytial virus
tgagcacagctccaaacaaa

SEQ ID NO: 40917 - DNA, 20 bp, Respiratory syncytial virus
gagcacagctccaaacaaaa

SEQ ID NO: 40918 - DNA, 20 bp, Respiratory syncytial virus
agcacagctccaaacaaaat

SEQ ID NO: 40919 - DNA, 20 bp, Respiratory syncytial virus
tccaaaagtgcacaacacta

SEQ ID NO: 40920 - DNA, 20 bp, Respiratory syncytial virus
tgcaaaatatagaacctaca

SEQ ID NO: 40921 - DNA, 20 bp, Respiratory syncytial virus
acatatgagaaagccaaaaa

SEQ ID NO: 40922 - DNA, 20 bp, Respiratory syncytial virus
tttccacaatatttaagtgt

SEQ ID NO: 40923 - DNA, 20 bp, Respiratory syncytial virus
ccacaatatttaagtgttaa

SEQ ID NO: 40924 - DNA, 20 bp, Respiratory syncytial virus
cacaatatttaagtgttaac

SEQ ID NO: 40925 - DNA, 20 bp, Respiratory syncytial virus
aagtgttaactatttgcatc

SEQ ID NO: 40926 - DNA, 20 bp, Hepatitis C virus
acgcagaaagcgtctagcca

SEQ ID NO: 40927 - DNA, 20 bp, Hepatitis C virus
gtatgagtgtcgtgcagcct

SEQ ID NO: 40928 - DNA, 20 bp, Hepatitis C virus
cgcagaccactatggctctc

SEQ ID NO: 40929 - DNA, 20 bp, Hepatitis C virus
ctgcgtgaagacagtagttc

SEQ ID NO: 40930 - DNA, 20 bp, Hepatitis C virus
ccgggtggcggtcagatcgt

SEQ ID NO: 40931 - DNA, 20 bp, Hepatitis C virus
gtggagtttacttgttgccg

SEQ ID NO: 40932 - DNA, 20 bp, Hepatitis C virus
acttgttgccgcgcaggggc

SEQ ID NO: 40933 - DNA, 20 bp, Hepatitis C virus
cttgttgccgcgcaggggcc

SEQ ID NO: 40934 - DNA, 20 bp, Hepatitis C virus
ttgccgcgcaggggccctag

SEQ ID NO: 40935 - DNA, 20 bp, Hepatitis C virus
gccgacctcatggggtacat

SEQ ID NO: 40936 - DNA, 20 bp, Hepatitis C virus
gaggcgctgccagggccctg

SEQ ID NO: 40937 - DNA, 20 bp, Hepatitis C virus
tggaagacggcgtgaactat

SEQ ID NO: 40938 - DNA, 20 bp, Hepatitis C virus
cctgttgcatagttcacgcc

SEQ ID NO: 40939 - DNA, 20 bp, Hepatitis C virus
catagttcacgccgtcttcc

SEQ ID NO: 40940 - DNA, 20 bp, Hepatitis C virus
cgttcgcgagggtaacgcct

SEQ ID NO: 40941 - DNA, 20 bp, Hepatitis C virus
gcgagggtaacgcctcgagg

SEQ ID NO: 40942 - DNA, 20 bp, Hepatitis C virus
ggtggcggtgacccccacgg

SEQ ID NO: 40943 - DNA, 20 bp, Hepatitis C virus
gccgtccctggtggccaccg

SEQ ID NO: 40944 - DNA, 20 bp, Hepatitis C virus
ccgtccctggtggccaccgt

SEQ ID NO: 40945 - DNA, 20 bp, Hepatitis C virus
gtggtagctcagctgctccg

SEQ ID NO: 40946 - DNA, 20 bp, Hepatitis C virus
tgggatccggagcagctgag

SEQ ID NO: 40947 - DNA, 20 bp, Hepatitis C virus
gccagctgccgacgccttac

SEQ ID NO: 40948 - DNA, 20 bp, Hepatitis C virus
ccgattttgcccagggctgg

SEQ ID NO: 40949 - DNA, 20 bp, Hepatitis C virus
tgcccagggctggggtccta

SEQ ID NO: 40950 - DNA, 20 bp, Hepatitis C virus
gcccagggctggggtcctat

SEQ ID NO: 40951 - DNA, 20 bp, Hepatitis C virus
cccagggctggggtcctatc

SEQ ID NO: 40952 - DNA, 20 bp, Hepatitis C virus
gttcggttgtacctggatga

SEQ ID NO: 40953 - DNA, 20 bp, Hepatitis C virus
ggttgtacctggatgaactc

SEQ ID NO: 40954 - DNA, 20 bp, Hepatitis C virus
tacctggatgaactcaactg

SEQ ID NO: 40955 - DNA, 20 bp, Hepatitis C virus
accaaagtgtgcggagcgcc

SEQ ID NO: 40956 - DNA, 20 bp, Hepatitis C virus
tgtcatcggaggggtgggca

SEQ ID NO: 40957 - DNA, 20 bp, Hepatitis C virus
ctgctgtccaccacacagtg

SEQ ID NO: 40958 - DNA, 20 bp, Hepatitis C virus
cagatcacagcgttcgcccc

SEQ ID NO: 40959 - DNA, 20 bp, Hepatitis C virus
gccccgcgtccagttgcagg

SEQ ID NO: 40960 - DNA, 20 bp, Hepatitis C virus
tgtccttcctcgtgttcttc

SEQ ID NO: 40961 - DNA, 20 bp, Hepatitis C virus
ctcgtgttcttctgctttgc

SEQ ID NO: 40962 - DNA, 20 bp, Hepatitis C virus
ttctgctttgcgtggtatct

SEQ ID NO: 40963 - DNA, 20 bp, Hepatitis C virus
tgctttgcgtggtatctgaa

SEQ ID NO: 40964 - DNA, 20 bp, Hepatitis C virus
gcgtggtatctgaagggtag

SEQ ID NO: 40965 - DNA, 20 bp, Hepatitis C virus
gacatcaccaaactactcct

SEQ ID NO: 40966 - DNA, 20 bp, Hepatitis C virus
acatcaccaaactactcctg

SEQ ID NO: 40967 - DNA, 20 bp, Hepatitis C virus
ggacccctttggattcttca

SEQ ID NO: 40968 - DNA, 20 bp, Hepatitis C virus
ggattcttcaagccagtttg

SEQ ID NO: 40969 - DNA, 20 bp, Hepatitis C virus
gattcttcaagccagtttgc

SEQ ID NO: 40970 - DNA, 20 bp, Hepatitis C virus
tcccgaatggagaccaagct

SEQ ID NO: 40971 - DNA, 20 bp, Hepatitis C virus
gtctccattcgggagaagac

SEQ ID NO: 40972 - DNA, 20 bp, Hepatitis C virus
gggagaagacgactggttcc

SEQ ID NO: 40973 - DNA, 20 bp, Hepatitis C virus
cacagccacggccagatctc

SEQ ID NO: 40974 - DNA, 20 bp, Hepatitis C virus
ctggcaacgtgcatcaatgg

SEQ ID NO: 40975 - DNA, 20 bp, Hepatitis C virus
gtatacatctggatgacagg

SEQ ID NO: 40976 - DNA, 20 bp, Hepatitis C virus
ggtgatgcgatggtcctcgt

SEQ ID NO: 40977 - DNA, 20 bp, Hepatitis C virus
cggccccgtggtagacagtc

SEQ ID NO: 40978 - DNA, 20 bp, Hepatitis C virus
agggccgcggtgtgcacccg

SEQ ID NO: 40979 - DNA, 20 bp, Hepatitis C virus
atccctgtggagaacctagg

SEQ ID NO: 40980 - DNA, 20 bp, Hepatitis C virus
tccctgtggagaacctaggg

SEQ ID NO: 40981 - DNA, 20 bp, Hepatitis C virus
tccctaggttctccacaggg

SEQ ID NO: 40982 - DNA, 20 bp, Hepatitis C virus
tccacagggataaagtccac

SEQ ID NO: 40983 - DNA, 20 bp, Hepatitis C virus
ccactggcagccccatcacg

SEQ ID NO: 40984 - DNA, 20 bp, Hepatitis C virus
cttgccgacggcgggtgctc

SEQ ID NO: 40985 - DNA, 20 bp, Hepatitis C virus
ccgacggcgggtgctcagga

SEQ ID NO: 40986 - DNA, 20 bp, Hepatitis C virus
tgacataataatttgtgacg

SEQ ID NO: 40987 - DNA, 20 bp, Hepatitis C virus
ttatgtcataagcacctcct

SEQ ID NO: 40988 - DNA, 20 bp, Hepatitis C virus
tgccactcaaagaagaagtg

SEQ ID NO: 40989 - DNA, 20 bp, Hepatitis C virus
ggcatcaatgccgtggccta

SEQ ID NO: 40990 - DNA, 20 bp, Hepatitis C virus
atgcccaatgcgaccagctt

SEQ ID NO: 40991 - DNA, 20 bp, Hepatitis C virus
gcggcgagctcgtcgcactt

SEQ ID NO: 40992 - DNA, 20 bp, Hepatitis C virus
ttctttgagtggcagaagat

SEQ ID NO: 40993 - DNA, 20 bp, Hepatitis C virus
gtggcaccgggggagcgccc

SEQ ID NO: 40994 - DNA, 20 bp, Hepatitis C virus
tggcaccgggggagcgcccc

SEQ ID NO: 40995 - DNA, 20 bp, Hepatitis C virus
gactcgtccgtcctctgtga

SEQ ID NO: 40996 - DNA, 20 bp, Hepatitis C virus
gatccgccttaaacccaccc

SEQ ID NO: 40997 - DNA, 20 bp, Hepatitis C virus
atccgccttaaacccaccct

SEQ ID NO: 40998 - DNA, 20 bp, Hepatitis C virus
aacccaccctccatgggcca

SEQ ID NO: 40999 - DNA, 20 bp, Hepatitis C virus
agaatgaagtcaccctgacg

SEQ ID NO: 41000 - DNA, 20 bp, Hepatitis C virus
ggtgattgggtgcgtcaggg

SEQ ID NO: 41001 - DNA, 20 bp, Hepatitis C virus
ccgtacatcgagcaagggat

SEQ ID NO: 41002 - DNA, 20 bp, Hepatitis C virus
aagcagaaggccctcggcct

SEQ ID NO: 41003 - DNA, 20 bp, Hepatitis C virus
tcacccctgctgtccagacc

SEQ ID NO: 41004 - DNA, 20 bp, Hepatitis C virus
gtctggacagcaggggtgat

SEQ ID NO: 41005 - DNA, 20 bp, Hepatitis C virus
tgcttgaactgctcagcgag

SEQ ID NO: 41006 - DNA, 20 bp, Hepatitis C virus
gtgggtgctggcctagctgg

SEQ ID NO: 41007 - DNA, 20 bp, Hepatitis C virus
tgggtgctggcctagctggc

SEQ ID NO: 41008 - DNA, 20 bp, Hepatitis C virus
cccccacgcactacgtgccg

SEQ ID NO: 41009 - DNA, 20 bp, Hepatitis C virus
ccccacgcactacgtgccgg

SEQ ID NO: 41010 - DNA, 20 bp, Hepatitis C virus
cagtgaggctgctgagtatg

SEQ ID NO: 41011 - DNA, 20 bp, Hepatitis C virus
cccattaacgcctacaccac

SEQ ID NO: 41012 - DNA, 20 bp, Hepatitis C virus
acgcctacaccacgggcccc

SEQ ID NO: 41013 - DNA, 20 bp, Hepatitis C virus
atggggaacgtcccactcca

SEQ ID NO: 41014 - DNA, 20 bp, Hepatitis C virus
ctgcaggtcctaggaccgac

SEQ ID NO: 41015 - DNA, 20 bp, Hepatitis C virus
ttgacatgtccagtgatctc

SEQ ID NO: 41016 - DNA, 20 bp, Hepatitis C virus
cgcccccttgcaagcccttg

SEQ ID NO: 41017 - DNA, 20 bp, Hepatitis C virus
caagcccttgctgcgggagg

SEQ ID NO: 41018 - DNA, 20 bp, Hepatitis C virus
ctgcgggaggaggtatcatt

SEQ ID NO: 41019 - DNA, 20 bp, Hepatitis C virus
agagtaggactccacgagta

SEQ ID NO: 41020 - DNA, 20 bp, Hepatitis C virus
ccttgcgagcccgaaccgga

SEQ ID NO: 41021 - DNA, 20 bp, Hepatitis C virus
agtcagagaacaaagtggtg

SEQ ID NO: 41022 - DNA, 20 bp, Hepatitis C virus
tggactccttcgatccgctt

SEQ ID NO: 41023 - DNA, 20 bp, Hepatitis C virus
gatccgcttgtggcagagga

SEQ ID NO: 41024 - DNA, 20 bp, Hepatitis C virus
tggcagaggaggatgagcgg

SEQ ID NO: 41025 - DNA, 20 bp, Hepatitis C virus
cgcagaatttctgcaggtac

SEQ ID NO: 41026 - DNA, 20 bp, Hepatitis C virus
ccaccaaaagttttggcagc

SEQ ID NO: 41027 - DNA, 20 bp, Hepatitis C virus
tggcagctcctcaacttccg

SEQ ID NO: 41028 - DNA, 20 bp, Hepatitis C virus
ggcagctcctcaacttccgg

SEQ ID NO: 41029 - DNA, 20 bp, Hepatitis C virus
gcagctcctcaacttccggc

SEQ ID NO: 41030 - DNA, 20 bp, Hepatitis C virus
cggcattacgggcgacaata

SEQ ID NO: 41031 - DNA, 20 bp, Hepatitis C virus
caccacttcacgcagtgctt

SEQ ID NO: 41032 - DNA, 20 bp, Hepatitis C virus
acgcagtgcttgccaaaggc

SEQ ID NO: 41033 - DNA, 20 bp, Hepatitis C virus
ccaaaggcagaagaaagtca

SEQ ID NO: 41034 - DNA, 20 bp, Hepatitis C virus
gacagactgcaagttctgga

SEQ ID NO: 41035 - DNA, 20 bp, Hepatitis C virus
acagactgcaagttctggac

SEQ ID NO: 41036 - DNA, 20 bp, Hepatitis C virus
agcctgagaaggggggtcgt

SEQ ID NO: 41037 - DNA, 20 bp, Hepatitis C virus
cccgacctgggcgtgcgcgt

SEQ ID NO: 41038 - DNA, 20 bp, Hepatitis C virus
ctaaccacgtcgtacagggc

SEQ ID NO: 41039 - DNA, 20 bp, Hepatitis C virus
tcgcacacgcgcacgcccag

SEQ ID NO: 41040 - DNA, 20 bp, Hepatitis C virus
cgaccccccttctcaggctg

SEQ ID NO: 41041 - DNA, 20 bp, Hepatitis C virus
atgttgggggccctcttacc

SEQ ID NO: 41042 - DNA, 20 bp, Hepatitis C virus
tgttgggggccctcttacca

SEQ ID NO: 41043 - DNA, 20 bp, Hepatitis C virus
ggggccctcttaccaattca

SEQ ID NO: 41044 - DNA, 20 bp, Hepatitis C virus
ccaattcaaggggggaaaac

SEQ ID NO: 41045 - DNA, 20 bp, Hepatitis C virus
aaggggggaaaactgcggct

SEQ ID NO: 41046 - DNA, 20 bp, Hepatitis C virus
cccgtgaccctacaaccccc

SEQ ID NO: 41047 - DNA, 20 bp, Hepatitis C virus
tgttgcctagccaggaattg

SEQ ID NO: 41048 - DNA, 20 bp, Hepatitis C virus
cctagccaggaattgactgg

SEQ ID NO: 41049 - DNA, 20 bp, Hepatitis C virus
actggagtgtgtcttgctgt

SEQ ID NO: 41050 - DNA, 20 bp, Hepatitis C virus
ctgtctcccacgcggctctc

SEQ ID NO: 41051 - DNA, 20 bp, Hepatitis C virus
tcactccacagttactctcc

SEQ ID NO: 41052 - DNA, 20 bp, Hepatitis C virus
cactccacagttactctcca

SEQ ID NO: 41053 - DNA, 20 bp, Hepatitis C virus
actccacagttactctccag

SEQ ID NO: 41054 - DNA, 20 bp, Hepatitis C virus
ctctccaggtgaaatcaata

SEQ ID NO: 41055 - DNA, 20 bp, Hepatitis C virus
gggtcccgcccttgcgagct

SEQ ID NO: 41056 - DNA, 20 bp, Influenza A virus
aatccaatgattgtcgagct

SEQ ID NO: 41057 - DNA, 20 bp, Influenza A virus
tcgagcttgcggaaaaggca

SEQ ID NO: 41058 - DNA, 20 bp, Influenza A virus
cggaaaaggcaatgaaagaa

SEQ ID NO: 41059 - DNA, 20 bp, Influenza A virus
cggcaaatttgttcgtttcg

SEQ ID NO: 41060 - DNA, 20 bp, Influenza A virus
gttcgtttcgattttcggat

SEQ ID NO: 41061 - DNA, 20 bp, Influenza A virus
agaagcctaaatttctccca

SEQ ID NO: 41062 - DNA, 20 bp, Influenza A virus
ctcccagatttgtatgacta

SEQ ID NO: 41063 - DNA, 20 bp, Influenza A virus
tcccagatttgtatgactac

SEQ ID NO: 41064 - DNA, 20 bp, Influenza A virus
gtatgactacaaggagaacc

SEQ ID NO: 41065 - DNA, 20 bp, Influenza A virus
tatgactacaaggagaaccg

SEQ ID NO: 41066 - DNA, 20 bp, Influenza A virus
aaaacgaggagaaaattcca

SEQ ID NO: 41067 - DNA, 20 bp, Influenza A virus
caaagacaaagaacatgagg

SEQ ID NO: 41068 - DNA, 20 bp, Influenza A virus
aagtgggcacttggtgagaa

SEQ ID NO: 41069 - DNA, 20 bp, Influenza A virus
tcaccaagtgcccacttcaa

SEQ ID NO: 41070 - DNA, 20 bp, Influenza A virus
aattggcttgttttcctcat

SEQ ID NO: 41071 - DNA, 20 bp, Influenza A virus
aacttgatgaaataggggaa

SEQ ID NO: 41072 - DNA, 20 bp, Influenza A virus
atgaaataggggaagacgtt

SEQ ID NO: 41073 - DNA, 20 bp, Influenza A virus
ctccaattgagcacattgca

SEQ ID NO: 41074 - DNA, 20 bp, Influenza A virus
agcacattgcaagtatgaga

SEQ ID NO: 41075 - DNA, 20 bp, Influenza A virus
caagtatgagaaggaactat

SEQ ID NO: 41076 - DNA, 20 bp, Influenza A virus
gtgagtatggaattctctct

SEQ ID NO: 41077 - DNA, 20 bp, Influenza A virus
tgagtatggaattctctctt

SEQ ID NO: 41078 - DNA, 20 bp, Influenza A virus
tctcttactgatccgaggct

SEQ ID NO: 41079 - DNA, 20 bp, Influenza A virus
ctgatccgaggctggagcca

SEQ ID NO: 41080 - DNA, 20 bp, Influenza A virus
tcccatctgtgtggctccag

SEQ ID NO: 41081 - DNA, 20 bp, Influenza A virus
aacagattgagagcatgatt

SEQ ID NO: 41082 - DNA, 20 bp, Influenza A virus
agagcatgattgaggccgag

SEQ ID NO: 41083 - DNA, 20 bp, Influenza A virus
aggccgagtcttctgtcaaa

SEQ ID NO: 41084 - DNA, 20 bp, Influenza A virus
tgtcaaagaaaaagacatga

SEQ ID NO: 41085 - DNA, 20 bp, Influenza A virus
tttgaaaacaaatcagaaac

SEQ ID NO: 41086 - DNA, 20 bp, Influenza A virus
atgctaatgcccaagcagaa

SEQ ID NO: 41087 - DNA, 20 bp, Influenza A virus
gcatcagaatagaccaggca

SEQ ID NO: 41088 - DNA, 20 bp, Influenza A virus
catcagaatagaccaggcaa

SEQ ID NO: 41089 - DNA, 20 bp, Influenza A virus
caacatgatgttcttatcca

SEQ ID NO: 41090 - DNA, 20 bp, Influenza A virus
aacatgatgttcttatccat

SEQ ID NO: 41091 - DNA, 20 bp, Influenza A virus
gagtctctaaaactctacag

SEQ ID NO: 41092 - DNA, 20 bp, Influenza A virus
gcttggagaagcagtaatga

SEQ ID NO: 41093 - DNA, 20 bp, Influenza A virus
gagaagcagtaatgagaatg

SEQ ID NO: 41094 - DNA, 20 bp, Influenza A virus
ctgttttggagtgagtggag

SEQ ID NO: 41095 - DNA, 20 bp, Influenza A virus
tgttttggagtgagtggagg

SEQ ID NO: 41096 - DNA, 20 bp, Human papillomavirus 54
tagaaaacagttatttgggg

SEQ ID NO: 41097 - DNA, 20 bp, Human papillomavirus 54
tttgggggcaatgtctgcta

SEQ ID NO: 41098 - DNA, 20 bp, Human papillomavirus 54
gggggcaatgtctgctactg

SEQ ID NO: 41099 - DNA, 20 bp, Human papillomavirus 54
ggggcaatgtctgctactga

SEQ ID NO: 41100 - DNA, 20 bp, Human papillomavirus 54
gtgcaaggtatgcaatattc

SEQ ID NO: 41101 - DNA, 20 bp, Human papillomavirus 54
aggatatagtccttgattta

SEQ ID NO: 41102 - DNA, 20 bp, Human papillomavirus 54
atttaaaaccagaaccgttt

SEQ ID NO: 41103 - DNA, 20 bp, Human papillomavirus 54
aaaaccagaaccgtttgacc

SEQ ID NO: 41104 - DNA, 20 bp, Human papillomavirus 54
aaaccagaaccgtttgacct

SEQ ID NO: 41105 - DNA, 20 bp, Human papillomavirus 54
gacctgtactgcagggagca

SEQ ID NO: 41106 - DNA, 20 bp, Human papillomavirus 54
tttgtggaagcaattgtaga

SEQ ID NO: 41107 - DNA, 20 bp, Human papillomavirus 54
ttgtggaagcaattgtagaa

SEQ ID NO: 41108 - DNA, 20 bp, Human papillomavirus 54
tgtggaagcaattgtagaac

SEQ ID NO: 41109 - DNA, 20 bp, Human papillomavirus 54
gtggaagcaattgtagaacg

SEQ ID NO: 41110 - DNA, 20 bp, Human papillomavirus 54
tggaagcaattgtagaacgt

SEQ ID NO: 41111 - DNA, 20 bp, Human papillomavirus 54
caaacagcgaaccctgtgta

SEQ ID NO: 41112 - DNA, 20 bp, Human papillomavirus 54
ggctttggctgaccgccgtc

SEQ ID NO: 41113 - DNA, 20 bp, Human papillomavirus 54
gctttggctgaccgccgtcc

SEQ ID NO: 41114 - DNA, 20 bp, Human papillomavirus 54
ggctgaccgccgtcctaggg

SEQ ID NO: 41115 - DNA, 20 bp, Human papillomavirus 54
gctgaccgccgtcctaggga

SEQ ID NO: 41116 - DNA, 20 bp, Human papillomavirus 54
atatgcgcaatgcattagat

SEQ ID NO: 41117 - DNA, 20 bp, Human papillomavirus 54
tatgcgcaatgcattagatg

SEQ ID NO: 41118 - DNA, 20 bp, Human papillomavirus 54
gatggcaatcctatgtgctt

SEQ ID NO: 41119 - DNA, 20 bp, Human papillomavirus 54
gatagaaaacatcgagctat

SEQ ID NO: 41120 - DNA, 20 bp, Human papillomavirus 54
atagaaaacatcgagctatg

SEQ ID NO: 41121 - DNA, 20 bp, Human papillomavirus 54
agatgtgtgccaggaaaggc

SEQ ID NO: 41122 - DNA, 20 bp, Human papillomavirus 54
gatgtgtgccaggaaaggct

SEQ ID NO: 41123 - DNA, 20 bp, Human papillomavirus 54
tagacctatatgaaaaagat

SEQ ID NO: 41124 - DNA, 20 bp, Human papillomavirus 54
attactatctttttcatata

SEQ ID NO: 41125 - DNA, 20 bp, Human papillomavirus 54
ttactatctttttcatatag

SEQ ID NO: 41126 - DNA, 20 bp, Human papillomavirus 54
cattagagacattgcaaaag

SEQ ID NO: 41127 - DNA, 20 bp, Human papillomavirus 54
gagacattgcaaaagacagt

SEQ ID NO: 41128 - DNA, 20 bp, Human papillomavirus 54
caaaagacagtatacagcac

SEQ ID NO: 41129 - DNA, 20 bp, Human papillomavirus 54
caggacacatgcctggaacg

SEQ ID NO: 41130 - DNA, 20 bp, Human papillomavirus 54
ttaagcaaccagttggtggt

SEQ ID NO: 41131 - DNA, 20 bp, Human papillomavirus 54
attatatggatgcagaacac

SEQ ID NO: 41132 - DNA, 20 bp, Human papillomavirus 54
ttatatggatgcagaacaca

SEQ ID NO: 41133 - DNA, 20 bp, Human papillomavirus 54
tatggatgcagaacacaaag

SEQ ID NO: 41134 - DNA, 20 bp, Human papillomavirus 54
tgtggattttaaaaaggaag

SEQ ID NO: 41135 - DNA, 20 bp, Human papillomavirus 54
taaaaaggaagcatctaagt

SEQ ID NO: 41136 - DNA, 20 bp, Human papillomavirus 54
caacagccttccagtcttat

SEQ ID NO: 41137 - DNA, 20 bp, Human papillomavirus 54
cagtcttataacatatgaca

SEQ ID NO: 41138 - DNA, 20 bp, Human papillomavirus 54
taacatatgacaatcctgta

SEQ ID NO: 41139 - DNA, 20 bp, Human papillomavirus 54
ccctacactttgagcagccc

SEQ ID NO: 41140 - DNA, 20 bp, Human papillomavirus 54
gagcagcccacaatacataa

SEQ ID NO: 41141 - DNA, 20 bp, Human papillomavirus 54
aggccctcatcaggtcacac

SEQ ID NO: 41142 - DNA, 20 bp, Human papillomavirus 54
ggccctcatcaggtcacacc

SEQ ID NO: 41143 - DNA, 20 bp, Human papillomavirus 54
gttcccgcacgtcctatatt

SEQ ID NO: 41144 - DNA, 20 bp, Human papillomavirus 54
ttcccgcacgtcctatattt

SEQ ID NO: 41145 - DNA, 20 bp, Human papillomavirus 54
ccgcacgtcctatatttcca

SEQ ID NO: 41146 - DNA, 20 bp, Human papillomavirus 54
atgtagctacctcaatttgt

SEQ ID NO: 41147 - DNA, 20 bp, Human papillomavirus 54
gtaaatatcctgattacctt

SEQ ID NO: 41148 - DNA, 20 bp, Human papillomavirus 54
taaatatcctgattacctta

SEQ ID NO: 41149 - DNA, 20 bp, Human papillomavirus 54
ccttaaaatggctgcagagg

SEQ ID NO: 41150 - DNA, 20 bp, Human papillomavirus 54
aaatggctgcagaggcatat

SEQ ID NO: 41151 - DNA, 20 bp, Human papillomavirus 54
aataagccatactggttaca

SEQ ID NO: 41152 - DNA, 20 bp, Human papillomavirus 54
ataagccatactggttacaa

SEQ ID NO: 41153 - DNA, 20 bp, Human papillomavirus 54
caacgggcccagggtcaaaa

SEQ ID NO: 41154 - DNA, 20 bp, Human papillomavirus 54
gttggggcaatcaggtgttt

SEQ ID NO: 41155 - DNA, 20 bp, Human papillomavirus 54
ttggggcaatcaggtgtttt

SEQ ID NO: 41156 - DNA, 20 bp, Human papillomavirus 54
tagaggactggaactttggt

SEQ ID NO: 41157 - DNA, 20 bp, Human papillomavirus 54
ggtataacccccccagctac

SEQ ID NO: 41158 - DNA, 20 bp, Human papillomavirus 54
gtataacccccccagctaca

SEQ ID NO: 41159 - DNA, 20 bp, Human papillomavirus 54
ggaggacacatataggtttg

SEQ ID NO: 41160 - DNA, 20 bp, Human papillomavirus 54
gaggacacatataggtttgt

SEQ ID NO: 41161 - DNA, 20 bp, Human T-lymphotropic virus 1
agtcgcgttctgccgcctcc

SEQ ID NO: 41162 - DNA, 20 bp, Human T-lymphotropic virus 1
tgccgcctcccgcctgtggt

SEQ ID NO: 41163 - DNA, 20 bp, Human T-lymphotropic virus 1
agagctcaggtcgagaccgg

SEQ ID NO: 41164 - DNA, 20 bp, Human T-lymphotropic virus 1
gagctcaggtcgagaccggg

SEQ ID NO: 41165 - DNA, 20 bp, Human T-lymphotropic virus 1
cctagacggcggacgtagtt

SEQ ID NO: 41166 - DNA, 20 bp, Human T-lymphotropic virus 1
tatagcactctccaggagag

SEQ ID NO: 41167 - DNA, 20 bp, Human T-lymphotropic virus 1
agtacacagttgggggctcg

SEQ ID NO: 41168 - DNA, 20 bp, Human T-lymphotropic virus 1
gtacacagttgggggctcgt

SEQ ID NO: 41169 - DNA, 20 bp, Human T-lymphotropic virus 1
ggggctcgtccgggattcga

SEQ ID NO: 41170 - DNA, 20 bp, Human T-lymphotropic virus 1
gagcgcccctttattcccta

SEQ ID NO: 41171 - DNA, 20 bp, Human T-lymphotropic virus 1
tacacatactcatccaaacc

SEQ ID NO: 41172 - DNA, 20 bp, Human T-lymphotropic virus 1
acacatactcatccaaaccc

SEQ ID NO: 41173 - DNA, 20 bp, Human T-lymphotropic virus 1
cacatactcatccaaaccca

SEQ ID NO: 41174 - DNA, 20 bp, Human T-lymphotropic virus 1
gtgggtcagaatccgggggg

SEQ ID NO: 41175 - DNA, 20 bp, Human T-lymphotropic virus 1
tgggtcagaatccggggggt

SEQ ID NO: 41176 - DNA, 20 bp, Human T-lymphotropic virus 1
cggtgcagcagtttgacccc

SEQ ID NO: 41177 - DNA, 20 bp, Human T-lymphotropic virus 1
gaccccactgccaaagacct

SEQ ID NO: 41178 - DNA, 20 bp, Human T-lymphotropic virus 1
accccactgccaaagacctc

SEQ ID NO: 41179 - DNA, 20 bp, Human T-lymphotropic virus 1
gaggtctttggcagtggggt

SEQ ID NO: 41180 - DNA, 20 bp, Human T-lymphotropic virus 1
ggcagtggggtcaaactgct

SEQ ID NO: 41181 - DNA, 20 bp, Human T-lymphotropic virus 1
gccgccctgccagggagtgc

SEQ ID NO: 41182 - DNA, 20 bp, Human T-lymphotropic virus 1
ctgggcctctatcctccaag

SEQ ID NO: 41183 - DNA, 20 bp, Human T-lymphotropic virus 1
gaggatagaggcccaggaag

SEQ ID NO: 41184 - DNA, 20 bp, Human T-lymphotropic virus 1
ggcactccctggcagggcgg

SEQ ID NO: 41185 - DNA, 20 bp, Human T-lymphotropic virus 1
gcactccctggcagggcggc

SEQ ID NO: 41186 - DNA, 20 bp, Human T-lymphotropic virus 1
gttgtccagcctaaaaaacc

SEQ ID NO: 41187 - DNA, 20 bp, Human T-lymphotropic virus 1
tccagcctaaaaaacccccc

SEQ ID NO: 41188 - DNA, 20 bp, Human T-lymphotropic virus 1
cggtgcgggaaagcaggcca

SEQ ID NO: 41189 - DNA, 20 bp, Human T-lymphotropic virus 1
cccgcaccggaagcacggct

SEQ ID NO: 41190 - DNA, 20 bp, Human T-lymphotropic virus 1
ccgcaccggaagcacggctg

SEQ ID NO: 41191 - DNA, 20 bp, Human T-lymphotropic virus 1
ccaatacaggcgccagctgt

SEQ ID NO: 41192 - DNA, 20 bp, Human T-lymphotropic virus 1
ggctagaacacctcccaagg

SEQ ID NO: 41193 - DNA, 20 bp, Human T-lymphotropic virus 1
ggaggtgttctagcccaagg

SEQ ID NO: 41194 - DNA, 20 bp, Human T-lymphotropic virus 1
tagcccaaggacagctggcg

SEQ ID NO: 41195 - DNA, 20 bp, Human T-lymphotropic virus 1
gcaagattacaggcggcctt

SEQ ID NO: 41196 - DNA, 20 bp, Human T-lymphotropic virus 1
ccagttaaaaaagccaatgg

SEQ ID NO: 41197 - DNA, 20 bp, Human T-lymphotropic virus 1
aaaaagccaatggaacctgg

SEQ ID NO: 41198 - DNA, 20 bp, Human T-lymphotropic virus 1
atccacgacctgcgggccac

SEQ ID NO: 41199 - DNA, 20 bp, Human T-lymphotropic virus 1
gagagttagtggcccgcagg

SEQ ID NO: 41200 - DNA, 20 bp, Human T-lymphotropic virus 1
gtggcccgcaggtcgtggat

SEQ ID NO: 41201 - DNA, 20 bp, Human T-lymphotropic virus 1
aaaaatagtcccaccctgtt

SEQ ID NO: 41202 - DNA, 20 bp, Human T-lymphotropic virus 1
aaaatagtcccaccctgttc

SEQ ID NO: 41203 - DNA, 20 bp, Human T-lymphotropic virus 1
gaaatgcagctggcccatat

SEQ ID NO: 41204 - DNA, 20 bp, Human T-lymphotropic virus 1
ggcaagccttcccccaatgc

SEQ ID NO: 41205 - DNA, 20 bp, Human T-lymphotropic virus 1
ccccaatgcactattcttca

SEQ ID NO: 41206 - DNA, 20 bp, Human T-lymphotropic virus 1
aagccctacttggcgagatt

SEQ ID NO: 41207 - DNA, 20 bp, Human T-lymphotropic virus 1
gcgagattcagtgggtctcc

SEQ ID NO: 41208 - DNA, 20 bp, Human T-lymphotropic virus 1
agtgggtctccaaaggaact

SEQ ID NO: 41209 - DNA, 20 bp, Human T-lymphotropic virus 1
cgccagccccttcacagtct

SEQ ID NO: 41210 - DNA, 20 bp, Human T-lymphotropic virus 1
acagtctctactgtgcctta

SEQ ID NO: 41211 - DNA, 20 bp, Human T-lymphotropic virus 1
tctggctacatgccccccta

SEQ ID NO: 41212 - DNA, 20 bp, Human T-lymphotropic virus 1
cctcagctgtgttattactc

SEQ ID NO: 41213 - DNA, 20 bp, Human T-lymphotropic virus 1
ttactcgacaaatacacctt

SEQ ID NO: 41214 - DNA, 20 bp, Human T-lymphotropic virus 1
ctcgacaaatacaccttgca

SEQ ID NO: 41215 - DNA, 20 bp, Human T-lymphotropic virus 1
caaggtgtatttgtcgagta

SEQ ID NO: 41216 - DNA, 20 bp, Human T-lymphotropic virus 1
caggccctcctgccccgctt

SEQ ID NO: 41217 - DNA, 20 bp, Human T-lymphotropic virus 1
aggccctcctgccccgctta

SEQ ID NO: 41218 - DNA, 20 bp, Human T-lymphotropic virus 1
ctatcgcgtaaggtcgtcta

SEQ ID NO: 41219 - DNA, 20 bp, Human T-lymphotropic virus 1
gcaccacgttcgcagccata

SEQ ID NO: 41220 - DNA, 20 bp, Human T-lymphotropic virus 1
caccacgttcgcagccatac

SEQ ID NO: 41221 - DNA, 20 bp, Human T-lymphotropic virus 1
cccaagacttcctcaatatg

SEQ ID NO: 41222 - DNA, 20 bp, Human T-lymphotropic virus 1
ccaagacttcctcaatatgt

SEQ ID NO: 41223 - DNA, 20 bp, Human T-lymphotropic virus 1
ctcaatatgtgtacctccct

SEQ ID NO: 41224 - DNA, 20 bp, Human T-lymphotropic virus 1
ctattcgccatactacccat

SEQ ID NO: 41225 - DNA, 20 bp, Human T-lymphotropic virus 1
gccatactacccatgtcccc

SEQ ID NO: 41226 - DNA, 20 bp, Human T-lymphotropic virus 1
aagaagctgccggcgctgct

SEQ ID NO: 41227 - DNA, 20 bp, Human T-lymphotropic virus 1
tgcccagtggatcccgtgga

SEQ ID NO: 41228 - DNA, 20 bp, Human T-lymphotropic virus 1
aggagcctccacgggatcca

SEQ ID NO: 41229 - DNA, 20 bp, Human T-lymphotropic virus 1
ccgggatgagagcagcgccg

SEQ ID NO: 41230 - DNA, 20 bp, Human T-lymphotropic virus 1
gagtctcctcataccactct

SEQ ID NO: 41231 - DNA, 20 bp, Human T-lymphotropic virus 1
gttcatggaccctcgacctg

SEQ ID NO: 41232 - DNA, 20 bp, Human T-lymphotropic virus 1
ttcatggaccctcgacctgc

SEQ ID NO: 41233 - DNA, 20 bp, Human T-lymphotropic virus 1
atggaccctcgacctgctgg

SEQ ID NO: 41234 - DNA, 20 bp, Human T-lymphotropic virus 1
cagcagatcaggccctacag

SEQ ID NO: 41235 - DNA, 20 bp, Human T-lymphotropic virus 1
cttaaaatgcccatacctag

SEQ ID NO: 41236 - DNA, 20 bp, Human T-lymphotropic virus 1
aaatgcccatacctagggtg

SEQ ID NO: 41237 - DNA, 20 bp, Human T-lymphotropic virus 1
cagcaagatgtcaattttac

SEQ ID NO: 41238 - DNA, 20 bp, Human T-lymphotropic virus 1
agcaagatgtcaattttact

SEQ ID NO: 41239 - DNA, 20 bp, Human T-lymphotropic virus 1
agtaaaattgacatcttgct

SEQ ID NO: 41240 - DNA, 20 bp, Human T-lymphotropic virus 1
tccttgtcacctgttcccac

SEQ ID NO: 41241 - DNA, 20 bp, Human T-lymphotropic virus 1
ccttgtcacctgttcccacg

SEQ ID NO: 41242 - DNA, 20 bp, Human T-lymphotropic virus 1
cttgtcacctgttcccacgc

SEQ ID NO: 41243 - DNA, 20 bp, Human T-lymphotropic virus 1
tcacctgttcccacgctagg

SEQ ID NO: 41244 - DNA, 20 bp, Human T-lymphotropic virus 1
ccacgctaggatcccgctcc

SEQ ID NO: 41245 - DNA, 20 bp, Human T-lymphotropic virus 1
ttgcaaccacatcgcctcca

SEQ ID NO: 41246 - DNA, 20 bp, Human T-lymphotropic virus 1
caaccacatcgcctccagcc

SEQ ID NO: 41247 - DNA, 20 bp, Human T-lymphotropic virus 1
acctctcccatcaaatcctc

SEQ ID NO: 41248 - DNA, 20 bp, Human T-lymphotropic virus 1
tcctgcagcaacctcctccg

SEQ ID NO: 41249 - DNA, 20 bp, Human T-lymphotropic virus 1
gaggctgaacggaggaggtt

SEQ ID NO: 41250 - DNA, 20 bp, Human T-lymphotropic virus 1
tcctcttccttccttttcaa

SEQ ID NO: 41251 - DNA, 20 bp, Human T-lymphotropic virus 1
cttccttttcaaatactcag

SEQ ID NO: 41252 - DNA, 20 bp, Human T-lymphotropic virus 1
cttttcaaatactcagcaat

SEQ ID NO: 41253 - DNA, 20 bp, Human T-lymphotropic virus 1
tcaaatactcagcaatctgc

SEQ ID NO: 41254 - DNA, 20 bp, Human T-lymphotropic virus 1
caaatactcagcaatctgct

SEQ ID NO: 41255 - DNA, 20 bp, Human T-lymphotropic virus 1
ctccaccagcaggtcctccg

SEQ ID NO: 41256 - DNA, 20 bp, Human T-lymphotropic virus 1
accatgcttattatcagccc

SEQ ID NO: 41257 - DNA, 20 bp, Human T-lymphotropic virus 1
ttatcagcccacttcccagg

SEQ ID NO: 41258 - DNA, 20 bp, Human T-lymphotropic virus 1
tcagcccacttcccagggtt

SEQ ID NO: 41259 - DNA, 20 bp, Human T-lymphotropic virus 1
ccagggtttggacagagtct

SEQ ID NO: 41260 - DNA, 20 bp, Human T-lymphotropic virus 1
tcggctcagctctacagttc

SEQ ID NO: 41261 - DNA, 20 bp, Human T-lymphotropic virus 1
cttatccctcgactcccctc

SEQ ID NO: 41262 - DNA, 20 bp, Human T-lymphotropic virus 1
tccctcgactcccctccttc

SEQ ID NO: 41263 - DNA, 20 bp, Human T-lymphotropic virus 1
cccacccagagaacctctaa

SEQ ID NO: 41264 - DNA, 20 bp, Human T-lymphotropic virus 1
aggtccttaccccgccaatc

SEQ ID NO: 41265 - DNA, 20 bp, Human T-lymphotropic virus 1
ccgggccctgccctaaagat

SEQ ID NO: 41266 - DNA, 20 bp, Human T-lymphotropic virus 1
cgggccctgccctaaagatg

SEQ ID NO: 41267 - DNA, 20 bp, Human T-lymphotropic virus 1
agtactacagtcctcctcct

SEQ ID NO: 41268 - DNA, 20 bp, Human T-lymphotropic virus 1
gtactacagtcctcctcctt

SEQ ID NO: 41269 - DNA, 20 bp, Human T-lymphotropic virus 1
atatttcacaaatttcaaac

SEQ ID NO: 41270 - DNA, 20 bp, Human T-lymphotropic virus 1
ccggtggcttcccggaggtc

SEQ ID NO: 41271 - DNA, 20 bp, Human T-lymphotropic virus 1
ccggaggtctgagcttatga

SEQ ID NO: 41272 - DNA, 20 bp, Human T-lymphotropic virus 1
tgatttgtctttagggggac

SEQ ID NO: 41273 - DNA, 20 bp, Human T-lymphotropic virus 1
gtctttagggggacacgtca

SEQ ID NO: 41274 - DNA, 20 bp, Human T-lymphotropic virus 1
tctttagggggacacgtcag

SEQ ID NO: 41275 - DNA, 20 bp, Human T-lymphotropic virus 1
aggagggggctcgcatctct

SEQ ID NO: 41276 - DNA, 20 bp, Human T-lymphotropic virus 1
acgcgcccgccgccttacct

SEQ ID NO: 41277 - DNA, 20 bp, Human T-lymphotropic virus 1
cctgaggccgccatccacgc

SEQ ID NO: 41278 - DNA, 20 bp, Human T-lymphotropic virus 1
agtcgcgttctgccgcctcc

SEQ ID NO: 41279 - DNA, 20 bp, Human T-lymphotropic virus 1
tgccgcctcccgcctgtggt

SEQ ID NO: 41280 - DNA, 20 bp, Influenza A virus
agaagtacacatcagggaga

SEQ ID NO: 41281 - DNA, 20 bp, Influenza A virus
catcctaagtgacgggttct

SEQ ID NO: 41282 - DNA, 20 bp, Influenza A virus
atcctaagtgacgggttctt

SEQ ID NO: 41283 - DNA, 20 bp, Influenza A virus
ttttcctgtctccctgatgt

SEQ ID NO: 41284 - DNA, 20 bp, Influenza A virus
tcctgtctccctgatgtgta

SEQ ID NO: 41285 - DNA, 20 bp, Influenza A virus
ggcagtgacatggtggaata

SEQ ID NO: 41286 - DNA, 20 bp, Influenza A virus
gcagtgacatggtggaatag

SEQ ID NO: 41287 - DNA, 20 bp, Influenza A virus
attatccaaaaatctacaag

SEQ ID NO: 41288 - DNA, 20 bp, Influenza A virus
tccaaaaatctacaagactt

SEQ ID NO: 41289 - DNA, 20 bp, Influenza A virus
ttttgagaaagtcgaaaggt

SEQ ID NO: 41290 - DNA, 20 bp, Influenza A virus
acaataaccaaagagaaaaa

SEQ ID NO: 41291 - DNA, 20 bp, Influenza A virus
caaaatttctcctttgatgg

SEQ ID NO: 41292 - DNA, 20 bp, Influenza A virus
ctcctttgatggttgcatac

SEQ ID NO: 41293 - DNA, 20 bp, Influenza A virus
tcctttgatggttgcataca

SEQ ID NO: 41294 - DNA, 20 bp, Influenza A virus
gatggttgcatacatgttag

SEQ ID NO: 41295 - DNA, 20 bp, Influenza A virus
attggagatgtgccacagca

SEQ ID NO: 41296 - DNA, 20 bp, Influenza A virus
ttggagatgtgccacagcac

SEQ ID NO: 41297 - DNA, 20 bp, Influenza A virus
gagatgtgccacagcacaca

SEQ ID NO: 41298 - DNA, 20 bp, Influenza A virus
tcccgccaatctgtgtgctg

SEQ ID NO: 41299 - DNA, 20 bp, Influenza A virus
cgggcaatctccaaacattg

SEQ ID NO: 41300 - DNA, 20 bp, Influenza A virus
aaaataagggtgcatgaggg

SEQ ID NO: 41301 - DNA, 20 bp, Influenza A virus
acaatggtggggaaaagggc

SEQ ID NO: 41302 - DNA, 20 bp, Influenza A virus
gttcagctgatagtgagtgg

SEQ ID NO: 41303 - DNA, 20 bp, Influenza A virus
cactcactatcagctgaacc

SEQ ID NO: 41304 - DNA, 20 bp, Influenza A virus
aatcccatgcatcaactttt

SEQ ID NO: 41305 - DNA, 20 bp, Influenza A virus
taagacattttcagaaagat

SEQ ID NO: 41306 - DNA, 20 bp, Influenza A virus
aagacattttcagaaagatg

SEQ ID NO: 41307 - DNA, 20 bp, Influenza A virus
agacattttcagaaagatgc

SEQ ID NO: 41308 - DNA, 20 bp, Influenza A virus
tcagaaagatgcaaaagtgc

SEQ ID NO: 41309 - DNA, 20 bp, Influenza A virus
gagaccaacgaggaaatgta

SEQ ID NO: 41310 - DNA, 20 bp, Influenza A virus
ctcatcgtcaatgatgtggg

SEQ ID NO: 41311 - DNA, 20 bp, Influenza A virus
acgatgagtaagttattgtc

SEQ ID NO: 41312 - DNA, 20 bp, Influenza A virus
ttgtcagtttctctgtcccc

SEQ ID NO: 41313 - DNA, 20 bp, Influenza A virus
tcagtttctctgtcccctgt

SEQ ID NO: 41314 - DNA, 20 bp, Influenza A virus
gaggccaatacagtggattt

SEQ ID NO: 41315 - DNA, 20 bp, Influenza A virus
gttaggactctattccaaca

SEQ ID NO: 41316 - DNA, 20 bp, Influenza A virus
ttaggactctattccaacaa

SEQ ID NO: 41317 - DNA, 20 bp, Influenza A virus
ggactctattccaacaaatg

SEQ ID NO: 41318 - DNA, 20 bp, Influenza A virus
caacaaatgagggatgtact

SEQ ID NO: 41319 - DNA, 20 bp, Influenza A virus
aactgaagacccagatgaag

SEQ ID NO: 41320 - DNA, 20 bp, Influenza A virus
actgaagacccagatgaagg

SEQ ID NO: 41321 - DNA, 20 bp, Influenza A virus
tgagaggattcctcattctg

SEQ ID NO: 41322 - DNA, 20 bp, Influenza A virus
ctcattctgggcaaggaaga

SEQ ID NO: 41323 - DNA, 20 bp, Influenza A virus
tgggcaaggaagatagaaga

SEQ ID NO: 41324 - DNA, 20 bp, Influenza A virus
gtatcagaatggaccaggcg

SEQ ID NO: 41325 - DNA, 20 bp, Influenza A virus
tatcagaatggaccaggcga

SEQ ID NO: 41326 - DNA, 20 bp, Influenza A virus
cagtatgatgtttttatcca

SEQ ID NO: 41327 - DNA, 20 bp, Influenza A virus
agtatgatgtttttatccat

SEQ ID NO: 41328 - DNA, 20 bp, Influenza A virus
ttatccatgatcgcctggtc

SEQ ID NO: 41329 - DNA, 20 bp, Influenza A virus
gagtcctcatcggaggactt

SEQ ID NO: 41330 - DNA, 20 bp, Influenza A virus
aatggaatgataacacagtt

SEQ ID NO: 41331 - DNA, 20 bp, Influenza A virus
gagtctctgaaactctacag

SEQ ID NO: 41332 - DNA, 20 bp, Influenza A virus
tccaagcgaatctctgtaga

SEQ ID NO: 41333 - DNA, 20 bp, Influenza A virus
cagagactcgaactgtgtta

SEQ ID NO: 41334 - DNA, 20 bp, Influenza A virus
ccttatactggagatcctcc

SEQ ID NO: 41335 - DNA, 20 bp, Influenza A virus
tactggagatcctccataca

SEQ ID NO: 41336 - DNA, 20 bp, Influenza A virus
gtgtgttctgtttactgtgt

SEQ ID NO: 41337 - DNA, 20 bp, Influenza A virus
tgtttactgtgtccatggtg

SEQ ID NO: 41338 - DNA, 20 bp, Influenza A virus
actgtgtccatggtgtatcc

SEQ ID NO: 41339 - DNA, 20 bp, Influenza A virus
gagaattcatgccttgaaac

SEQ ID NO: 41340 - DNA, 20 bp, Influenza A virus
agaattcatgccttgaaaca

SEQ ID NO: 41341 - DNA, 20 bp, Influenza A virus
atgccttgaaacaatggaag

SEQ ID NO: 41342 - DNA, 20 bp, Influenza A virus
aaacaatggaagttgttcaa

SEQ ID NO: 41343 - DNA, 20 bp, Influenza A virus
ttcaacaaacaagggtagat

SEQ ID NO: 41344 - DNA, 20 bp, Influenza A virus
aatacgatgaccaaagatgc

SEQ ID NO: 41345 - DNA, 20 bp, Influenza A virus
cctctctctgcatctttggt

SEQ ID NO: 41346 - DNA, 20 bp, Influenza A virus
ggtcatcgtatttaatgtca

SEQ ID NO: 41347 - DNA, 20 bp, Influenza A virus
gtcatcgtatttaatgtcag

SEQ ID NO: 41348 - DNA, 20 bp, Influenza A virus
aatgtcagtgctcttattag

SEQ ID NO: 41349 - DNA, 20 bp, Influenza A virus
tgagaaagatgatgactaat

SEQ ID NO: 41350 - DNA, 20 bp, Influenza A virus
acaagacacagagatttctt

SEQ ID NO: 41351 - DNA, 20 bp, Influenza A virus
ctttcacaatcactggggac

SEQ ID NO: 41352 - DNA, 20 bp, Influenza A virus
tttcacaatcactggggaca

SEQ ID NO: 41353 - DNA, 20 bp, Influenza A virus
cacaatcactggggacaaca

SEQ ID NO: 41354 - DNA, 20 bp, Influenza A virus
gagagtaaaagaatgaagat

SEQ ID NO: 41355 - DNA, 20 bp, Influenza A virus
gaacacaaataccagcagaa

SEQ ID NO: 41356 - DNA, 20 bp, Influenza A virus
acctgaagtacttcaatgaa

SEQ ID NO: 41357 - DNA, 20 bp, Influenza A virus
aatgaatcaacaaagaagaa

SEQ ID NO: 41358 - DNA, 20 bp, Influenza A virus
tcttctttgttgattcattg

SEQ ID NO: 41359 - DNA, 20 bp, Influenza A virus
tgctctcatagtgaatgcac

SEQ ID NO: 41360 - DNA, 20 bp, Influenza A virus
gctctcatagtgaatgcacc

SEQ ID NO: 41361 - DNA, 20 bp, Influenza A virus
ctctcatagtgaatgcacca

SEQ ID NO: 41362 - DNA, 20 bp, Influenza A virus
tattccctcatggtttggtg

SEQ ID NO: 41363 - DNA, 20 bp, Influenza A virus
cctcatggtttggtgcattc

SEQ ID NO: 41364 - DNA, 20 bp, Influenza A virus
gagtaacagtgataaagaac

SEQ ID NO: 41365 - DNA, 20 bp, Influenza A virus
gacctgcaacggcccagatg

SEQ ID NO: 41366 - DNA, 20 bp, Influenza A virus
aattgttcatcaaagactac

SEQ ID NO: 41367 - DNA, 20 bp, Influenza A virus
ttcatcaaagactacagata

SEQ ID NO: 41368 - DNA, 20 bp, Influenza A virus
atcaaagactacagatacac

SEQ ID NO: 41369 - DNA, 20 bp, Human herpesvirus 5
ggaaccatgggccgccaacc

SEQ ID NO: 41370 - DNA, 20 bp, Human herpesvirus 5
ctgttggcgcgccaacgcga

SEQ ID NO: 41371 - DNA, 20 bp, Human herpesvirus 5
gcgcgccaacgcgacggcct

SEQ ID NO: 41372 - DNA, 20 bp, Human herpesvirus 5
cgcggcagcgtacgacgttc

SEQ ID NO: 41373 - DNA, 20 bp, Human herpesvirus 5
cagtcagcgaggccgtcgcg

SEQ ID NO: 41374 - DNA, 20 bp, Human herpesvirus 5
gaacgaccatccgcgggaga

SEQ ID NO: 41375 - DNA, 20 bp, Human herpesvirus 5
ccacgcatccggatcacccc

SEQ ID NO: 41376 - DNA, 20 bp, Human herpesvirus 5
tgggcgtggagatgtggaga

SEQ ID NO: 41377 - DNA, 20 bp, Human herpesvirus 5
gggcgtggagatgtggagat

SEQ ID NO: 41378 - DNA, 20 bp, Human herpesvirus 5
ggcgtggagatgtggagatg

SEQ ID NO: 41379 - DNA, 20 bp, Human herpesvirus 5
tacaccctcagccacggttc

SEQ ID NO: 41380 - DNA, 20 bp, Human herpesvirus 5
acaatccccgaaactacgcc

SEQ ID NO: 41381 - DNA, 20 bp, Human herpesvirus 5
acgccgaaacgacccgcaca

SEQ ID NO: 41382 - DNA, 20 bp, Human herpesvirus 5
cggcgtgaagttggacggcg

SEQ ID NO: 41383 - DNA, 20 bp, Human herpesvirus 5
ggcgtgaagttggacggcgt

SEQ ID NO: 41384 - DNA, 20 bp, Human herpesvirus 5
cgccgccacgctgcttcacc

SEQ ID NO: 41385 - DNA, 20 bp, Human herpesvirus 5
gccgccacgctgcttcaccg

SEQ ID NO: 41386 - DNA, 20 bp, Human herpesvirus 5
accgatatccaataaaccca

SEQ ID NO: 41387 - DNA, 20 bp, Human herpesvirus 5
attggatatcggtgaagcag

SEQ ID NO: 41388 - DNA, 20 bp, Human herpesvirus 5
ttggatatcggtgaagcagc

SEQ ID NO: 41389 - DNA, 20 bp, Human herpesvirus 5
cccaatactctccaacaacg

SEQ ID NO: 41390 - DNA, 20 bp, Human herpesvirus 5
tacaccacatcgttggataa

SEQ ID NO: 41391 - DNA, 20 bp, Human herpesvirus 5
gataatacgactacagacat

SEQ ID NO: 41392 - DNA, 20 bp, Human herpesvirus 5
cgctggacgttatgtctgta

SEQ ID NO: 41393 - DNA, 20 bp, Human herpesvirus 5
gctggacgttatgtctgtag

SEQ ID NO: 41394 - DNA, 20 bp, Human herpesvirus 5
ttgcgttatcatctgctccc

SEQ ID NO: 41395 - DNA, 20 bp, Human herpesvirus 5
cgttatcatctgctcccgct

SEQ ID NO: 41396 - DNA, 20 bp, Human herpesvirus 5
tcatctgctcccgctgctac

SEQ ID NO: 41397 - DNA, 20 bp, Human herpesvirus 5
caagtcagagcggcgtcggt

SEQ ID NO: 41398 - DNA, 20 bp, Human herpesvirus 5
tgacacggcgaaacgccgtt

SEQ ID NO: 41399 - DNA, 20 bp, Human herpesvirus 5
cgccgtgtcataaccgacgc

SEQ ID NO: 41400 - DNA, 20 bp, Human herpesvirus 5
gccgtgtcataaccgacgcc

SEQ ID NO: 41401 - DNA, 20 bp, Human herpesvirus 5
gaatccggcgtgctgcatag

SEQ ID NO: 41402 - DNA, 20 bp, Human herpesvirus 5
gtgccgtcgccgcactgcgt

SEQ ID NO: 41403 - DNA, 20 bp, Human herpesvirus 5
tcactcgcgtcgtggctgac

SEQ ID NO: 41404 - DNA, 20 bp, Human herpesvirus 5
ctgcagtgtgtggtgattcg

SEQ ID NO: 41405 - DNA, 20 bp, Human herpesvirus 5
tgcagtgtgtggtgattcgg

SEQ ID NO: 41406 - DNA, 20 bp, Human herpesvirus 5
ggcacgttctgcgtccgcgt

SEQ ID NO: 41407 - DNA, 20 bp, Human herpesvirus 5
cgaggacggcggcgcggcgc

SEQ ID NO: 41408 - DNA, 20 bp, Human herpesvirus 5
gaggacggcggcgcggcgca

SEQ ID NO: 41409 - DNA, 20 bp, Human herpesvirus 5
cgtctcatcaccgagaccgc

SEQ ID NO: 41410 - DNA, 20 bp, Human herpesvirus 5
gtctcatcaccgagaccgcg

SEQ ID NO: 41411 - DNA, 20 bp, Human herpesvirus 5
cccagcacgcaggtgtaggt

SEQ ID NO: 41412 - DNA, 20 bp, Human herpesvirus 5
cggatcgcgctcacagacgc

SEQ ID NO: 41413 - DNA, 20 bp, Human herpesvirus 5
ggatcgcgctcacagacgcg

SEQ ID NO: 41414 - DNA, 20 bp, Human herpesvirus 5
cgcagtataaactgcggttg

SEQ ID NO: 41415 - DNA, 20 bp, Human herpesvirus 5
atactgcgcaacctggaggg

SEQ ID NO: 41416 - DNA, 20 bp, Human herpesvirus 5
tactgcgcaacctggaggga

SEQ ID NO: 41417 - DNA, 20 bp, Human herpesvirus 5
atcagccagagcatcgcgga

SEQ ID NO: 41418 - DNA, 20 bp, Human herpesvirus 5
ttgtccgcgatgctctggct

SEQ ID NO: 41419 - DNA, 20 bp, Human herpesvirus 5
tccgcgatgctctggctgat

SEQ ID NO: 41420 - DNA, 20 bp, Human herpesvirus 5
cgaatcgtaccggcgtctga

SEQ ID NO: 41421 - DNA, 20 bp, Human herpesvirus 5
tcccgcggcagtttcctccg

SEQ ID NO: 41422 - DNA, 20 bp, Human herpesvirus 5
cctccgccgcctcgttttcc

SEQ ID NO: 41423 - DNA, 20 bp, Human herpesvirus 5
ctccgccgcctcgttttcct

SEQ ID NO: 41424 - DNA, 20 bp, Human herpesvirus 5
tcctcttcggtgttcagacg

SEQ ID NO: 41425 - DNA, 20 bp, Human herpesvirus 5
acggtatttagccatgcagc

SEQ ID NO: 41426 - DNA, 20 bp, Human herpesvirus 5
agccatgcagcgtgcggcgc

SEQ ID NO: 41427 - DNA, 20 bp, Human herpesvirus 5
gccatgcagcgtgcggcgcc

SEQ ID NO: 41428 - DNA, 20 bp, Human herpesvirus 5
catagacgcagttccgttcc

SEQ ID NO: 41429 - DNA, 20 bp, Human herpesvirus 5
cgttcccggcgggtacgtca

SEQ ID NO: 41430 - DNA, 20 bp, Human herpesvirus 5
ccggcgggtacgtcaacggc

SEQ ID NO: 41431 - DNA, 20 bp, Human herpesvirus 5
atcatccgccaccacgggca

SEQ ID NO: 41432 - DNA, 20 bp, Human herpesvirus 5
atgccgttgacgtacccgcc

SEQ ID NO: 41433 - DNA, 20 bp, Human herpesvirus 5
cgggccaggtagtagacggc

SEQ ID NO: 41434 - DNA, 20 bp, Human herpesvirus 5
tttgctatgtacgcgaggac

SEQ ID NO: 41435 - DNA, 20 bp, Human herpesvirus 5
ttgctatgtacgcgaggaca

SEQ ID NO: 41436 - DNA, 20 bp, Human herpesvirus 5
tgctatgtacgcgaggacac

SEQ ID NO: 41437 - DNA, 20 bp, Human herpesvirus 5
gctatgtacgcgaggacacc

SEQ ID NO: 41438 - DNA, 20 bp, Human herpesvirus 5
gcgaaaccgcgacagttctc

SEQ ID NO: 41439 - DNA, 20 bp, Human herpesvirus 5
cgaaaccgcgacagttctcg

SEQ ID NO: 41440 - DNA, 20 bp, Human herpesvirus 5
tcgacgttgcacggggttct

SEQ ID NO: 41441 - DNA, 20 bp, Human herpesvirus 5
cacggggttctgagcgagtc

SEQ ID NO: 41442 - DNA, 20 bp, Human herpesvirus 5
tgagcgagtcccttgcgcag

SEQ ID NO: 41443 - DNA, 20 bp, Human herpesvirus 5
ctcgattacaagacctttgg

SEQ ID NO: 41444 - DNA, 20 bp, Human herpesvirus 5
caagacctttgggacgcgca

SEQ ID NO: 41445 - DNA, 20 bp, Human herpesvirus 5
gggacgcgcacccattactt

SEQ ID NO: 41446 - DNA, 20 bp, Human herpesvirus 5
ggacgcgcacccattacttg

SEQ ID NO: 41447 - DNA, 20 bp, Human herpesvirus 5
cttgcggcagctatgctcga

SEQ ID NO: 41448 - DNA, 20 bp, Human herpesvirus 5
acggcgcgagagcccgtcgt

SEQ ID NO: 41449 - DNA, 20 bp, Human herpesvirus 5
gtgcacgatctccggggcat

SEQ ID NO: 41450 - DNA, 20 bp, Human herpesvirus 5
tgcacgatctccggggcatg

SEQ ID NO: 41451 - DNA, 20 bp, Human herpesvirus 5
tgccgcgcgggtcgcgtgtt

SEQ ID NO: 41452 - DNA, 20 bp, Human herpesvirus 5
gccgcgcgggtcgcgtgttg

SEQ ID NO: 41453 - DNA, 20 bp, Human herpesvirus 5
atcagactgcgtacgctttg

SEQ ID NO: 41454 - DNA, 20 bp, Human herpesvirus 5
ggagcgtcagacccagggcg

SEQ ID NO: 41455 - DNA, 20 bp, Human herpesvirus 5
gagcgtcagacccagggcgc

SEQ ID NO: 41456 - DNA, 20 bp, Human herpesvirus 5
gaggactttgccgcctttta

SEQ ID NO: 41457 - DNA, 20 bp, Human herpesvirus 5
gccgccttttatcgcaccct

SEQ ID NO: 41458 - DNA, 20 bp, Human herpesvirus 5
accgttcggcctcgcacctg

SEQ ID NO: 41459 - DNA, 20 bp, Human herpesvirus 5
gcgtggcgcacgcagcggcc

SEQ ID NO: 41460 - DNA, 20 bp, Human herpesvirus 5
tcgcggtccgcgtcgcgtag

SEQ ID NO: 41461 - DNA, 20 bp, Human herpesvirus 5
acgacgaggaaaccatgcgg

SEQ ID NO: 41462 - DNA, 20 bp, Human herpesvirus 5
cgacgaggaaaccatgcggc

SEQ ID NO: 41463 - DNA, 20 bp, Human herpesvirus 5
tctgcacacacaactggtca

SEQ ID NO: 41464 - DNA, 20 bp, Human herpesvirus 5
ctgcacacacaactggtcat

SEQ ID NO: 41465 - DNA, 20 bp, Human herpesvirus 5
tgcacacacaactggtcatg

SEQ ID NO: 41466 - DNA, 20 bp, Human herpesvirus 5
tccttctacctgctgacgag

SEQ ID NO: 41467 - DNA, 20 bp, Human herpesvirus 5
ccttctacctgctgacgagc

SEQ ID NO: 41468 - DNA, 20 bp, Human herpesvirus 5
cttctacctgctgacgagcg

SEQ ID NO: 41469 - DNA, 20 bp, Human herpesvirus 5
tacctgctgacgagcgcgca

SEQ ID NO: 41470 - DNA, 20 bp, Human herpesvirus 5
agccgcaacccgtcactctt

SEQ ID NO: 41471 - DNA, 20 bp, Human herpesvirus 5
ttgctgcgggatgttcaagg

SEQ ID NO: 41472 - DNA, 20 bp, Human herpesvirus 5
ctgcgggatgttcaagggac

SEQ ID NO: 41473 - DNA, 20 bp, Human herpesvirus 5
aagggaccgctggtcggttt

SEQ ID NO: 41474 - DNA, 20 bp, Human herpesvirus 5
ctgactgcccgaggataaca

SEQ ID NO: 41475 - DNA, 20 bp, Human herpesvirus 5
tgactgcccgaggataacag

SEQ ID NO: 41476 - DNA, 20 bp, Human herpesvirus 5
gccagaatgaccgcgcttac

SEQ ID NO: 41477 - DNA, 20 bp, Human herpesvirus 5
cgagcgcgcgctccacgatc

SEQ ID NO: 41478 - DNA, 20 bp, Human herpesvirus 5
gatacggacgtgcgccacga

SEQ ID NO: 41479 - DNA, 20 bp, Human herpesvirus 5
tggccaagatgtcggtgcgc

SEQ ID NO: 41480 - DNA, 20 bp, Human herpesvirus 5
aaccagctggttttcacggc

SEQ ID NO: 41481 - DNA, 20 bp, Human herpesvirus 5
tcacggcccagctgcgccac

SEQ ID NO: 41482 - DNA, 20 bp, Human herpesvirus 5
cacggcccagctgcgccact

SEQ ID NO: 41483 - DNA, 20 bp, Human herpesvirus 5
acggcccagctgcgccacta

SEQ ID NO: 41484 - DNA, 20 bp, Human herpesvirus 5
ggtcaactcgtcgcgcgcgt

SEQ ID NO: 41485 - DNA, 20 bp, Human herpesvirus 5
gtggggctgctcaactttgg

SEQ ID NO: 41486 - DNA, 20 bp, Human herpesvirus 5
tggggctgctcaactttggc

SEQ ID NO: 41487 - DNA, 20 bp, Human herpesvirus 5
ggcgtgcccagccccgtata

SEQ ID NO: 41488 - DNA, 20 bp, Human herpesvirus 5
gcgtgcccagccccgtatac

SEQ ID NO: 41489 - DNA, 20 bp, Human herpesvirus 5
gtggacttccaggtgcgcaa

SEQ ID NO: 41490 - DNA, 20 bp, Human herpesvirus 5
agacgcggctgcttagaggg

SEQ ID NO: 41491 - DNA, 20 bp, Human herpesvirus 5
gagggctcatccgactctgc

SEQ ID NO: 41492 - DNA, 20 bp, Human herpesvirus 5
acgccggtttgcgcagcgcg

SEQ ID NO: 41493 - DNA, 20 bp, Human herpesvirus 5
gcgcagcgcggcagagtcgg

SEQ ID NO: 41494 - DNA, 20 bp, Human herpesvirus 5
cgcagcgcggcagagtcgga

SEQ ID NO: 41495 - DNA, 20 bp, Human herpesvirus 5
aggccctgtgtgacagccca

SEQ ID NO: 41496 - DNA, 20 bp, Human herpesvirus 5
cagtagtcgtcatactgcac

SEQ ID NO: 41497 - DNA, 20 bp, Human herpesvirus 5
tctgcggcatggctttcgtc

SEQ ID NO: 41498 - DNA, 20 bp, Human herpesvirus 5
ctgcggcatggctttcgtca

SEQ ID NO: 41499 - DNA, 20 bp, Human herpesvirus 5
tgcggcatggctttcgtcac

SEQ ID NO: 41500 - DNA, 20 bp, Human herpesvirus 5
cgtcactgcgaccacttcca

SEQ ID NO: 41501 - DNA, 20 bp, Human herpesvirus 5
accgacttggcaaaagtgcg

SEQ ID NO: 41502 - DNA, 20 bp, Human herpesvirus 5
gcaaaagtgcgcggcccctc

SEQ ID NO: 41503 - DNA, 20 bp, Human herpesvirus 5
ttgtcgcgacgcgcttccag

SEQ ID NO: 41504 - DNA, 20 bp, Human herpesvirus 5
tcgcgacgcgcttccagcac

SEQ ID NO: 41505 - DNA, 20 bp, Human herpesvirus 5
tgccaagtcggtgaacagct

SEQ ID NO: 41506 - DNA, 20 bp, Human herpesvirus 5
caatactccagcactatggc

SEQ ID NO: 41507 - DNA, 20 bp, Human herpesvirus 5
gcctacgactccggtatcct

SEQ ID NO: 41508 - DNA, 20 bp, Human herpesvirus 5
ttcctggcgcccagcatggc

SEQ ID NO: 41509 - DNA, 20 bp, Human herpesvirus 5
tcctggcgcccagcatggcg

SEQ ID NO: 41510 - DNA, 20 bp, Human herpesvirus 5
cctggcgcccagcatggcgc

SEQ ID NO: 41511 - DNA, 20 bp, Human herpesvirus 5
acgcacagtttccgagtacg

SEQ ID NO: 41512 - DNA, 20 bp, Human herpesvirus 5
ccgagtacgcgcgtctcgga

SEQ ID NO: 41513 - DNA, 20 bp, Human herpesvirus 5
cgagtacgcgcgtctcggag

SEQ ID NO: 41514 - DNA, 20 bp, Human herpesvirus 5
tcccctatccgcgtgagttg

SEQ ID NO: 41515 - DNA, 20 bp, Human herpesvirus 5
ggtggttcaccgtcaggtgc

SEQ ID NO: 41516 - DNA, 20 bp, Human herpesvirus 5
ctggaggtctggcggcagca

SEQ ID NO: 41517 - DNA, 20 bp, Human herpesvirus 5
ccacgccaccgccgccacca

SEQ ID NO: 41518 - DNA, 20 bp, Human herpesvirus 5
cacgccaccgccgccaccac

SEQ ID NO: 41519 - DNA, 20 bp, Human herpesvirus 5
ttcgcgcagcggcgcgtagt

SEQ ID NO: 41520 - DNA, 20 bp, Human herpesvirus 5
gcgcagcggcgcgtagttgc

SEQ ID NO: 41521 - DNA, 20 bp, Human herpesvirus 5
cgcaggccctcctgcacgaa

SEQ ID NO: 41522 - DNA, 20 bp, Human herpesvirus 5
ccgcggcttcgtgcaggagg

SEQ ID NO: 41523 - DNA, 20 bp, Human herpesvirus 5
cgcggcttcgtgcaggaggg

SEQ ID NO: 41524 - DNA, 20 bp, Human herpesvirus 5
ccctcctcctggtgctgctc

SEQ ID NO: 41525 - DNA, 20 bp, Human herpesvirus 5
accacgggcacgcgcagcgg

SEQ ID NO: 41526 - DNA, 20 bp, Human herpesvirus 5
cgcgtggttggagcagcacc

SEQ ID NO: 41527 - DNA, 20 bp, Human herpesvirus 5
gagcagcaccaggaggaggg

SEQ ID NO: 41528 - DNA, 20 bp, Human herpesvirus 5
cgcaatccgaactcgagcat

SEQ ID NO: 41529 - DNA, 20 bp, Human herpesvirus 5
ggattgcgcaactgtcagtt

SEQ ID NO: 41530 - DNA, 20 bp, Human herpesvirus 5
cgcaactgtcagtttctggc

SEQ ID NO: 41531 - DNA, 20 bp, Human herpesvirus 5
ctggcggtgggtcccgacga

SEQ ID NO: 41532 - DNA, 20 bp, Human herpesvirus 5
tggcggtgggtcccgacgac

SEQ ID NO: 41533 - DNA, 20 bp, Human herpesvirus 5
ttccagcgcgctctctaccc

SEQ ID NO: 41534 - DNA, 20 bp, Human herpesvirus 5
tccagcgcgctctctaccca

SEQ ID NO: 41535 - DNA, 20 bp, Human herpesvirus 5
ccagcgcgctctctacccac

SEQ ID NO: 41536 - DNA, 20 bp, Human herpesvirus 5
cagcgcgctctctacccacc

SEQ ID NO: 41537 - DNA, 20 bp, Human herpesvirus 5
ggacgccgacattagcgcgt

SEQ ID NO: 41538 - DNA, 20 bp, Human herpesvirus 5
gcgacacaccttatccaaac

SEQ ID NO: 41539 - DNA, 20 bp, Human herpesvirus 5
tccaaacacaaaatggccgc

SEQ ID NO: 41540 - DNA, 20 bp, Human herpesvirus 5
cacaaaacgcgccgtctcct

SEQ ID NO: 41541 - DNA, 20 bp, Human herpesvirus 5
tgtggaattggccggttgct

SEQ ID NO: 41542 - DNA, 20 bp, Human herpesvirus 5
gtggaattggccggttgctg

SEQ ID NO: 41543 - DNA, 20 bp, Human herpesvirus 5
acaaagctacagcgctcgcg

SEQ ID NO: 41544 - DNA, 20 bp, Human herpesvirus 5
cacgcggaaagttcgcccgc

SEQ ID NO: 41545 - DNA, 20 bp, Human herpesvirus 5
gcccgcgagcgctgtagctt

SEQ ID NO: 41546 - DNA, 20 bp, Human herpesvirus 5
gtcaaccgtcgcatcacgcg

SEQ ID NO: 41547 - DNA, 20 bp, Human herpesvirus 5
tcaaccgtcgcatcacgcgc

SEQ ID NO: 41548 - DNA, 20 bp, Human herpesvirus 5
ccgttctaccacaacggggc

SEQ ID NO: 41549 - DNA, 20 bp, Human herpesvirus 5
taccacaacggggccacgct

SEQ ID NO: 41550 - DNA, 20 bp, Human herpesvirus 5
ccagaagctgttgcagaccc

SEQ ID NO: 41551 - DNA, 20 bp, Human herpesvirus 5
cagaagctgttgcagaccct

SEQ ID NO: 41552 - DNA, 20 bp, Human herpesvirus 5
tggaaagccgtcagcgtggc

SEQ ID NO: 41553 - DNA, 20 bp, Human herpesvirus 5
gtagaacagttgcgcgagct

SEQ ID NO: 41554 - DNA, 20 bp, Human herpesvirus 5
cgcgagctggttcgccgcga

SEQ ID NO: 41555 - DNA, 20 bp, Human herpesvirus 5
gccgcgatcggctgttggcc

SEQ ID NO: 41556 - DNA, 20 bp, Human herpesvirus 5
gccgagaatctgcgcggctt

SEQ ID NO: 41557 - DNA, 20 bp, Human herpesvirus 5
aacgagcgcctgctgagtgt

SEQ ID NO: 41558 - DNA, 20 bp, Human herpesvirus 5
aataggtcgctcgcggccag

SEQ ID NO: 41559 - DNA, 20 bp, Human herpesvirus 5
ataggtcgctcgcggccagg

SEQ ID NO: 41560 - DNA, 20 bp, Human herpesvirus 5
gtagcgcgcacccaggacct

SEQ ID NO: 41561 - DNA, 20 bp, Human herpesvirus 5
gactttctgcggtacgcgca

SEQ ID NO: 41562 - DNA, 20 bp, Human herpesvirus 5
ctgcggtacgcgcacgccaa

SEQ ID NO: 41563 - DNA, 20 bp, Human herpesvirus 5
tgcggtacgcgcacgccaaa

SEQ ID NO: 41564 - DNA, 20 bp, Human herpesvirus 5
ggcgtgcgcgtaccgcagaa

SEQ ID NO: 41565 - DNA, 20 bp, Human herpesvirus 5
gcgtgcgcgtaccgcagaaa

SEQ ID NO: 41566 - DNA, 20 bp, Human herpesvirus 5
ggcgtgcagctgtcgcccgc

SEQ ID NO: 41567 - DNA, 20 bp, Human herpesvirus 5
ctactatgaggccctttttc

SEQ ID NO: 41568 - DNA, 20 bp, Human herpesvirus 5
tactatgaggccctttttct

SEQ ID NO: 41569 - DNA, 20 bp, Human herpesvirus 5
tgaaagcgctgcagccgttg

SEQ ID NO: 41570 - DNA, 20 bp, Human herpesvirus 5
gacgacaacgccaagcagga

SEQ ID NO: 41571 - DNA, 20 bp, Human herpesvirus 5
cccaggcgaaagagttcctg

SEQ ID NO: 41572 - DNA, 20 bp, Human herpesvirus 5
ctgcttggcgttgtcgtcca

SEQ ID NO: 41573 - DNA, 20 bp, Human herpesvirus 5
gcgttgtcgtccaacggctg

SEQ ID NO: 41574 - DNA, 20 bp, Human herpesvirus 5
gtagaggcggcttagcgcga

SEQ ID NO: 41575 - DNA, 20 bp, Human herpesvirus 5
gcgcgagttgcgcgttctgt

SEQ ID NO: 41576 - DNA, 20 bp, Human herpesvirus 5
cgcgttctgtaggcgctgct

SEQ ID NO: 41577 - DNA, 20 bp, Human herpesvirus 5
tgtaggcgctgctgcacttc

SEQ ID NO: 41578 - DNA, 20 bp, Human herpesvirus 5
gggtagctgcaggccgccta

SEQ ID NO: 41579 - DNA, 20 bp, Human herpesvirus 5
ggcctagatcaacgcgccca

SEQ ID NO: 41580 - DNA, 20 bp, Human herpesvirus 5
aaccaggacttgctgtcggc

SEQ ID NO: 41581 - DNA, 20 bp, Human herpesvirus 5
ctgtcggcgctgcagcagct

SEQ ID NO: 41582 - DNA, 20 bp, Human herpesvirus 5
tttgctcagctgctgcagcg

SEQ ID NO: 41583 - DNA, 20 bp, Human herpesvirus 5
ttgctcagctgctgcagcgc

SEQ ID NO: 41584 - DNA, 20 bp, Human herpesvirus 5
tccatcagcgccttggcgtc

SEQ ID NO: 41585 - DNA, 20 bp, Human herpesvirus 5
ccatcagcgccttggcgtcg

SEQ ID NO: 41586 - DNA, 20 bp, Human herpesvirus 5
catcagcgccttggcgtcgg

SEQ ID NO: 41587 - DNA, 20 bp, Human herpesvirus 5
gcgtcgggggtggtcacgtc

SEQ ID NO: 41588 - DNA, 20 bp, Human herpesvirus 5
tgtggcgcgtgaccagatca

SEQ ID NO: 41589 - DNA, 20 bp, Human herpesvirus 5
cgcaaatcaccgcggaccct

SEQ ID NO: 41590 - DNA, 20 bp, Human herpesvirus 5
ctgttgcaggttccggtagt

SEQ ID NO: 41591 - DNA, 20 bp, Human herpesvirus 5
caggttccggtagtgggtcc

SEQ ID NO: 41592 - DNA, 20 bp, Human herpesvirus 5
cggtagtgggtcctgcttcc

SEQ ID NO: 41593 - DNA, 20 bp, Human herpesvirus 5
cgtgatgcgggtgcgtaggg

SEQ ID NO: 41594 - DNA, 20 bp, Human herpesvirus 5
aaccagcgcgcagcctcgac

SEQ ID NO: 41595 - DNA, 20 bp, Human herpesvirus 5
accagcgcgcagcctcgaca

SEQ ID NO: 41596 - DNA, 20 bp, Human herpesvirus 5
gctttccaaacagctgtcgc

SEQ ID NO: 41597 - DNA, 20 bp, Human herpesvirus 5
ccaaacagctgtcgcggtac

SEQ ID NO: 41598 - DNA, 20 bp, Human herpesvirus 5
caaacagctgtcgcggtact

SEQ ID NO: 41599 - DNA, 20 bp, Human herpesvirus 5
gccatgaccgcgccacagca

SEQ ID NO: 41600 - DNA, 20 bp, Human herpesvirus 5
tgctggtgctggctctgctg

SEQ ID NO: 41601 - DNA, 20 bp, Human herpesvirus 5
tcgtactcgccctcgttttc

SEQ ID NO: 41602 - DNA, 20 bp, Human herpesvirus 5
tcgggtccgaaggcgatgag

SEQ ID NO: 41603 - DNA, 20 bp, Human herpesvirus 5
cgggtccgaaggcgatgagc

SEQ ID NO: 41604 - DNA, 20 bp, Human herpesvirus 5
gggtccgaaggcgatgagct

SEQ ID NO: 41605 - DNA, 20 bp, Human herpesvirus 5
aacaccgacgccgaattgga

SEQ ID NO: 41606 - DNA, 20 bp, Human herpesvirus 5
tcctcctctccgtcgtcatc

SEQ ID NO: 41607 - DNA, 20 bp, Human herpesvirus 5
cctcctctccgtcgtcatcg

SEQ ID NO: 41608 - DNA, 20 bp, Human herpesvirus 5
ctcctctccgtcgtcatcgt

SEQ ID NO: 41609 - DNA, 20 bp, Human herpesvirus 5
ctggacgatgacgacggaga

SEQ ID NO: 41610 - DNA, 20 bp, Human herpesvirus 5
tggacgatgacgacggagag

SEQ ID NO: 41611 - DNA, 20 bp, Human herpesvirus 5
ccgcgccctcttctttgccg

SEQ ID NO: 41612 - DNA, 20 bp, Human herpesvirus 5
cgcgccctcttctttgccgg

SEQ ID NO: 41613 - DNA, 20 bp, Human herpesvirus 5
tttgccggctctcctcctct

SEQ ID NO: 41614 - DNA, 20 bp, Human herpesvirus 5
gccggctctcctcctctcct

SEQ ID NO: 41615 - DNA, 20 bp, Human herpesvirus 5
ccggctctcctcctctcctg

SEQ ID NO: 41616 - DNA, 20 bp, Human herpesvirus 5
tcgttggaaacgccgacgcc

SEQ ID NO: 41617 - DNA, 20 bp, Human herpesvirus 5
gaaacgccgacgccgccact

SEQ ID NO: 41618 - DNA, 20 bp, Human herpesvirus 5
tcagcgtcggctccggcagt

SEQ ID NO: 41619 - DNA, 20 bp, Human herpesvirus 5
cagcgtcggctccggcagta

SEQ ID NO: 41620 - DNA, 20 bp, Human herpesvirus 5
agcgtcggctccggcagtag

SEQ ID NO: 41621 - DNA, 20 bp, Human herpesvirus 5
ggtgacacggcaacactatt

SEQ ID NO: 41622 - DNA, 20 bp, Human herpesvirus 5
ccgtgtcacctaacgccgct

SEQ ID NO: 41623 - DNA, 20 bp, Human herpesvirus 5
tgtggcggctatgtttcaga

SEQ ID NO: 41624 - DNA, 20 bp, Human herpesvirus 5
gtgttcgtcgcagttgcgca

SEQ ID NO: 41625 - DNA, 20 bp, Human herpesvirus 5
gtcgcagttgcgcacccgta

SEQ ID NO: 41626 - DNA, 20 bp, Human herpesvirus 5
cgcacccgtaagccgttttc

SEQ ID NO: 41627 - DNA, 20 bp, Human herpesvirus 5
tcgctgccgtcgccgtcctg

SEQ ID NO: 41628 - DNA, 20 bp, Human herpesvirus 5
cgctgccgtcgccgtcctgc

SEQ ID NO: 41629 - DNA, 20 bp, Human herpesvirus 5
cggcggtagctgatacggtg

SEQ ID NO: 41630 - DNA, 20 bp, Human herpesvirus 5
ctgctgttgttgcggtctga

SEQ ID NO: 41631 - DNA, 20 bp, Human herpesvirus 5
ttgcggtctgaaaagcggcc

SEQ ID NO: 41632 - DNA, 20 bp, Human herpesvirus 5
cggtctgaaaagcggccacg

SEQ ID NO: 41633 - DNA, 20 bp, Human herpesvirus 5
tcagaccgcaacaacagcag

SEQ ID NO: 41634 - DNA, 20 bp, Human herpesvirus 5
tgagcgtgcgtgaggagatc

SEQ ID NO: 41635 - DNA, 20 bp, Human herpesvirus 5
gagcgtgcgtgaggagatcc

SEQ ID NO: 41636 - DNA, 20 bp, Human herpesvirus 5
agcgtgcgtgaggagatccc

SEQ ID NO: 41637 - DNA, 20 bp, Human herpesvirus 5
ttcgtggatggctgcgaggc

SEQ ID NO: 41638 - DNA, 20 bp, Human herpesvirus 5
gtggatggctgcgaggcgct

SEQ ID NO: 41639 - DNA, 20 bp, Human herpesvirus 5
ttgagcgccgaaaagacggc

SEQ ID NO: 41640 - DNA, 20 bp, Human herpesvirus 5
agcgccgaaaagacggccac

SEQ ID NO: 41641 - DNA, 20 bp, Human herpesvirus 5
tgccgtgcgcgctaaaggta

SEQ ID NO: 41642 - DNA, 20 bp, Human herpesvirus 5
gccgtgcgcgctaaaggtat

SEQ ID NO: 41643 - DNA, 20 bp, Human herpesvirus 5
ccgtgcgcgctaaaggtatc

SEQ ID NO: 41644 - DNA, 20 bp, Human herpesvirus 5
tggcgggcgtcctcgcacag

SEQ ID NO: 41645 - DNA, 20 bp, Human herpesvirus 5
taccgaggatcacggagacg

SEQ ID NO: 41646 - DNA, 20 bp, Human herpesvirus 5
accgaggatcacggagacgt

SEQ ID NO: 41647 - DNA, 20 bp, Human herpesvirus 5
ccgaggatcacggagacgtg

SEQ ID NO: 41648 - DNA, 20 bp, Human herpesvirus 5
gaggcctacacgcccgaggc

SEQ ID NO: 41649 - DNA, 20 bp, Human herpesvirus 5
ctcgagcgtggtgatcgctc

SEQ ID NO: 41650 - DNA, 20 bp, Human herpesvirus 5
gcggggctcacggtggaggc

SEQ ID NO: 41651 - DNA, 20 bp, Human herpesvirus 5
cggcgtctctgtgcgtacgc

SEQ ID NO: 41652 - DNA, 20 bp, Human herpesvirus 5
ggcgtctctgtgcgtacgcc

SEQ ID NO: 41653 - DNA, 20 bp, Human herpesvirus 5
gtaagaaaagctaaccgcta

SEQ ID NO: 41654 - DNA, 20 bp, Human herpesvirus 5
tcgcgggcgggtgcgtcggc

SEQ ID NO: 41655 - DNA, 20 bp, Human herpesvirus 5
cgcgggcgggtgcgtcggct

SEQ ID NO: 41656 - DNA, 20 bp, Human herpesvirus 5
gcgggcgggtgcgtcggcta

SEQ ID NO: 41657 - DNA, 20 bp, Human herpesvirus 5
gcttttcttacgaattgctg

SEQ ID NO: 41658 - DNA, 20 bp, Human herpesvirus 5
ccttcccgggtctcggacga

SEQ ID NO: 41659 - DNA, 20 bp, Human herpesvirus 5
ccgggtctcggacgagtcga

SEQ ID NO: 41660 - DNA, 20 bp, Human herpesvirus 5
ggttgccgtcgtactgtgat

SEQ ID NO: 41661 - DNA, 20 bp, Human herpesvirus 5
ccgtcgtactgtgattaccg

SEQ ID NO: 41662 - DNA, 20 bp, Human herpesvirus 5
ccgttggcggactgcaccgg

SEQ ID NO: 41663 - DNA, 20 bp, Human herpesvirus 5
gcggactgcaccgggatgat

SEQ ID NO: 41664 - DNA, 20 bp, Human herpesvirus 5
tggggaacctggggtggact

SEQ ID NO: 41665 - DNA, 20 bp, Human herpesvirus 5
cgggaaggcggtggggacct

SEQ ID NO: 41666 - DNA, 20 bp, Human herpesvirus 5
ccgcaagatcatcagccgcg

SEQ ID NO: 41667 - DNA, 20 bp, Human herpesvirus 5
ggtgggcacgcgcttttgaa

SEQ ID NO: 41668 - DNA, 20 bp, Human herpesvirus 5
tgaagaaatagaccgggtgc

SEQ ID NO: 41669 - DNA, 20 bp, Human herpesvirus 5
gaagaaatagaccgggtgcc

SEQ ID NO: 41670 - DNA, 20 bp, Human herpesvirus 5
aagaaatagaccgggtgccg

SEQ ID NO: 41671 - DNA, 20 bp, Human herpesvirus 5
ggctacacgcaccccgaccg

SEQ ID NO: 41672 - DNA, 20 bp, Human herpesvirus 5
cggaggccacggcgcagaag

SEQ ID NO: 41673 - DNA, 20 bp, Human herpesvirus 5
ggaggccacggcgcagaaga

SEQ ID NO: 41674 - DNA, 20 bp, Human herpesvirus 5
tgcgccgtggcctccgaaac

SEQ ID NO: 41675 - DNA, 20 bp, Human herpesvirus 5
ccgcgcgacctgctccgtca

SEQ ID NO: 41676 - DNA, 20 bp, Human herpesvirus 5
cgcgcgacctgctccgtcac

SEQ ID NO: 41677 - DNA, 20 bp, Human herpesvirus 5
gcgcgtacactgcgcttcgg

SEQ ID NO: 41678 - DNA, 20 bp, Human herpesvirus 5
gggcgccgcgtcagcgtcgt

SEQ ID NO: 41679 - DNA, 20 bp, Human herpesvirus 5
ctcgagtaccggcgcgtggt

SEQ ID NO: 41680 - DNA, 20 bp, Human herpesvirus 5
cgacgctgacgcggcgcccg

SEQ ID NO: 41681 - DNA, 20 bp, Human herpesvirus 5
ggctcacattaacaccgtct

SEQ ID NO: 41682 - DNA, 20 bp, Human herpesvirus 5
gctcacattaacaccgtctc

SEQ ID NO: 41683 - DNA, 20 bp, Human herpesvirus 5
acaccgtctcctgtcccacc

SEQ ID NO: 41684 - DNA, 20 bp, Human herpesvirus 5
tgaggttcgaccagcggctg

SEQ ID NO: 41685 - DNA, 20 bp, Human herpesvirus 5
gaccagcggctgctggaaga

SEQ ID NO: 41686 - DNA, 20 bp, Human herpesvirus 5
cctcacgtgcgtaagcggat

SEQ ID NO: 41687 - DNA, 20 bp, Human herpesvirus 5
cgcttaccgatccgcttacg

SEQ ID NO: 41688 - DNA, 20 bp, Human herpesvirus 5
ccgatccgcttacgcacgtg

SEQ ID NO: 41689 - DNA, 20 bp, Human herpesvirus 5
cgcacgtgaggcaatctccg

SEQ ID NO: 41690 - DNA, 20 bp, Human herpesvirus 5
agtgagctgcctcagctgtt

SEQ ID NO: 41691 - DNA, 20 bp, Human herpesvirus 5
ccgcgtctggccgacgacgt

SEQ ID NO: 41692 - DNA, 20 bp, Human herpesvirus 5
tgatcgtcacgtgctggtgc

SEQ ID NO: 41693 - DNA, 20 bp, Human herpesvirus 5
gatcgtcacgtgctggtgcg

SEQ ID NO: 41694 - DNA, 20 bp, Human herpesvirus 5
atcgtcacgtgctggtgcgg

SEQ ID NO: 41695 - DNA, 20 bp, Human herpesvirus 5
tccacaaacgcggcgttctt

SEQ ID NO: 41696 - DNA, 20 bp, Human herpesvirus 5
ccacaaacgcggcgttcttc

SEQ ID NO: 41697 - DNA, 20 bp, Human herpesvirus 5
tcttcgtcgcgggccatcat

SEQ ID NO: 41698 - DNA, 20 bp, Human herpesvirus 5
gtcgcgggccatcatcgttc

SEQ ID NO: 41699 - DNA, 20 bp, Human herpesvirus 5
gctcggtgagcgggtagcga

SEQ ID NO: 41700 - DNA, 20 bp, Human herpesvirus 5
tcgtcaccgtcgctacccgc

SEQ ID NO: 41701 - DNA, 20 bp, Human herpesvirus 5
ctgttgccgcgggacgtagt

SEQ ID NO: 41702 - DNA, 20 bp, Human herpesvirus 5
ccgcgggacgtagtggagca

SEQ ID NO: 41703 - DNA, 20 bp, Human herpesvirus 5
cacgcgcagggccagggaca

SEQ ID NO: 41704 - DNA, 20 bp, Human herpesvirus 5
gttgtcggtcgcgctcccgc

SEQ ID NO: 41705 - DNA, 20 bp, Human herpesvirus 5
tcggtcgcgctcccgctcaa

SEQ ID NO: 41706 - DNA, 20 bp, Human herpesvirus 5
ctccctcggagccggcagag

SEQ ID NO: 41707 - DNA, 20 bp, Human herpesvirus 5
tccctcggagccggcagagg

SEQ ID NO: 41708 - DNA, 20 bp, Human herpesvirus 5
ccgccgctacggctcctcca

SEQ ID NO: 41709 - DNA, 20 bp, Human herpesvirus 5
cgagcccgcgccgtctttgc

SEQ ID NO: 41710 - DNA, 20 bp, Human herpesvirus 5
gcatccgtcttatcccgtgc

SEQ ID NO: 41711 - DNA, 20 bp, Human herpesvirus 5
catccgtcttatcccgtgcc

SEQ ID NO: 41712 - DNA, 20 bp, Human herpesvirus 5
tcccgtgccgccgccaccat

SEQ ID NO: 41713 - DNA, 20 bp, Human herpesvirus 5
gtccgaggacgacgacgacg

SEQ ID NO: 41714 - DNA, 20 bp, Human herpesvirus 5
ccttacggcgtttgttgtgt

SEQ ID NO: 41715 - DNA, 20 bp, Human herpesvirus 5
cttacggcgtttgttgtgtc

SEQ ID NO: 41716 - DNA, 20 bp, Human herpesvirus 5
cggcgtttgttgtgtccgcc

SEQ ID NO: 41717 - DNA, 20 bp, Human herpesvirus 5
gttgtgtccgccgctgcccc

SEQ ID NO: 41718 - DNA, 20 bp, Human herpesvirus 5
ttaccgcttcgacgtctttg

SEQ ID NO: 41719 - DNA, 20 bp, Human herpesvirus 5
ccgcttcgacgtctttgtcc

SEQ ID NO: 41720 - DNA, 20 bp, Human herpesvirus 5
gacgtctttgtccggtcagg

SEQ ID NO: 41721 - DNA, 20 bp, Human herpesvirus 5
gtccggtcaggatcagtgcc

SEQ ID NO: 41722 - DNA, 20 bp, Human herpesvirus 5
tccggtcaggatcagtgccc

SEQ ID NO: 41723 - DNA, 20 bp, Human herpesvirus 5
caaatgaacggcctgatcgc

SEQ ID NO: 41724 - DNA, 20 bp, Human herpesvirus 5
gcacacgatcgggtagcggg

SEQ ID NO: 41725 - DNA, 20 bp, Human herpesvirus 5
atttggaacaccgacagccg

SEQ ID NO: 41726 - DNA, 20 bp, Human herpesvirus 5
ggaacaccgacagccgctag

SEQ ID NO: 41727 - DNA, 20 bp, Human herpesvirus 5
gaacaccgacagccgctagg

SEQ ID NO: 41728 - DNA, 20 bp, Human herpesvirus 5
ttttctgagcctggcgtcag

SEQ ID NO: 41729 - DNA, 20 bp, Human herpesvirus 5
tctgagcctggcgtcaggcg

SEQ ID NO: 41730 - DNA, 20 bp, Human herpesvirus 5
ctgagcctggcgtcaggcgt

SEQ ID NO: 41731 - DNA, 20 bp, Human herpesvirus 5
tgagcctggcgtcaggcgtc

SEQ ID NO: 41732 - DNA, 20 bp, Human herpesvirus 5
ttgaggtccaccagcagtcg

SEQ ID NO: 41733 - DNA, 20 bp, Human herpesvirus 5
gtacgcaggtccaggagtcg

SEQ ID NO: 41734 - DNA, 20 bp, Human herpesvirus 5
cagcgagccgccttccacgt

SEQ ID NO: 41735 - DNA, 20 bp, Human herpesvirus 5
cccgacgcgtgaataacagc

SEQ ID NO: 41736 - DNA, 20 bp, Human herpesvirus 5
ttcacgcgtcgggcaagcag

SEQ ID NO: 41737 - DNA, 20 bp, Human herpesvirus 5
acgcgtcgggcaagcagatg

SEQ ID NO: 41738 - DNA, 20 bp, Human herpesvirus 5
gctggggcagatgcttcggc

SEQ ID NO: 41739 - DNA, 20 bp, Human herpesvirus 5
ggcccgtggggttgtgcacg

SEQ ID NO: 41740 - DNA, 20 bp, Human herpesvirus 5
tgcacgttgaccgacacgtt

SEQ ID NO: 41741 - DNA, 20 bp, Human herpesvirus 5
accgacacgttctccacctc

SEQ ID NO: 41742 - DNA, 20 bp, Human herpesvirus 5
tccacctcgctgcccgtaaa

SEQ ID NO: 41743 - DNA, 20 bp, Human herpesvirus 5
cgacggcgaatgggacgtgg

SEQ ID NO: 41744 - DNA, 20 bp, Human herpesvirus 5
gccgtcgcaacagcagctct

SEQ ID NO: 41745 - DNA, 20 bp, Human herpesvirus 5
catcgcgctggaggacctgc

SEQ ID NO: 41746 - DNA, 20 bp, Human herpesvirus 5
ttcagcgtcaattcgtaagg

SEQ ID NO: 41747 - DNA, 20 bp, Human herpesvirus 5
tcagcgtcaattcgtaaggg

SEQ ID NO: 41748 - DNA, 20 bp, Human herpesvirus 5
cagcgtcaattcgtaaggga

SEQ ID NO: 41749 - DNA, 20 bp, Human herpesvirus 5
agcgtcaattcgtaagggac

SEQ ID NO: 41750 - DNA, 20 bp, Human herpesvirus 5
gtaagggacgcgcacctcca

SEQ ID NO: 41751 - DNA, 20 bp, Human herpesvirus 5
cactcgatgccagcacagcg

SEQ ID NO: 41752 - DNA, 20 bp, Human herpesvirus 5
cgcacgtaggtcatggtcag

SEQ ID NO: 41753 - DNA, 20 bp, Human herpesvirus 5
gccaccatggacatggagag

SEQ ID NO: 41754 - DNA, 20 bp, Human herpesvirus 5
gcgctagaggacagctccat

SEQ ID NO: 41755 - DNA, 20 bp, Human herpesvirus 5
acctcctcgtacgaacggtc

SEQ ID NO: 41756 - DNA, 20 bp, Human herpesvirus 5
cctcctcgtacgaacggtcg

SEQ ID NO: 41757 - DNA, 20 bp, Human herpesvirus 5
atttccagcgccagtggcat

SEQ ID NO: 41758 - DNA, 20 bp, Human herpesvirus 5
tcgctcgaccgttcgtacga

SEQ ID NO: 41759 - DNA, 20 bp, Human herpesvirus 5
gtacgaggaggtaaaggctg

SEQ ID NO: 41760 - DNA, 20 bp, Human herpesvirus 5
tgctctctttcgacgtcgta

SEQ ID NO: 41761 - DNA, 20 bp, Human herpesvirus 5
cgacgtcgtacctgacgtgg

SEQ ID NO: 41762 - DNA, 20 bp, Human herpesvirus 5
gacgtcgtacctgacgtgga

SEQ ID NO: 41763 - DNA, 20 bp, Human herpesvirus 5
taccgaccggcgtttctcct

SEQ ID NO: 41764 - DNA, 20 bp, Human herpesvirus 5
accgaccggcgtttctcctg

SEQ ID NO: 41765 - DNA, 20 bp, Human herpesvirus 5
acgtaagccgatagcggttc

SEQ ID NO: 41766 - DNA, 20 bp, Human herpesvirus 5
ctcagccagttgaccgttgt

SEQ ID NO: 41767 - DNA, 20 bp, Human herpesvirus 5
accgttgttaagtcccggca

SEQ ID NO: 41768 - DNA, 20 bp, Human herpesvirus 5
acaacggtcaactggctgag

SEQ ID NO: 41769 - DNA, 20 bp, Human herpesvirus 5
cgtgaacgcgctgcacgacc

SEQ ID NO: 41770 - DNA, 20 bp, Human herpesvirus 5
ctgctgaaaacgacactcga

SEQ ID NO: 41771 - DNA, 20 bp, Human herpesvirus 5
catggcgggttccgagggtg

SEQ ID NO: 41772 - DNA, 20 bp, Human herpesvirus 5
cgagggtggtccgcgttccg

SEQ ID NO: 41773 - DNA, 20 bp, Human herpesvirus 5
cgtgaaggtctgtagacagg

SEQ ID NO: 41774 - DNA, 20 bp, Human herpesvirus 5
acggaacgcggaccaccctc

SEQ ID NO: 41775 - DNA, 20 bp, Human herpesvirus 5
acgtgcgtcagaaagtcagt

SEQ ID NO: 41776 - DNA, 20 bp, Human herpesvirus 5
aggcaggagctcgagcgccg

SEQ ID NO: 41777 - DNA, 20 bp, Human herpesvirus 5
ggcaggagctcgagcgccga

SEQ ID NO: 41778 - DNA, 20 bp, Human herpesvirus 5
tccatcgcggcggcggcgtg

SEQ ID NO: 41779 - DNA, 20 bp, Human herpesvirus 5
ccactgactttctgacgcac

SEQ ID NO: 41780 - DNA, 20 bp, Human herpesvirus 5
ctgggacccgtggccgtacc

SEQ ID NO: 41781 - DNA, 20 bp, Human herpesvirus 5
ttgcgacggtgaagtggagg

SEQ ID NO: 41782 - DNA, 20 bp, Human herpesvirus 5
tgcgacggtgaagtggaggg

SEQ ID NO: 41783 - DNA, 20 bp, Human herpesvirus 5
gcgacggtgaagtggagggc

SEQ ID NO: 41784 - DNA, 20 bp, Human herpesvirus 5
cgacggtgaagtggagggcc

SEQ ID NO: 41785 - DNA, 20 bp, Human herpesvirus 5
tcgaaaaccacgtggccacg

SEQ ID NO: 41786 - DNA, 20 bp, Human herpesvirus 5
ctctcgctgacggaatggaa

SEQ ID NO: 41787 - DNA, 20 bp, Human herpesvirus 5
cattccgtcagcgagagcaa

SEQ ID NO: 41788 - DNA, 20 bp, Human herpesvirus 5
cgtcagcgagagcaatccgc

SEQ ID NO: 41789 - DNA, 20 bp, Human herpesvirus 5
tcgagaacgtggtaggacag

SEQ ID NO: 41790 - DNA, 20 bp, Human herpesvirus 5
cggcgaacggacacgcgctg

SEQ ID NO: 41791 - DNA, 20 bp, Human herpesvirus 5
ggcgaacggacacgcgctgt

SEQ ID NO: 41792 - DNA, 20 bp, Human herpesvirus 5
caccgcgctcccgacgacga

SEQ ID NO: 41793 - DNA, 20 bp, Human herpesvirus 5
tgacccgcgctcgtcgtcgg

SEQ ID NO: 41794 - DNA, 20 bp, Human herpesvirus 5
gactttacggggcagcagct

SEQ ID NO: 41795 - DNA, 20 bp, Human herpesvirus 5
actttacggggcagcagctg

SEQ ID NO: 41796 - DNA, 20 bp, Human herpesvirus 5
acggggcagcagctgcgccg

SEQ ID NO: 41797 - DNA, 20 bp, Human herpesvirus 5
cggggcagcagctgcgccgg

SEQ ID NO: 41798 - DNA, 20 bp, Human herpesvirus 5
cagcgtctcttcctcctcct

SEQ ID NO: 41799 - DNA, 20 bp, Human herpesvirus 5
tggtcgggcgtgtggtagaa

SEQ ID NO: 41800 - DNA, 20 bp, Human herpesvirus 5
taccacacgcccgaccagaa

SEQ ID NO: 41801 - DNA, 20 bp, Human herpesvirus 5
tgcagtcggtagcaaggaca

SEQ ID NO: 41802 - DNA, 20 bp, Human herpesvirus 5
tccgtgaagctgtgcaggtg

SEQ ID NO: 41803 - DNA, 20 bp, Human herpesvirus 5
acggagaagggcgacgccac

SEQ ID NO: 41804 - DNA, 20 bp, Human herpesvirus 5
ctaccgactgcacaagccca

SEQ ID NO: 41805 - DNA, 20 bp, Human herpesvirus 5
cttgtctccacgacgttcac

SEQ ID NO: 41806 - DNA, 20 bp, Human herpesvirus 5
tctccacgacgttcacgtcc

SEQ ID NO: 41807 - DNA, 20 bp, Human herpesvirus 5
acgtccgggtggctgcaggc

SEQ ID NO: 41808 - DNA, 20 bp, Human herpesvirus 5
acgtcgtccagtgcggcctc

SEQ ID NO: 41809 - DNA, 20 bp, Human herpesvirus 5
cacgagtgggccagcccgag

SEQ ID NO: 41810 - DNA, 20 bp, Human herpesvirus 5
ggggtgcatcatctggtagc

SEQ ID NO: 41811 - DNA, 20 bp, Human herpesvirus 5
cggcacagcgccgccacatt

SEQ ID NO: 41812 - DNA, 20 bp, Human herpesvirus 5
accaatgtggcggcgctgtg

SEQ ID NO: 41813 - DNA, 20 bp, Human herpesvirus 5
ggcggcagcggcgagaggag

SEQ ID NO: 41814 - DNA, 20 bp, Human herpesvirus 5
ttcctctcctctcgccgctg

SEQ ID NO: 41815 - DNA, 20 bp, Human herpesvirus 5
tcctctcctctcgccgctgc

SEQ ID NO: 41816 - DNA, 20 bp, Human herpesvirus 5
cctctcctctcgccgctgcc

SEQ ID NO: 41817 - DNA, 20 bp, Human herpesvirus 5
ctctcctctcgccgctgccg

SEQ ID NO: 41818 - DNA, 20 bp, Human herpesvirus 5
ctcggcgtcaggctcagacg

SEQ ID NO: 41819 - DNA, 20 bp, Human herpesvirus 5
ctccgcctctcctctcagtt

SEQ ID NO: 41820 - DNA, 20 bp, Human herpesvirus 5
ccccgtctcctctccctcaa

SEQ ID NO: 41821 - DNA, 20 bp, Human herpesvirus 5
cccgtctcctctccctcaac

SEQ ID NO: 41822 - DNA, 20 bp, Human herpesvirus 5
agggagaggagacggggaaa

SEQ ID NO: 41823 - DNA, 20 bp, Human herpesvirus 5
ggacaaggagaaccagcgtc

SEQ ID NO: 41824 - DNA, 20 bp, Human herpesvirus 5
tccttgtccgaagccgcgtc

SEQ ID NO: 41825 - DNA, 20 bp, Human herpesvirus 5
tccgaagccgcgtcctcttt

SEQ ID NO: 41826 - DNA, 20 bp, Human herpesvirus 5
ccgacccatgccgctgcaga

SEQ ID NO: 41827 - DNA, 20 bp, Human herpesvirus 5
cgacccatgccgctgcagaa

SEQ ID NO: 41828 - DNA, 20 bp, Human herpesvirus 5
ccccgtagccggcctacggc

SEQ ID NO: 41829 - DNA, 20 bp, Human herpesvirus 5
cccgtagccggcctacggcg

SEQ ID NO: 41830 - DNA, 20 bp, Human herpesvirus 5
tgcagcggcatgggtcggaa

SEQ ID NO: 41831 - DNA, 20 bp, Human herpesvirus 5
ctctttaagcacgccggcgc

SEQ ID NO: 41832 - DNA, 20 bp, Human herpesvirus 5
aagcacgccggcgcggcctg

SEQ ID NO: 41833 - DNA, 20 bp, Human herpesvirus 5
agcacgccggcgcggcctgc

SEQ ID NO: 41834 - DNA, 20 bp, Human herpesvirus 5
gagaacggcaagctcacgca

SEQ ID NO: 41835 - DNA, 20 bp, Human herpesvirus 5
ccgttctccaacgcgcggca

SEQ ID NO: 41836 - DNA, 20 bp, Human herpesvirus 5
acggtgactgccgtcaactg

SEQ ID NO: 41837 - DNA, 20 bp, Human herpesvirus 5
cccgagtaacctggacgcgg

SEQ ID NO: 41838 - DNA, 20 bp, Human herpesvirus 5
ccgaggggaaaggcgacaga

SEQ ID NO: 41839 - DNA, 20 bp, Human herpesvirus 5
gtaccttctctgtcgccttt

SEQ ID NO: 41840 - DNA, 20 bp, Human herpesvirus 5
taccttctctgtcgcctttc

SEQ ID NO: 41841 - DNA, 20 bp, Human herpesvirus 5
ctcctcggacgaaggggagg

SEQ ID NO: 41842 - DNA, 20 bp, Human herpesvirus 5
tgttgccgctcctcgttatc

SEQ ID NO: 41843 - DNA, 20 bp, Human herpesvirus 5
ccgctcctcgttatcgtcat

SEQ ID NO: 41844 - DNA, 20 bp, Human herpesvirus 5
tcgtcatcctccccgtcgtc

SEQ ID NO: 41845 - DNA, 20 bp, Human herpesvirus 5
gtccgaggaggaagtcggag

SEQ ID NO: 41846 - DNA, 20 bp, Human herpesvirus 5
gtcttttccacgtagccaag

SEQ ID NO: 41847 - DNA, 20 bp, Human herpesvirus 5
tccacgtagccaagctagtg

SEQ ID NO: 41848 - DNA, 20 bp, Human herpesvirus 5
ccacgtagccaagctagtgg

SEQ ID NO: 41849 - DNA, 20 bp, Human herpesvirus 5
cacgtagccaagctagtggt

SEQ ID NO: 41850 - DNA, 20 bp, Human herpesvirus 5
gggatacgagccgatgacca

SEQ ID NO: 41851 - DNA, 20 bp, Human herpesvirus 5
cgcgtcggcactcacaagta

SEQ ID NO: 41852 - DNA, 20 bp, Human herpesvirus 5
gcgtcggcactcacaagtat

SEQ ID NO: 41853 - DNA, 20 bp, Human herpesvirus 5
gaggtgcgcgaggtgtgttt

SEQ ID NO: 41854 - DNA, 20 bp, Human herpesvirus 5
aggtgcgcgaggtgtgtttt

SEQ ID NO: 41855 - DNA, 20 bp, Human herpesvirus 5
tgagtgccgacgcgaaacga

SEQ ID NO: 41856 - DNA, 20 bp, Human herpesvirus 5
aagagagcgcgcccggcgtg

SEQ ID NO: 41857 - DNA, 20 bp, Human herpesvirus 5
gtctggggcgacgagcggtt

SEQ ID NO: 41858 - DNA, 20 bp, Human herpesvirus 5
aagggacccaccaaccgctc

SEQ ID NO: 41859 - DNA, 20 bp, Human herpesvirus 5
aacacgacaggtgggacccg

SEQ ID NO: 41860 - DNA, 20 bp, Human herpesvirus 5
tcggccttgacgatgccgca

SEQ ID NO: 41861 - DNA, 20 bp, Human herpesvirus 5
acgatgccgcagcggtgttt

SEQ ID NO: 41862 - DNA, 20 bp, Human herpesvirus 5
gagccgcagatccgagagcc

SEQ ID NO: 41863 - DNA, 20 bp, Human herpesvirus 5
agccgcagatccgagagcct

SEQ ID NO: 41864 - DNA, 20 bp, Human herpesvirus 5
ggtctcgagcaaaaacacgg

SEQ ID NO: 41865 - DNA, 20 bp, Human herpesvirus 5
tcgccgcgcaccgtaaagtc

SEQ ID NO: 41866 - DNA, 20 bp, Human herpesvirus 5
cggctccatgatcatcacat

SEQ ID NO: 41867 - DNA, 20 bp, Human herpesvirus 5
cactagacagaatgtgatga

SEQ ID NO: 41868 - DNA, 20 bp, Human herpesvirus 5
actagacagaatgtgatgat

SEQ ID NO: 41869 - DNA, 20 bp, Human herpesvirus 5
acggtgcgcggcgacaagct

SEQ ID NO: 41870 - DNA, 20 bp, Human herpesvirus 5
acaggaaaggtattgagcaa

SEQ ID NO: 41871 - DNA, 20 bp, Human herpesvirus 5
agcaactggcagatcttttg

SEQ ID NO: 41872 - DNA, 20 bp, Human herpesvirus 5
tggtggcggcagagcccgtc

SEQ ID NO: 41873 - DNA, 20 bp, Human herpesvirus 5
ggtggcggcagagcccgtcg

SEQ ID NO: 41874 - DNA, 20 bp, Human herpesvirus 5
gtggcggcagagcccgtcgt

SEQ ID NO: 41875 - DNA, 20 bp, Human herpesvirus 5
gtccagcgcgcggtagggaa

SEQ ID NO: 41876 - DNA, 20 bp, Human herpesvirus 5
cactcctcggccacgcgccg

SEQ ID NO: 41877 - DNA, 20 bp, Human herpesvirus 5
cacgcggcgttgtttcccta

SEQ ID NO: 41878 - DNA, 20 bp, Human herpesvirus 5
tttccctaccgcgcgctgga

SEQ ID NO: 41879 - DNA, 20 bp, Human herpesvirus 5
ccctaccgcgcgctggacga

SEQ ID NO: 41880 - DNA, 20 bp, Human herpesvirus 5
aatatgtgggagcgcaaggc

SEQ ID NO: 41881 - DNA, 20 bp, Human herpesvirus 5
ggcctccgccgcggccgcgg

SEQ ID NO: 41882 - DNA, 20 bp, Human herpesvirus 5
cgctcccacatatttaagca

SEQ ID NO: 41883 - DNA, 20 bp, Human herpesvirus 5
aagcatttgtccacgatgtc

SEQ ID NO: 41884 - DNA, 20 bp, Human herpesvirus 5
agcatttgtccacgatgtcg

SEQ ID NO: 41885 - DNA, 20 bp, Human herpesvirus 5
ttttactacttttacaacgc

SEQ ID NO: 41886 - DNA, 20 bp, Human herpesvirus 5
tttactacttttacaacgcc

SEQ ID NO: 41887 - DNA, 20 bp, Human herpesvirus 5
ttactacttttacaacgccc

SEQ ID NO: 41888 - DNA, 20 bp, Human herpesvirus 5
tactacttttacaacgccct

SEQ ID NO: 41889 - DNA, 20 bp, Human herpesvirus 5
actacttttacaacgccctg

SEQ ID NO: 41890 - DNA, 20 bp, Human herpesvirus 5
gacaggcaggggatgtcgtg

SEQ ID NO: 41891 - DNA, 20 bp, Human herpesvirus 5
gccatgttccatccgttgag

SEQ ID NO: 41892 - DNA, 20 bp, Human herpesvirus 5
cgcgacatttttctcaagcg

SEQ ID NO: 41893 - DNA, 20 bp, Human herpesvirus 5
ttctcaagcgctaccagctc

SEQ ID NO: 41894 - DNA, 20 bp, Human herpesvirus 5
tctcaagcgctaccagctca

SEQ ID NO: 41895 - DNA, 20 bp, Human herpesvirus 5
ctcaagcgctaccagctcat

SEQ ID NO: 41896 - DNA, 20 bp, Human herpesvirus 5
tcaagcgctaccagctcatg

SEQ ID NO: 41897 - DNA, 20 bp, Human herpesvirus 5
cgcatgtgtcgccggcgcag

SEQ ID NO: 41898 - DNA, 20 bp, Human herpesvirus 5
gcatgtgtcgccggcgcaga

SEQ ID NO: 41899 - DNA, 20 bp, Human herpesvirus 5
tcgctggtgtagccctcgag

SEQ ID NO: 41900 - DNA, 20 bp, Human herpesvirus 5
gtcgagtcggcgcagggcaa

SEQ ID NO: 41901 - DNA, 20 bp, Human herpesvirus 5
ccctgcgccgactcgacgaa

SEQ ID NO: 41902 - DNA, 20 bp, Human herpesvirus 5
ctcagcgtctgccagcctaa

SEQ ID NO: 41903 - DNA, 20 bp, Human herpesvirus 5
agcagcagcacgccgcgtcg

SEQ ID NO: 41904 - DNA, 20 bp, Human herpesvirus 5
accgtggtgcacggacagcc

SEQ ID NO: 41905 - DNA, 20 bp, Human herpesvirus 5
ggctggcagacgctgagtaa

SEQ ID NO: 41906 - DNA, 20 bp, Human herpesvirus 5
cgggccctgctgacgctgtt

SEQ ID NO: 41907 - DNA, 20 bp, Human herpesvirus 5
agctcggacacagcgccgcg

SEQ ID NO: 41908 - DNA, 20 bp, Human herpesvirus 5
atgtgccgccgcccggattg

SEQ ID NO: 41909 - DNA, 20 bp, Human herpesvirus 5
cggcttctctttctcacctg

SEQ ID NO: 41910 - DNA, 20 bp, Human herpesvirus 5
tctttctcacctggaccggt

SEQ ID NO: 41911 - DNA, 20 bp, Human herpesvirus 5
ctcacctggaccggtgatac

SEQ ID NO: 41912 - DNA, 20 bp, Human herpesvirus 5
tcacctggaccggtgatact

SEQ ID NO: 41913 - DNA, 20 bp, Human herpesvirus 5
gtcgtggcggcggcagcggt

SEQ ID NO: 41914 - DNA, 20 bp, Human herpesvirus 5
tcgtggcggcggcagcggtg

SEQ ID NO: 41915 - DNA, 20 bp, Human herpesvirus 5
ccagtaccaccgctgccgcc

SEQ ID NO: 41916 - DNA, 20 bp, Human herpesvirus 5
ggatcctggtgaaagaattt

SEQ ID NO: 41917 - DNA, 20 bp, Human herpesvirus 5
aaattctttcaccaggatcc

SEQ ID NO: 41918 - DNA, 20 bp, Human herpesvirus 5
tttcaccaggatcccaaccg

SEQ ID NO: 41919 - DNA, 20 bp, Human herpesvirus 5
caccaggatcccaaccgcgt

SEQ ID NO: 41920 - DNA, 20 bp, Human herpesvirus 5
accaggatcccaaccgcgtt

SEQ ID NO: 41921 - DNA, 20 bp, Human herpesvirus 5
ccgtgtgacgagacggcgtg

SEQ ID NO: 41922 - DNA, 20 bp, Human herpesvirus 5
cgtgctggcgatcgcgctcg

SEQ ID NO: 41923 - DNA, 20 bp, Human herpesvirus 5
cgctcttgggcgacatgcac

SEQ ID NO: 41924 - DNA, 20 bp, Human herpesvirus 5
ctccccccgcccgtacatcc

SEQ ID NO: 41925 - DNA, 20 bp, Human herpesvirus 5
tccccccgcccgtacatccc

SEQ ID NO: 41926 - DNA, 20 bp, Human herpesvirus 5
tgcatcgcccatctacccac

SEQ ID NO: 41927 - DNA, 20 bp, Human herpesvirus 5
tcagacacataccctaccgc

SEQ ID NO: 41928 - DNA, 20 bp, Human herpesvirus 5
cagacacataccctaccgcc

SEQ ID NO: 41929 - DNA, 20 bp, Human herpesvirus 5
agacacataccctaccgcca

SEQ ID NO: 41930 - DNA, 20 bp, Human herpesvirus 5
tgcggcacactggtggtggt

SEQ ID NO: 41931 - DNA, 20 bp, Human herpesvirus 5
ctcctaacagtggaggccag

SEQ ID NO: 41932 - DNA, 20 bp, Human herpesvirus 5
aagaccagggggtcgcctcg

SEQ ID NO: 41933 - DNA, 20 bp, Human herpesvirus 5
gactactgagctaccgaggc

SEQ ID NO: 41934 - DNA, 20 bp, Human herpesvirus 5
aagcacactttctcgggtgt

SEQ ID NO: 41935 - DNA, 20 bp, Human herpesvirus 5
ctcgggtgtgcgtcgaccct

SEQ ID NO: 41936 - DNA, 20 bp, Human herpesvirus 5
tcgggtgtgcgtcgaccctt

SEQ ID NO: 41937 - DNA, 20 bp, Human herpesvirus 5
tgccgattgagcaacactgt

SEQ ID NO: 41938 - DNA, 20 bp, Human herpesvirus 5
gccgattgagcaacactgtt

SEQ ID NO: 41939 - DNA, 20 bp, Human herpesvirus 5
ccgattgagcaacactgttg

SEQ ID NO: 41940 - DNA, 20 bp, Human herpesvirus 5
agcaacactgttggcatctc

SEQ ID NO: 41941 - DNA, 20 bp, Human herpesvirus 5
gcatctctcactccgatagg

SEQ ID NO: 41942 - DNA, 20 bp, Human herpesvirus 5
ctgtcgttgcttgtgatgtt

SEQ ID NO: 41943 - DNA, 20 bp, Human herpesvirus 5
cttgtgatgttggacgcctg

SEQ ID NO: 41944 - DNA, 20 bp, Human herpesvirus 5
tgatgttggacgcctggagt

SEQ ID NO: 41945 - DNA, 20 bp, Human herpesvirus 5
gacgcctggagtggaaaagt

SEQ ID NO: 41946 - DNA, 20 bp, Human herpesvirus 5
ttaggcgcgcatacggtatt

SEQ ID NO: 41947 - DNA, 20 bp, Human herpesvirus 5
gtcgggccggctgagcgtct

SEQ ID NO: 41948 - DNA, 20 bp, Human herpesvirus 5
ctgcacgccggcgttaggtc

SEQ ID NO: 41949 - DNA, 20 bp, Human herpesvirus 5
ggtcgctactcgctgggaga

SEQ ID NO: 41950 - DNA, 20 bp, Human herpesvirus 5
ctctccctcggcgaccaaca

SEQ ID NO: 41951 - DNA, 20 bp, Human herpesvirus 5
gtcgccgagggagagcaagt

SEQ ID NO: 41952 - DNA, 20 bp, Human herpesvirus 5
ccatcccctgcacggtcatg

SEQ ID NO: 41953 - DNA, 20 bp, Human herpesvirus 5
tgtacagcactcgcgcggga

SEQ ID NO: 41954 - DNA, 20 bp, Human herpesvirus 5
gtacagcactcgcgcgggaa

SEQ ID NO: 41955 - DNA, 20 bp, Human herpesvirus 5
tacagcactcgcgcgggaac

SEQ ID NO: 41956 - DNA, 20 bp, Human herpesvirus 5
cgtagcgggagatacggcgt

SEQ ID NO: 41957 - DNA, 20 bp, Human herpesvirus 5
tcccgcgggccacttacttg

SEQ ID NO: 41958 - DNA, 20 bp, Human herpesvirus 5
ccccgccagcacctccgccg

SEQ ID NO: 41959 - DNA, 20 bp, Human herpesvirus 5
ctatcgtcgccggtttcggg

SEQ ID NO: 41960 - DNA, 20 bp, Human herpesvirus 5
cgggcgatgacagcgccggc

SEQ ID NO: 41961 - DNA, 20 bp, Human herpesvirus 5
gggcgatgacagcgccggcg

SEQ ID NO: 41962 - DNA, 20 bp, Human herpesvirus 5
ccggcggaggtgctggcggg

SEQ ID NO: 41963 - DNA, 20 bp, Human herpesvirus 5
cgcggtggcttttgtggcgt

SEQ ID NO: 41964 - DNA, 20 bp, Human herpesvirus 5
tgtggcgtcggcgttttcgg

SEQ ID NO: 41965 - DNA, 20 bp, Human herpesvirus 5
gtggcgtcggcgttttcggg

SEQ ID NO: 41966 - DNA, 20 bp, Human herpesvirus 5
tggcgtcggcgttttcggga

SEQ ID NO: 41967 - DNA, 20 bp, Human herpesvirus 5
tcgggaagggcctgggcgtc

SEQ ID NO: 41968 - DNA, 20 bp, Human herpesvirus 5
ccgtgatcgcgtcgtgcgcg

SEQ ID NO: 41969 - DNA, 20 bp, Human herpesvirus 5
tattattgcgatgagaggga

SEQ ID NO: 41970 - DNA, 20 bp, Human herpesvirus 5
attattgcgatgagagggag

SEQ ID NO: 41971 - DNA, 20 bp, Human herpesvirus 5
ttattgcgatgagagggagg

SEQ ID NO: 41972 - DNA, 20 bp, Human herpesvirus 5
ttgcgatgagagggaggatg

SEQ ID NO: 41973 - DNA, 20 bp, Human herpesvirus 5
gcctgatggtggaagtcggc

SEQ ID NO: 41974 - DNA, 20 bp, Human herpesvirus 5
gaccttcgtgcgttgtctcg

SEQ ID NO: 41975 - DNA, 20 bp, Human herpesvirus 5
gtgcgttgtctcgcctatca

SEQ ID NO: 41976 - DNA, 20 bp, Human herpesvirus 5
tctcgcctatcagcgttcct

SEQ ID NO: 41977 - DNA, 20 bp, Human herpesvirus 5
cttccccgtgcttacagcct

SEQ ID NO: 41978 - DNA, 20 bp, Human herpesvirus 5
ggcaccgcgtggcgtacctc

SEQ ID NO: 41979 - DNA, 20 bp, Human herpesvirus 5
gatggtccacgacgtcgcga

SEQ ID NO: 41980 - DNA, 20 bp, Human herpesvirus 5
agtccgggtttcgcgtccag

SEQ ID NO: 41981 - DNA, 20 bp, Human herpesvirus 5
cgcgtccagtcggacgtgtg

SEQ ID NO: 41982 - DNA, 20 bp, Human herpesvirus 5
gcgtccagtcggacgtgtga

SEQ ID NO: 41983 - DNA, 20 bp, Human herpesvirus 5
ggcaacggaacggcgtttca

SEQ ID NO: 41984 - DNA, 20 bp, Human herpesvirus 5
cactgccaaaattgtatcgg

SEQ ID NO: 41985 - DNA, 20 bp, Human herpesvirus 5
aaggaagccctctgggatgt

SEQ ID NO: 41986 - DNA, 20 bp, Human herpesvirus 5
gaagtgccgcgttgggcgtg

SEQ ID NO: 41987 - DNA, 20 bp, Human herpesvirus 5
ggcgtggcagggctggaaga

SEQ ID NO: 41988 - DNA, 20 bp, Human herpesvirus 5
cgccacctcttccagccctg

SEQ ID NO: 41989 - DNA, 20 bp, Human herpesvirus 5
cagccctgccacgcccaacg

SEQ ID NO: 41990 - DNA, 20 bp, Human herpesvirus 5
aacgtctgtggttggcagcc

SEQ ID NO: 41991 - DNA, 20 bp, Human herpesvirus 5
gcagccaggggctgggtgtg

SEQ ID NO: 41992 - DNA, 20 bp, Human herpesvirus 5
cacaccggtttcgcacaccc

SEQ ID NO: 41993 - DNA, 20 bp, Human herpesvirus 5
cgcacacccagcccctggct

SEQ ID NO: 41994 - DNA, 20 bp, Human herpesvirus 5
gcacacccagcccctggctg

SEQ ID NO: 41995 - DNA, 20 bp, Human herpesvirus 5
tgagcagacgacgttggatg

SEQ ID NO: 41996 - DNA, 20 bp, Human herpesvirus 5
gatgcgggacgtcggagcac

SEQ ID NO: 41997 - DNA, 20 bp, Human herpesvirus 5
cgcgtgttcctccgggttcc

SEQ ID NO: 41998 - DNA, 20 bp, Human herpesvirus 5
ctccgggttcctgccttttc

SEQ ID NO: 41999 - DNA, 20 bp, Human herpesvirus 5
ctgccttttccagtcgagtg

SEQ ID NO: 42000 - DNA, 20 bp, Human herpesvirus 5
tccagtcgagtgcgtcgtcg

SEQ ID NO: 42001 - DNA, 20 bp, Human herpesvirus 5
ccagtcgagtgcgtcgtcgg

SEQ ID NO: 42002 - DNA, 20 bp, Human herpesvirus 5
ggtcctcggggacagccgac

SEQ ID NO: 42003 - DNA, 20 bp, Human herpesvirus 5
cggcgcctcgtcgttgagtg

SEQ ID NO: 42004 - DNA, 20 bp, Human herpesvirus 5
ggcgcctcgtcgttgagtgg

SEQ ID NO: 42005 - DNA, 20 bp, Human herpesvirus 5
agtggccttcagcagtctgc

SEQ ID NO: 42006 - DNA, 20 bp, Human herpesvirus 5
agcagtctgcgttgttttat

SEQ ID NO: 42007 - DNA, 20 bp, Human herpesvirus 5
tccccgactccgcggtccgc

SEQ ID NO: 42008 - DNA, 20 bp, Human herpesvirus 5
gtgacggcgatcagcagccg

SEQ ID NO: 42009 - DNA, 20 bp, Human herpesvirus 5
gttctcctccacccgaaagt

SEQ ID NO: 42010 - DNA, 20 bp, Human herpesvirus 5
tcctccacccgaaagtgggc

SEQ ID NO: 42011 - DNA, 20 bp, Human herpesvirus 5
gatctccgataccaccacat

SEQ ID NO: 42012 - DNA, 20 bp, Human herpesvirus 5
atctccgataccaccacatt

SEQ ID NO: 42013 - DNA, 20 bp, Human herpesvirus 5
aggggccggggcaccgagtc

SEQ ID NO: 42014 - DNA, 20 bp, Human herpesvirus 5
caacaccgggacttttcaca

SEQ ID NO: 42015 - DNA, 20 bp, Human herpesvirus 5
aacaccgggacttttcacac

SEQ ID NO: 42016 - DNA, 20 bp, Human herpesvirus 5
tcacacggtgatttcggcac

SEQ ID NO: 42017 - DNA, 20 bp, Human herpesvirus 5
cacacggtgatttcggcacc

SEQ ID NO: 42018 - DNA, 20 bp, Human herpesvirus 5
acacggtgatttcggcaccg

SEQ ID NO: 42019 - DNA, 20 bp, Human herpesvirus 5
gtggtcgtgtcgcgacatgg

SEQ ID NO: 42020 - DNA, 20 bp, Human herpesvirus 5
cgaaacggcgattatatatg

SEQ ID NO: 42021 - DNA, 20 bp, Human herpesvirus 5
tatatgttctcaacaatacc

SEQ ID NO: 42022 - DNA, 20 bp, Human herpesvirus 5
tcaacaataccgccctacgt

SEQ ID NO: 42023 - DNA, 20 bp, Human herpesvirus 5
tatgatgtaacgtgtgacgt

SEQ ID NO: 42024 - DNA, 20 bp, Human herpesvirus 5
catcatacaacgtagggcgg

SEQ ID NO: 42025 - DNA, 20 bp, Human herpesvirus 5
ccacgcacaagccaggcggc

SEQ ID NO: 42026 - DNA, 20 bp, Human herpesvirus 5
ggacacggaactggagacac

SEQ ID NO: 42027 - DNA, 20 bp, Human herpesvirus 5
cgtgtccgaatgttacgtcc

SEQ ID NO: 42028 - DNA, 20 bp, Human herpesvirus 5
cgtccagcacggggtactcg

SEQ ID NO: 42029 - DNA, 20 bp, Human herpesvirus 5
tgcgtggcaacttctccgat

SEQ ID NO: 42030 - DNA, 20 bp, Human herpesvirus 5
gggtagcagagtagtttcgg

SEQ ID NO: 42031 - DNA, 20 bp, Human herpesvirus 5
cggggtcggtttccttccgg

SEQ ID NO: 42032 - DNA, 20 bp, Human herpesvirus 5
ggggtcggtttccttccggc

SEQ ID NO: 42033 - DNA, 20 bp, Human herpesvirus 5
ccttccggcgacgacagttc

SEQ ID NO: 42034 - DNA, 20 bp, Human herpesvirus 5
cttccggcgacgacagttcc

SEQ ID NO: 42035 - DNA, 20 bp, Human herpesvirus 5
ggatgaggctggaaacgccg

SEQ ID NO: 42036 - DNA, 20 bp, Human herpesvirus 5
agcccggcggtggtgaacga

SEQ ID NO: 42037 - DNA, 20 bp, Human herpesvirus 5
gcactgtatgtggcgcttct

SEQ ID NO: 42038 - DNA, 20 bp, Human herpesvirus 5
cactgtatgtggcgcttctc

SEQ ID NO: 42039 - DNA, 20 bp, Human herpesvirus 5
tctcgttcaccaccgccggg

SEQ ID NO: 42040 - DNA, 20 bp, Human herpesvirus 5
cagcgtactcattagcgcgc

SEQ ID NO: 42041 - DNA, 20 bp, Human herpesvirus 5
agcgtactcattagcgcgct

SEQ ID NO: 42042 - DNA, 20 bp, Human herpesvirus 5
gcgcgctggtttggctgggt

SEQ ID NO: 42043 - DNA, 20 bp, Human herpesvirus 5
ggctgggttacccctcactg

SEQ ID NO: 42044 - DNA, 20 bp, Human herpesvirus 5
gctgggttacccctcactgg

SEQ ID NO: 42045 - DNA, 20 bp, Human herpesvirus 5
gatcccggggggcacgtaga

SEQ ID NO: 42046 - DNA, 20 bp, Human herpesvirus 5
aaaccctttttctcttctca

SEQ ID NO: 42047 - DNA, 20 bp, Human herpesvirus 5
caagtacccaccgatggcac

SEQ ID NO: 42048 - DNA, 20 bp, Human herpesvirus 5
aagtacccaccgatggcacg

SEQ ID NO: 42049 - DNA, 20 bp, Human herpesvirus 5
cgctgagcgagaaccggtcg

SEQ ID NO: 42050 - DNA, 20 bp, Human herpesvirus 5
gctgagcgagaaccggtcgc

SEQ ID NO: 42051 - DNA, 20 bp, Human herpesvirus 5
gtgtatttccgctatgagcg

SEQ ID NO: 42052 - DNA, 20 bp, Human herpesvirus 5
ccgctatgagcgaccggttc

SEQ ID NO: 42053 - DNA, 20 bp, Human herpesvirus 5
cgctatgagcgaccggttct

SEQ ID NO: 42054 - DNA, 20 bp, Human herpesvirus 5
gacgcgcggtcatatagcct

SEQ ID NO: 42055 - DNA, 20 bp, Human herpesvirus 5
cccaccgcgacccagcgaca

SEQ ID NO: 42056 - DNA, 20 bp, Human herpesvirus 5
ccaccgcgacccagcgacag

SEQ ID NO: 42057 - DNA, 20 bp, Human herpesvirus 5
atcgcgtttgccgtgcagca

SEQ ID NO: 42058 - DNA, 20 bp, Human herpesvirus 5
gccgtgcagcagggccaaac

SEQ ID NO: 42059 - DNA, 20 bp, Human herpesvirus 5
ccgtgcagcagggccaaaca

SEQ ID NO: 42060 - DNA, 20 bp, Human herpesvirus 5
ggccctgctgcacggcaaac

SEQ ID NO: 42061 - DNA, 20 bp, Human herpesvirus 5
gccctgctgcacggcaaacg

SEQ ID NO: 42062 - DNA, 20 bp, Human herpesvirus 5
tagcgggacgacatgaagca

SEQ ID NO: 42063 - DNA, 20 bp, Human herpesvirus 5
tataggcattaggacttccc

SEQ ID NO: 42064 - DNA, 20 bp, Human herpesvirus 5
ataggcattaggacttcccc

SEQ ID NO: 42065 - DNA, 20 bp, Human herpesvirus 5
taggcattaggacttccccg

SEQ ID NO: 42066 - DNA, 20 bp, Human herpesvirus 5
ggacttccccgtcgtactgg

SEQ ID NO: 42067 - DNA, 20 bp, Human herpesvirus 5
gcagagcgagcgtgaggaac

SEQ ID NO: 42068 - DNA, 20 bp, Human herpesvirus 5
ccagcgacgtcggtcacggc

SEQ ID NO: 42069 - DNA, 20 bp, Human herpesvirus 5
cagcgacgtcggtcacggcc

SEQ ID NO: 42070 - DNA, 20 bp, Human herpesvirus 5
ctaggtggccgtgaccgacg

SEQ ID NO: 42071 - DNA, 20 bp, Human herpesvirus 5
taggtggccgtgaccgacgt

SEQ ID NO: 42072 - DNA, 20 bp, Human herpesvirus 5
tgctcgccggccgcgctgta

SEQ ID NO: 42073 - DNA, 20 bp, Human herpesvirus 5
gctcgccggccgcgctgtaa

SEQ ID NO: 42074 - DNA, 20 bp, Human herpesvirus 5
ctcgccggccgcgctgtaac

SEQ ID NO: 42075 - DNA, 20 bp, Human herpesvirus 5
ctctgtggtcggcgagtctt

SEQ ID NO: 42076 - DNA, 20 bp, Human herpesvirus 5
tctgtggtcggcgagtcttc

SEQ ID NO: 42077 - DNA, 20 bp, Human herpesvirus 5
gcgcatcactaggaaccagt

SEQ ID NO: 42078 - DNA, 20 bp, Human herpesvirus 5
gcggggttgcgcagtgctac

SEQ ID NO: 42079 - DNA, 20 bp, Human herpesvirus 5
cgcagtgctacggtggttcc

SEQ ID NO: 42080 - DNA, 20 bp, Human herpesvirus 5
cctggtggcgctgcacgtag

SEQ ID NO: 42081 - DNA, 20 bp, Human herpesvirus 5
ctagtgatgcgcgaacaggc

SEQ ID NO: 42082 - DNA, 20 bp, Human herpesvirus 5
actttaccatgttcgacagc

SEQ ID NO: 42083 - DNA, 20 bp, Human herpesvirus 5
accatgttcgacagcggcgt

SEQ ID NO: 42084 - DNA, 20 bp, Human herpesvirus 5
ccatgttcgacagcggcgta

SEQ ID NO: 42085 - DNA, 20 bp, Human herpesvirus 5
gacagcggcgtagaccgcga

SEQ ID NO: 42086 - DNA, 20 bp, Human herpesvirus 5
gccaacgcaggcggccaacg

SEQ ID NO: 42087 - DNA, 20 bp, Human herpesvirus 5
gccgcctgcgttggcgaaca

SEQ ID NO: 42088 - DNA, 20 bp, Human herpesvirus 5
tgcggaatgccgagcgacaa

SEQ ID NO: 42089 - DNA, 20 bp, Human herpesvirus 5
cggacccagtcgcgaagcac

SEQ ID NO: 42090 - DNA, 20 bp, Human herpesvirus 5
gcgactgggtccgtaaccac

SEQ ID NO: 42091 - DNA, 20 bp, Human herpesvirus 5
tcgctcggcattccgcacaa

SEQ ID NO: 42092 - DNA, 20 bp, Human herpesvirus 5
cgcacaactggttcctgcag

SEQ ID NO: 42093 - DNA, 20 bp, Human herpesvirus 5
cgcgacactctcagccggac

SEQ ID NO: 42094 - DNA, 20 bp, Human herpesvirus 5
tggccctgacggcgctgcag

SEQ ID NO: 42095 - DNA, 20 bp, Human herpesvirus 5
tgccgccggagctccccgcg

SEQ ID NO: 42096 - DNA, 20 bp, Human herpesvirus 5
cctgctgttggctacctctc

SEQ ID NO: 42097 - DNA, 20 bp, Human herpesvirus 5
gctacctctcggatttcaaa

SEQ ID NO: 42098 - DNA, 20 bp, Human herpesvirus 5
caaaaaagagcacgtgccga

SEQ ID NO: 42099 - DNA, 20 bp, Human herpesvirus 5
aaaaaagagcacgtgccgat

SEQ ID NO: 42100 - DNA, 20 bp, Human herpesvirus 5
tttgaaatccgagaggtagc

SEQ ID NO: 42101 - DNA, 20 bp, Human herpesvirus 5
cgtggttagcagcggcgtgc

SEQ ID NO: 42102 - DNA, 20 bp, Human herpesvirus 5
gcagcggcgtgcgcatctgc

SEQ ID NO: 42103 - DNA, 20 bp, Human herpesvirus 5
cactgcgaggccatctacgg

SEQ ID NO: 42104 - DNA, 20 bp, Human herpesvirus 5
ccgggatacgagcacgcttc

SEQ ID NO: 42105 - DNA, 20 bp, Human herpesvirus 5
cgagggctggcggttttgca

SEQ ID NO: 42106 - DNA, 20 bp, Human herpesvirus 5
ccgtcgattgcaaaaccgcc

SEQ ID NO: 42107 - DNA, 20 bp, Human herpesvirus 5
caaaaccgccagccctcgga

SEQ ID NO: 42108 - DNA, 20 bp, Human herpesvirus 5
cgcggtgggggcgtgccccg

SEQ ID NO: 42109 - DNA, 20 bp, Human herpesvirus 5
gttcggcgttcaggccttaa

SEQ ID NO: 42110 - DNA, 20 bp, Human herpesvirus 5
ggcgttcaggccttaatact

SEQ ID NO: 42111 - DNA, 20 bp, Human herpesvirus 5
aggcctgaacgccgaacgaa

SEQ ID NO: 42112 - DNA, 20 bp, Human herpesvirus 5
ctggcgccgccttggggccg

SEQ ID NO: 42113 - DNA, 20 bp, Human herpesvirus 5
gggccgtgcagtctggaagg

SEQ ID NO: 42114 - DNA, 20 bp, Human herpesvirus 5
tccagtcgagtgcgtcgtcg

SEQ ID NO: 42115 - DNA, 20 bp, Human herpesvirus 5
ccagtcgagtgcgtcgtcgg

SEQ ID NO: 42116 - DNA, 20 bp, Human herpesvirus 5
cagtcgagtgcgtcgtcggc

SEQ ID NO: 42117 - DNA, 20 bp, Human herpesvirus 5
cgggccgtgtgctgggtccc

SEQ ID NO: 42118 - DNA, 20 bp, Human herpesvirus 5
tctgcgggggggtgaaattt

SEQ ID NO: 42119 - DNA, 20 bp, Human herpesvirus 5
ctgcgggggggtgaaatttg

SEQ ID NO: 42120 - DNA, 20 bp, Human herpesvirus 5
tgcgggggggtgaaatttgg

SEQ ID NO: 42121 - DNA, 20 bp, Human herpesvirus 5
ggagttgcgtgtgtggacgg

SEQ ID NO: 42122 - DNA, 20 bp, Influenza A virus
aatccaatgattgtcgagct

SEQ ID NO: 42123 - DNA, 20 bp, Influenza A virus
tcgagcttgcggaaaagaca

SEQ ID NO: 42124 - DNA, 20 bp, Influenza A virus
cggaaaagacaatgaaggaa

SEQ ID NO: 42125 - DNA, 20 bp, Influenza A virus
aaacaaataagttcgctgca

SEQ ID NO: 42126 - DNA, 20 bp, Influenza A virus
gctgcaatatgcacacactt

SEQ ID NO: 42127 - DNA, 20 bp, Influenza A virus
cttccggatctatacgacta

SEQ ID NO: 42128 - DNA, 20 bp, Influenza A virus
ttccggatctatacgactac

SEQ ID NO: 42129 - DNA, 20 bp, Influenza A virus
cggatctatacgactacaag

SEQ ID NO: 42130 - DNA, 20 bp, Influenza A virus
actgaaattggtgtgacacg

SEQ ID NO: 42131 - DNA, 20 bp, Influenza A virus
gtgtgacacggagggaagtt

SEQ ID NO: 42132 - DNA, 20 bp, Influenza A virus
ctttcgtcagtccgagagag

SEQ ID NO: 42133 - DNA, 20 bp, Influenza A virus
cgtcagtccgagagaggcga

SEQ ID NO: 42134 - DNA, 20 bp, Influenza A virus
gtcagtccgagagaggcgaa

SEQ ID NO: 42135 - DNA, 20 bp, Influenza A virus
aagaaagatttgaaatcaca

SEQ ID NO: 42136 - DNA, 20 bp, Influenza A virus
gaaatcacagggaccatgcg

SEQ ID NO: 42137 - DNA, 20 bp, Influenza A virus
gactttgaggactgcaaaga

SEQ ID NO: 42138 - DNA, 20 bp, Influenza A virus
gaggactgcaaagatattgg

SEQ ID NO: 42139 - DNA, 20 bp, Influenza A virus
aggactgcaaagatattggc

SEQ ID NO: 42140 - DNA, 20 bp, Influenza A virus
gcgatctgaaacagtatcaa

SEQ ID NO: 42141 - DNA, 20 bp, Influenza A virus
gatactgtttcagatcgcca

SEQ ID NO: 42142 - DNA, 20 bp, Influenza A virus
ccccaattgagcacattgca

SEQ ID NO: 42143 - DNA, 20 bp, Influenza A virus
agcacattgcaagcatgaga

SEQ ID NO: 42144 - DNA, 20 bp, Influenza A virus
caagcatgagaaggaactac

SEQ ID NO: 42145 - DNA, 20 bp, Influenza A virus
acagcggaagtgtctcattg

SEQ ID NO: 42146 - DNA, 20 bp, Influenza A virus
cagggccactgagtacataa

SEQ ID NO: 42147 - DNA, 20 bp, Influenza A virus
gagaaatgatactgacgtgg

SEQ ID NO: 42148 - DNA, 20 bp, Influenza A virus
agaaatgatactgacgtggt

SEQ ID NO: 42149 - DNA, 20 bp, Influenza A virus
gtgagtatggaattctccct

SEQ ID NO: 42150 - DNA, 20 bp, Influenza A virus
tgagtatggaattctccctt

SEQ ID NO: 42151 - DNA, 20 bp, Influenza A virus
tcccttactgacccaaggct

SEQ ID NO: 42152 - DNA, 20 bp, Influenza A virus
aacagattgagagcatgatc

SEQ ID NO: 42153 - DNA, 20 bp, Influenza A virus
agagcatgatcgaggctgag

SEQ ID NO: 42154 - DNA, 20 bp, Influenza A virus
tatcaaagagaaagacatga

SEQ ID NO: 42155 - DNA, 20 bp, Influenza A virus
tttgaaaacagatcggagac

SEQ ID NO: 42156 - DNA, 20 bp, Influenza A virus
gaaaacagatcggagacatg

SEQ ID NO: 42157 - DNA, 20 bp, Influenza A virus
gaagaatggttagcggcatt

SEQ ID NO: 42158 - DNA, 20 bp, Influenza A virus
gcggcattgggagattctac

SEQ ID NO: 42159 - DNA, 20 bp, Influenza A virus
ggagattctacatacagatg

SEQ ID NO: 42160 - DNA, 20 bp, Influenza A virus
tacatacagatgtgtacaga

SEQ ID NO: 42161 - DNA, 20 bp, Influenza A virus
tcactgagtttgagttctgt

SEQ ID NO: 42162 - DNA, 20 bp, Influenza A virus
ggcgacaagcgaacaatgga

SEQ ID NO: 42163 - DNA, 20 bp, Influenza A virus
gcgacaagcgaacaatggag

SEQ ID NO: 42164 - DNA, 20 bp, Influenza A virus
catcctctccattgttcgct

SEQ ID NO: 42165 - DNA, 20 bp, Influenza A virus
ttcgcttgtcgccaaattct

SEQ ID NO: 42166 - DNA, 20 bp, Influenza A virus
gcttgtcgccaaattctcct

SEQ ID NO: 42167 - DNA, 20 bp, Influenza A virus
ctggagaggcgaaaatggaa

SEQ ID NO: 42168 - DNA, 20 bp, Influenza A virus
tggagaggcgaaaatggaag

SEQ ID NO: 42169 - DNA, 20 bp, Influenza A virus
catatgagagaatgtgcaac

SEQ ID NO: 42170 - DNA, 20 bp, Influenza A virus
ccctttgaggatgttgcaca

SEQ ID NO: 42171 - DNA, 20 bp, Influenza A virus
cctttgaggatgttgcacat

SEQ ID NO: 42172 - DNA, 20 bp, Influenza A virus
aaattgcttcaaatgagaac

SEQ ID NO: 42173 - DNA, 20 bp, Influenza A virus
cttcaaatgagaacatggaa

SEQ ID NO: 42174 - DNA, 20 bp, Influenza A virus
aaatgagaacatggaagcaa

SEQ ID NO: 42175 - DNA, 20 bp, Influenza A virus
tcagttcaagagtattggag

SEQ ID NO: 42176 - DNA, 20 bp, Influenza A virus
aagagtattggagtccattg

SEQ ID NO: 42177 - DNA, 20 bp, Human adenovirus
tttgtgcaaattttgtgttt

SEQ ID NO: 42178 - DNA, 20 bp, Human adenovirus
gtgcaaattttgtgttttag

SEQ ID NO: 42179 - DNA, 20 bp, Human adenovirus
tgcaaattttgtgttttagg

SEQ ID NO: 42180 - DNA, 20 bp, Human adenovirus
tgtgttttaggcgcgaaaac

SEQ ID NO: 42181 - DNA, 20 bp, Human adenovirus
gtgttttaggcgcgaaaact

SEQ ID NO: 42182 - DNA, 20 bp, Human adenovirus
gtcctgtcgtatcaggaagc

SEQ ID NO: 42183 - DNA, 20 bp, Human adenovirus
gagcatttggtggacaactt

SEQ ID NO: 42184 - DNA, 20 bp, Human adenovirus
ggtggacaacttttttaacg

SEQ ID NO: 42185 - DNA, 20 bp, Human adenovirus
gtggacaacttttttaacga

SEQ ID NO: 42186 - DNA, 20 bp, Human adenovirus
tttaacgaggtacccagtga

SEQ ID NO: 42187 - DNA, 20 bp, Human adenovirus
attgtgctacgagatgggct

SEQ ID NO: 42188 - DNA, 20 bp, Human adenovirus
ttgtgctacgagatgggctt

SEQ ID NO: 42189 - DNA, 20 bp, Human adenovirus
tgctacgagatgggctttcc

SEQ ID NO: 42190 - DNA, 20 bp, Human adenovirus
ccctgtagcgattcggaaga

SEQ ID NO: 42191 - DNA, 20 bp, Human adenovirus
cctgtagcgattcggaagac

SEQ ID NO: 42192 - DNA, 20 bp, Human adenovirus
tggatttgattcaagaggaa

SEQ ID NO: 42193 - DNA, 20 bp, Human adenovirus
ggatttgattcaagaggaag

SEQ ID NO: 42194 - DNA, 20 bp, Human adenovirus
gatttgattcaagaggaaga

SEQ ID NO: 42195 - DNA, 20 bp, Human adenovirus
gattcaagaggaagaaagag

SEQ ID NO: 42196 - DNA, 20 bp, Human adenovirus
attcaagaggaagaaagaga

SEQ ID NO: 42197 - DNA, 20 bp, Human adenovirus
tcagagcgttcgccagctct

SEQ ID NO: 42198 - DNA, 20 bp, Human adenovirus
cagagcgttcgccagctctt

SEQ ID NO: 42199 - DNA, 20 bp, Human adenovirus
agagcgttcgccagctcttg

SEQ ID NO: 42200 - DNA, 20 bp, Human adenovirus
gccagctcttgcagtatacc

SEQ ID NO: 42201 - DNA, 20 bp, Human adenovirus
cagtatacctctaaaaacac

SEQ ID NO: 42202 - DNA, 20 bp, Human adenovirus
gcatttactcgctggcgcgg

SEQ ID NO: 42203 - DNA, 20 bp, Human adenovirus
catttactcgctggcgcggc

SEQ ID NO: 42204 - DNA, 20 bp, Human adenovirus
actcgctggcgcggcctttg

SEQ ID NO: 42205 - DNA, 20 bp, Human adenovirus
ctcgctggcgcggcctttga

SEQ ID NO: 42206 - DNA, 20 bp, Human adenovirus
gaccatgccgccgctgccga

SEQ ID NO: 42207 - DNA, 20 bp, Human adenovirus
cgtcctgattgtagctacag

SEQ ID NO: 42208 - DNA, 20 bp, Human adenovirus
tagctacagaattactaaaa

SEQ ID NO: 42209 - DNA, 20 bp, Human adenovirus
ctaaaacagtaaccattact

SEQ ID NO: 42210 - DNA, 20 bp, Human adenovirus
cttcatgcgcctatattata

SEQ ID NO: 42211 - DNA, 20 bp, Human adenovirus
atgcgcctatattataggta

SEQ ID NO: 42212 - DNA, 20 bp, Human adenovirus
ggcataatgcagcttcagaa

SEQ ID NO: 42213 - DNA, 20 bp, Human adenovirus
agaaaatgcctgttttgtat

SEQ ID NO: 42214 - DNA, 20 bp, Human adenovirus
tgtattattgaagggaatgg

SEQ ID NO: 42215 - DNA, 20 bp, Human adenovirus
gtattattgaagggaatggc

SEQ ID NO: 42216 - DNA, 20 bp, Human adenovirus
tattattgaagggaatggct

SEQ ID NO: 42217 - DNA, 20 bp, Human adenovirus
tgctggaacctgaagtgttt

SEQ ID NO: 42218 - DNA, 20 bp, Human adenovirus
tctagagtgtgtttaaatgg

SEQ ID NO: 42219 - DNA, 20 bp, Human adenovirus
ctagagtgtgtttaaatggg

SEQ ID NO: 42220 - DNA, 20 bp, Human adenovirus
tagagtgtgtttaaatgggg

SEQ ID NO: 42221 - DNA, 20 bp, Human adenovirus
aaatggggtatttgatttat

SEQ ID NO: 42222 - DNA, 20 bp, Human adenovirus
atcaacattaacctatgcaa

SEQ ID NO: 42223 - DNA, 20 bp, Human adenovirus
acctatgcaactattggacc

SEQ ID NO: 42224 - DNA, 20 bp, Human adenovirus
gaccctcgcctttggatacc

SEQ ID NO: 42225 - DNA, 20 bp, Human adenovirus
ggataccgccgccgccgctg

SEQ ID NO: 42226 - DNA, 20 bp, Human adenovirus
gataccgccgccgccgctgc

SEQ ID NO: 42227 - DNA, 20 bp, Human adenovirus
cctatcattaagaacacggt

SEQ ID NO: 42228 - DNA, 20 bp, Human adenovirus
agaacacggtgaatgtgttc

SEQ ID NO: 42229 - DNA, 20 bp, Human adenovirus
cagtattttgtaaagatgag

SEQ ID NO: 42230 - DNA, 20 bp, Human adenovirus
tgtaaagatgagcctgtata

SEQ ID NO: 42231 - DNA, 20 bp, Human adenovirus
gtaaagatgagcctgtatat

SEQ ID NO: 42232 - DNA, 20 bp, Human adenovirus
cctgccaaatctcttcttgg

SEQ ID NO: 42233 - DNA, 20 bp, Human adenovirus
ttggattcatattgtggaga

SEQ ID NO: 42234 - DNA, 20 bp, Human adenovirus
gattcatattgtggagaacc

SEQ ID NO: 42235 - DNA, 20 bp, Human adenovirus
atattgtggagaaccacgaa

SEQ ID NO: 42236 - DNA, 20 bp, Human adenovirus
tggagaaccacgaaaacggt

SEQ ID NO: 42237 - DNA, 20 bp, Human adenovirus
cgcaacaactgagacttccc

SEQ ID NO: 42238 - DNA, 20 bp, Human adenovirus
ccacagccagtgggtccata

SEQ ID NO: 42239 - DNA, 20 bp, Human adenovirus
ccccaattacaggttgcaag

SEQ ID NO: 42240 - DNA, 20 bp, Human adenovirus
caggttgcaagtgatagttt

SEQ ID NO: 42241 - DNA, 20 bp, Human adenovirus
caagtgatagtttaacgagg

SEQ ID NO: 42242 - DNA, 20 bp, Human adenovirus
tattttctatgccatctcga

SEQ ID NO: 42243 - DNA, 20 bp, Human adenovirus
tctatgccatctcgatccag

SEQ ID NO: 42244 - DNA, 20 bp, Human adenovirus
ctatgccatctcgatccagc

SEQ ID NO: 42245 - DNA, 20 bp, Human adenovirus
tatgccatctcgatccagca

SEQ ID NO: 42246 - DNA, 20 bp, Human adenovirus
ctcgttgcgggggtttggct

SEQ ID NO: 42247 - DNA, 20 bp, Human adenovirus
agcccgtatttttcctttgg

SEQ ID NO: 42248 - DNA, 20 bp, Human adenovirus
gcccgtatttttcctttgga

SEQ ID NO: 42249 - DNA, 20 bp, Human adenovirus
ttcctttggaggtgctcccg

SEQ ID NO: 42250 - DNA, 20 bp, Human adenovirus
tcctttggaggtgctcccgc

SEQ ID NO: 42251 - DNA, 20 bp, Human adenovirus
cctttggaggtgctcccgca

SEQ ID NO: 42252 - DNA, 20 bp, Human adenovirus
agtggtattccgcggtcctc

SEQ ID NO: 42253 - DNA, 20 bp, Human adenovirus
cgcggtcctcctcgtacagg

SEQ ID NO: 42254 - DNA, 20 bp, Human adenovirus
tgaccactctgacacaaaag

SEQ ID NO: 42255 - DNA, 20 bp, Human adenovirus
ccatgtggcttcctttgtac

SEQ ID NO: 42256 - DNA, 20 bp, Human adenovirus
ctttgtacttgcttggacta

SEQ ID NO: 42257 - DNA, 20 bp, Human adenovirus
cttctgcttcgctgtttacg

SEQ ID NO: 42258 - DNA, 20 bp, Human adenovirus
ttctgcttcgctgtttacga

SEQ ID NO: 42259 - DNA, 20 bp, Human adenovirus
tgcttcgctgtttacgagcg

SEQ ID NO: 42260 - DNA, 20 bp, Human adenovirus
gctgtttacgagcgccaact

SEQ ID NO: 42261 - DNA, 20 bp, Human adenovirus
acgagcgccaactggttggg

SEQ ID NO: 42262 - DNA, 20 bp, Human adenovirus
cacatattcgcgtgccaggc

SEQ ID NO: 42263 - DNA, 20 bp, Human adenovirus
gcgtgccaggcatttccagg

SEQ ID NO: 42264 - DNA, 20 bp, Human adenovirus
ccaggtggggaaaatggtgg

SEQ ID NO: 42265 - DNA, 20 bp, Human adenovirus
caggtggggaaaatggtggt

SEQ ID NO: 42266 - DNA, 20 bp, Human adenovirus
tgcagtgtaaccagatctac

SEQ ID NO: 42267 - DNA, 20 bp, Human adenovirus
aggggaggaccccaaggcat

SEQ ID NO: 42268 - DNA, 20 bp, Human adenovirus
tagtactcctatgtaagtag

SEQ ID NO: 42269 - DNA, 20 bp, Human adenovirus
agtactcctatgtaagtagg

SEQ ID NO: 42270 - DNA, 20 bp, Human adenovirus
gtactcctatgtaagtagga

SEQ ID NO: 42271 - DNA, 20 bp, Human adenovirus
gcgccagcattcgtggcggc

SEQ ID NO: 42272 - DNA, 20 bp, Human adenovirus
cagtactcctccaggggaaa

SEQ ID NO: 42273 - DNA, 20 bp, Human adenovirus
gcatctgcacggtaagaacc

SEQ ID NO: 42274 - DNA, 20 bp, Human adenovirus
catctgcacggtaagaacca

SEQ ID NO: 42275 - DNA, 20 bp, Human adenovirus
accgccttgtacggacaaca

SEQ ID NO: 42276 - DNA, 20 bp, Human adenovirus
ccgccttgtacggacaacat

SEQ ID NO: 42277 - DNA, 20 bp, Human adenovirus
gaataaaatttctagaaatt

SEQ ID NO: 42278 - DNA, 20 bp, Human adenovirus
ctagaaattttaaagggtcc

SEQ ID NO: 42279 - DNA, 20 bp, Human adenovirus
tagaaattttaaagggtcca

SEQ ID NO: 42280 - DNA, 20 bp, Human adenovirus
taaagggtccagggacgtcc

SEQ ID NO: 42281 - DNA, 20 bp, Human adenovirus
aaagggtccagggacgtcca

SEQ ID NO: 42282 - DNA, 20 bp, Human adenovirus
accgaccttcattttttctg

SEQ ID NO: 42283 - DNA, 20 bp, Human adenovirus
attttttctggggttaagca

SEQ ID NO: 42284 - DNA, 20 bp, Human adenovirus
tttctggggttaagcagtag

SEQ ID NO: 42285 - DNA, 20 bp, Human adenovirus
ttctggggttaagcagtaga

SEQ ID NO: 42286 - DNA, 20 bp, Human adenovirus
tctggggttaagcagtagaa

SEQ ID NO: 42287 - DNA, 20 bp, Human adenovirus
atgctgatgtttgtaaaagc

SEQ ID NO: 42288 - DNA, 20 bp, Human adenovirus
gtaaaagcgtgcgcagtgtt

SEQ ID NO: 42289 - DNA, 20 bp, Human adenovirus
taaaagcgtgcgcagtgttc

SEQ ID NO: 42290 - DNA, 20 bp, Human adenovirus
gcatcgttgcacgggctgta

SEQ ID NO: 42291 - DNA, 20 bp, Human adenovirus
cacgggctgtatctgttgaa

SEQ ID NO: 42292 - DNA, 20 bp, Human adenovirus
ggatcctcgaaagcgagaac

SEQ ID NO: 42293 - DNA, 20 bp, Human adenovirus
gatcctcgaaagcgagaacg

SEQ ID NO: 42294 - DNA, 20 bp, Human adenovirus
cagcacgagaggggcggaaa

SEQ ID NO: 42295 - DNA, 20 bp, Human adenovirus
agcacgagaggggcggaaac

SEQ ID NO: 42296 - DNA, 20 bp, Human adenovirus
cccgtttccgcccctctcgt

SEQ ID NO: 42297 - DNA, 20 bp, Human adenovirus
tccaatgcgcctgcttaaaa

SEQ ID NO: 42298 - DNA, 20 bp, Human adenovirus
ccaatgcgcctgcttaaaat

SEQ ID NO: 42299 - DNA, 20 bp, Human adenovirus
caatgcgcctgcttaaaatc

SEQ ID NO: 42300 - DNA, 20 bp, Human adenovirus
aaatcggcggcgcggacgag

SEQ ID NO: 42301 - DNA, 20 bp, Human adenovirus
gggtcctgcgggaagcgggg

SEQ ID NO: 42302 - DNA, 20 bp, Human adenovirus
attgatcaatttcttcctcc

SEQ ID NO: 42303 - DNA, 20 bp, Human adenovirus
atcaatttcttcctcctgga

SEQ ID NO: 42304 - DNA, 20 bp, Human adenovirus
cttcctcctggaggtctcca

SEQ ID NO: 42305 - DNA, 20 bp, Human adenovirus
ttcctcctggaggtctccat

SEQ ID NO: 42306 - DNA, 20 bp, Human adenovirus
ctcctggaggtctccatgtc

SEQ ID NO: 42307 - DNA, 20 bp, Human adenovirus
gacgccggcgaacgggcagc

SEQ ID NO: 42308 - DNA, 20 bp, Human adenovirus
caatcatttcgccgcgacgg

SEQ ID NO: 42309 - DNA, 20 bp, Human adenovirus
aatcatttcgccgcgacggc

SEQ ID NO: 42310 - DNA, 20 bp, Human adenovirus
cgccgcgacggcggcgcata

SEQ ID NO: 42311 - DNA, 20 bp, Human adenovirus
gccgcgacggcggcgcatag

SEQ ID NO: 42312 - DNA, 20 bp, Human adenovirus
tgtttcttctaaagtaccag

SEQ ID NO: 42313 - DNA, 20 bp, Human adenovirus
gtttcttctaaagtaccagg

SEQ ID NO: 42314 - DNA, 20 bp, Human adenovirus
tttcttctaaagtaccagga

SEQ ID NO: 42315 - DNA, 20 bp, Human adenovirus
cttctaaagtaccaggaagc

SEQ ID NO: 42316 - DNA, 20 bp, Human adenovirus
ttctaaagtaccaggaagct

SEQ ID NO: 42317 - DNA, 20 bp, Human adenovirus
gggtaagggtggttgcaaag

SEQ ID NO: 42318 - DNA, 20 bp, Human adenovirus
ggtaagggtggttgcaaagt

SEQ ID NO: 42319 - DNA, 20 bp, Human adenovirus
caaagtcatccacatctaca

SEQ ID NO: 42320 - DNA, 20 bp, Human adenovirus
atggtgtagctgcagtttgt

SEQ ID NO: 42321 - DNA, 20 bp, Human adenovirus
gtcattactgaccaattaac

SEQ ID NO: 42322 - DNA, 20 bp, Human adenovirus
atatatgtatctggacatcc

SEQ ID NO: 42323 - DNA, 20 bp, Human adenovirus
ttgctcgcataaattcgcgg

SEQ ID NO: 42324 - DNA, 20 bp, Human adenovirus
ctcgcataaattcgcgggct

SEQ ID NO: 42325 - DNA, 20 bp, Human adenovirus
gcgggctcggttccaaatat

SEQ ID NO: 42326 - DNA, 20 bp, Human adenovirus
caaatattgcgcaggggtaa

SEQ ID NO: 42327 - DNA, 20 bp, Human adenovirus
gaaaccggcaggatccgcta

SEQ ID NO: 42328 - DNA, 20 bp, Human adenovirus
cgcgttgaacccggccaagg

SEQ ID NO: 42329 - DNA, 20 bp, Human adenovirus
aacccggccaaggaccccca

SEQ ID NO: 42330 - DNA, 20 bp, Human adenovirus
gccgggttcaacgcgcaagc

SEQ ID NO: 42331 - DNA, 20 bp, Human adenovirus
aacgcgcaagcgcctcactt

SEQ ID NO: 42332 - DNA, 20 bp, Human adenovirus
gtgcctcgtcagaacatgtt

SEQ ID NO: 42333 - DNA, 20 bp, Human adenovirus
tgcctcgtcagaacatgttt

SEQ ID NO: 42334 - DNA, 20 bp, Human adenovirus
cgcgacaacagcggggagga

SEQ ID NO: 42335 - DNA, 20 bp, Human adenovirus
gcgacaacagcggggaggaa

SEQ ID NO: 42336 - DNA, 20 bp, Human adenovirus
cctcagcttcctccccgctg

SEQ ID NO: 42337 - DNA, 20 bp, Human adenovirus
gtttaatgcatctttgggac

SEQ ID NO: 42338 - DNA, 20 bp, Human adenovirus
aatgcatctttgggactttg

SEQ ID NO: 42339 - DNA, 20 bp, Human adenovirus
atgcatctttgggactttgt

SEQ ID NO: 42340 - DNA, 20 bp, Human adenovirus
gggactttgtagaagcttat

SEQ ID NO: 42341 - DNA, 20 bp, Human adenovirus
ggactttgtagaagcttatg

SEQ ID NO: 42342 - DNA, 20 bp, Human adenovirus
tttgatatgggcgcagacct

SEQ ID NO: 42343 - DNA, 20 bp, Human adenovirus
gatatgggcgcagacctacg

SEQ ID NO: 42344 - DNA, 20 bp, Human adenovirus
atatgggcgcagacctacgg

SEQ ID NO: 42345 - DNA, 20 bp, Human adenovirus
ggaggcagctggagtggcgt

SEQ ID NO: 42346 - DNA, 20 bp, Human adenovirus
gaggcagctggagtggcgtc

SEQ ID NO: 42347 - DNA, 20 bp, Human adenovirus
accattgtaaatgctttgtt

SEQ ID NO: 42348 - DNA, 20 bp, Human adenovirus
taaatgctttgttggatagc

SEQ ID NO: 42349 - DNA, 20 bp, Human adenovirus
gttggatagcaaagccatcc

SEQ ID NO: 42350 - DNA, 20 bp, Human adenovirus
ttggatagcaaagccatccg

SEQ ID NO: 42351 - DNA, 20 bp, Human adenovirus
gatagcaaagccatccgcaa

SEQ ID NO: 42352 - DNA, 20 bp, Human adenovirus
ctgaagtgcctcaaagtgaa

SEQ ID NO: 42353 - DNA, 20 bp, Human adenovirus
cttttttcaaacgtccaggc

SEQ ID NO: 42354 - DNA, 20 bp, Human adenovirus
tttcaaacgtccaggcaggg

SEQ ID NO: 42355 - DNA, 20 bp, Human adenovirus
ttcaaacgtccaggcagggt

SEQ ID NO: 42356 - DNA, 20 bp, Human adenovirus
tcaaacgtccaggcagggtt

SEQ ID NO: 42357 - DNA, 20 bp, Human adenovirus
atggattaccttcaccgcgc

SEQ ID NO: 42358 - DNA, 20 bp, Human adenovirus
ccttcaccgcgctgcggcca

SEQ ID NO: 42359 - DNA, 20 bp, Human adenovirus
accgcgctgcggccatgaac

SEQ ID NO: 42360 - DNA, 20 bp, Human adenovirus
acaaatgcaattctaaatcc

SEQ ID NO: 42361 - DNA, 20 bp, Human adenovirus
caaatgcaattctaaatccg

SEQ ID NO: 42362 - DNA, 20 bp, Human adenovirus
gccctcctaggcaacgttgg

SEQ ID NO: 42363 - DNA, 20 bp, Human adenovirus
gcagcgacgcaaaaaagggg

SEQ ID NO: 42364 - DNA, 20 bp, Human adenovirus
cttcatcccccgcatgtgcc

SEQ ID NO: 42365 - DNA, 20 bp, Human adenovirus
atcccccgcatgtgcccctt

SEQ ID NO: 42366 - DNA, 20 bp, Human adenovirus
tttgcgtcgctgccaacgtt

SEQ ID NO: 42367 - DNA, 20 bp, Human adenovirus
gatgaaaggtctagatgggg

SEQ ID NO: 42368 - DNA, 20 bp, Human adenovirus
atgaaaggtctagatggggt

SEQ ID NO: 42369 - DNA, 20 bp, Human adenovirus
aaaaaccatcttacatacca

SEQ ID NO: 42370 - DNA, 20 bp, Human adenovirus
aaaaccatcttacataccaa

SEQ ID NO: 42371 - DNA, 20 bp, Human adenovirus
cataccaacatgccaaacgt

SEQ ID NO: 42372 - DNA, 20 bp, Human adenovirus
gagttaagtttgacaccaga

SEQ ID NO: 42373 - DNA, 20 bp, Human adenovirus
agtttgacaccagaaacttt

SEQ ID NO: 42374 - DNA, 20 bp, Human adenovirus
gacaccagaaactttcgtct

SEQ ID NO: 42375 - DNA, 20 bp, Human adenovirus
acaccagaaactttcgtctg

SEQ ID NO: 42376 - DNA, 20 bp, Human adenovirus
cgtctgggttgggaccccga

SEQ ID NO: 42377 - DNA, 20 bp, Human adenovirus
aaccggttgaaacagacccc

SEQ ID NO: 42378 - DNA, 20 bp, Human adenovirus
aaacagaccccaaaggacgc

SEQ ID NO: 42379 - DNA, 20 bp, Human adenovirus
caacttgcttccagacaaaa

SEQ ID NO: 42380 - DNA, 20 bp, Human adenovirus
cttccagacaaaaaaaatac

SEQ ID NO: 42381 - DNA, 20 bp, Human adenovirus
cagacaaaaaaaatactaaa

SEQ ID NO: 42382 - DNA, 20 bp, Human adenovirus
ccgagctccatggggcgcgc

SEQ ID NO: 42383 - DNA, 20 bp, Human adenovirus
gctagaccttgttttagctc

SEQ ID NO: 42384 - DNA, 20 bp, Human adenovirus
ttttagctcctccatacatg

SEQ ID NO: 42385 - DNA, 20 bp, Human adenovirus
tagctcctccatacatgcgg

SEQ ID NO: 42386 - DNA, 20 bp, Human adenovirus
agctcctccatacatgcggg

SEQ ID NO: 42387 - DNA, 20 bp, Human adenovirus
gacgggccaggcgcattggg

SEQ ID NO: 42388 - DNA, 20 bp, Human adenovirus
ggcggcgagctatgatgcgg

SEQ ID NO: 42389 - DNA, 20 bp, Human adenovirus
caaacctagctgctccgcga

SEQ ID NO: 42390 - DNA, 20 bp, Human adenovirus
cctcgtcgcggagcagctag

SEQ ID NO: 42391 - DNA, 20 bp, Human adenovirus
ctcgtcgcggagcagctagg

SEQ ID NO: 42392 - DNA, 20 bp, Human adenovirus
aaaaacgggaaaaaaaagag

SEQ ID NO: 42393 - DNA, 20 bp, Human adenovirus
gtgcgctcatttgcgcccag

SEQ ID NO: 42394 - DNA, 20 bp, Human adenovirus
tgcgctcatttgcgcccaga

SEQ ID NO: 42395 - DNA, 20 bp, Human adenovirus
gcgcccagacgtagggtaca

SEQ ID NO: 42396 - DNA, 20 bp, Human adenovirus
cgcccagacgtagggtacag

SEQ ID NO: 42397 - DNA, 20 bp, Human adenovirus
cagcctacaatgcaactgat

SEQ ID NO: 42398 - DNA, 20 bp, Human adenovirus
gaggacgtactagagcacat

SEQ ID NO: 42399 - DNA, 20 bp, Human adenovirus
catctggctgtacgctagga

SEQ ID NO: 42400 - DNA, 20 bp, Human adenovirus
atgtgctctagtacgtcctc

SEQ ID NO: 42401 - DNA, 20 bp, Human adenovirus
tgccgcttaggcaccatcag

SEQ ID NO: 42402 - DNA, 20 bp, Human adenovirus
tcagcgccgagccacagccc

SEQ ID NO: 42403 - DNA, 20 bp, Human adenovirus
cagcgccgagccacagcccc

SEQ ID NO: 42404 - DNA, 20 bp, Human adenovirus
agcgccgagccacagcccct

SEQ ID NO: 42405 - DNA, 20 bp, Human adenovirus
gcgtcgacgtctacggcgtg

SEQ ID NO: 42406 - DNA, 20 bp, Human adenovirus
cgtcgacgtctacggcgtga

SEQ ID NO: 42407 - DNA, 20 bp, Human adenovirus
caaccaaaggagaaaagcgg

SEQ ID NO: 42408 - DNA, 20 bp, Human adenovirus
ctaaggtttcctctgcatcc

SEQ ID NO: 42409 - DNA, 20 bp, Human adenovirus
cctctgcatccggccgtggc

SEQ ID NO: 42410 - DNA, 20 bp, Human adenovirus
ctctgcatccggccgtggcc

SEQ ID NO: 42411 - DNA, 20 bp, Human adenovirus
tctcctttggttggaacgga

SEQ ID NO: 42412 - DNA, 20 bp, Human adenovirus
caagatggccactccctcga

SEQ ID NO: 42413 - DNA, 20 bp, Human adenovirus
aagatggccactccctcgat

SEQ ID NO: 42414 - DNA, 20 bp, Human adenovirus
aaagcgctggtggtgactgc

SEQ ID NO: 42415 - DNA, 20 bp, Human adenovirus
gacatggctagttcttactt

SEQ ID NO: 42416 - DNA, 20 bp, Human adenovirus
ttactttgacattcgagggg

SEQ ID NO: 42417 - DNA, 20 bp, Human adenovirus
ctttgacattcgaggggtac

SEQ ID NO: 42418 - DNA, 20 bp, Human adenovirus
gacattcgaggggtactgga

SEQ ID NO: 42419 - DNA, 20 bp, Human adenovirus
acattcgaggggtactggat

SEQ ID NO: 42420 - DNA, 20 bp, Human adenovirus
aacttaagttctttgattca

SEQ ID NO: 42421 - DNA, 20 bp, Human adenovirus
agttctttgattcagctaac

SEQ ID NO: 42422 - DNA, 20 bp, Human adenovirus
tttgattcagctaacaatgc

SEQ ID NO: 42423 - DNA, 20 bp, Human adenovirus
gattcagctaacaatgcagc

SEQ ID NO: 42424 - DNA, 20 bp, Human adenovirus
attcagctaacaatgcagca

SEQ ID NO: 42425 - DNA, 20 bp, Human adenovirus
gggagacagaacacggtact

SEQ ID NO: 42426 - DNA, 20 bp, Human adenovirus
ggagacagaacacggtactt

SEQ ID NO: 42427 - DNA, 20 bp, Human adenovirus
tccttgtggaattccgcagt

SEQ ID NO: 42428 - DNA, 20 bp, Human adenovirus
ccttgtggaattccgcagtg

SEQ ID NO: 42429 - DNA, 20 bp, Human adenovirus
cttgtggaattccgcagtgg

SEQ ID NO: 42430 - DNA, 20 bp, Human adenovirus
tacctaccagacgacttaaa

SEQ ID NO: 42431 - DNA, 20 bp, Human adenovirus
aaatacactccaggaaacat

SEQ ID NO: 42432 - DNA, 20 bp, Human adenovirus
atgtactcgtaggtgttctt

SEQ ID NO: 42433 - DNA, 20 bp, Human adenovirus
ttgttatcaggtagttttat

SEQ ID NO: 42434 - DNA, 20 bp, Human adenovirus
ttatcaggtagttttatgtt

SEQ ID NO: 42435 - DNA, 20 bp, Human adenovirus
cgaatggaactttagaaagg

SEQ ID NO: 42436 - DNA, 20 bp, Human adenovirus
agaaaggatgtaaacatgat

SEQ ID NO: 42437 - DNA, 20 bp, Human adenovirus
gaaaggatgtaaacatgatt

SEQ ID NO: 42438 - DNA, 20 bp, Human adenovirus
ttcagagcacactgggaaat

SEQ ID NO: 42439 - DNA, 20 bp, Human adenovirus
agagcacactgggaaatgat

SEQ ID NO: 42440 - DNA, 20 bp, Human adenovirus
gtatactctggaaccattcc

SEQ ID NO: 42441 - DNA, 20 bp, Human adenovirus
tatactctggaaccattccc

SEQ ID NO: 42442 - DNA, 20 bp, Human adenovirus
cctatttagacggcaccttt

SEQ ID NO: 42443 - DNA, 20 bp, Human adenovirus
agacggcaccttttacctaa

SEQ ID NO: 42444 - DNA, 20 bp, Human adenovirus
gacggcaccttttacctaaa

SEQ ID NO: 42445 - DNA, 20 bp, Human adenovirus
caacataacaactcaggatt

SEQ ID NO: 42446 - DNA, 20 bp, Human adenovirus
aacataacaactcaggattc

SEQ ID NO: 42447 - DNA, 20 bp, Human adenovirus
gtgggatacctgggccccac

SEQ ID NO: 42448 - DNA, 20 bp, Human adenovirus
ccccgccaactatccctacc

SEQ ID NO: 42449 - DNA, 20 bp, Human adenovirus
gcggggtaagcttgtccctc

SEQ ID NO: 42450 - DNA, 20 bp, Human adenovirus
aagcgaacaggagctgacgg

SEQ ID NO: 42451 - DNA, 20 bp, Human adenovirus
ttcgagatctaggctgtgga

SEQ ID NO: 42452 - DNA, 20 bp, Human adenovirus
gagatctaggctgtggaccc

SEQ ID NO: 42453 - DNA, 20 bp, Human adenovirus
tttgggaacctttgacaaac

SEQ ID NO: 42454 - DNA, 20 bp, Human adenovirus
ttgggaacctttgacaaacg

SEQ ID NO: 42455 - DNA, 20 bp, Human adenovirus
tctgcagcgtgcggcctgtt

SEQ ID NO: 42456 - DNA, 20 bp, Human adenovirus
ctgcagcgtgcggcctgttt

SEQ ID NO: 42457 - DNA, 20 bp, Human adenovirus
tgcagcgtgcggcctgtttt

SEQ ID NO: 42458 - DNA, 20 bp, Human adenovirus
tgttgtatgttcttacacgc

SEQ ID NO: 42459 - DNA, 20 bp, Human adenovirus
gttgtatgttcttacacgct

SEQ ID NO: 42460 - DNA, 20 bp, Human adenovirus
ctgtactgcaaacgctgatg

SEQ ID NO: 42461 - DNA, 20 bp, Human adenovirus
tgtactgcaaacgctgatgc

SEQ ID NO: 42462 - DNA, 20 bp, Human adenovirus
aattctggaataacaagcct

SEQ ID NO: 42463 - DNA, 20 bp, Human adenovirus
tggaataacaagcctagggg

SEQ ID NO: 42464 - DNA, 20 bp, Human adenovirus
tctccccacagctggcgcac

SEQ ID NO: 42465 - DNA, 20 bp, Human adenovirus
ttgcccatgtcgcatgtgag

SEQ ID NO: 42466 - DNA, 20 bp, Human adenovirus
tgcccatgtcgcatgtgagg

SEQ ID NO: 42467 - DNA, 20 bp, Human adenovirus
gcccatgtcgcatgtgaggg

SEQ ID NO: 42468 - DNA, 20 bp, Human adenovirus
cccatgtcgcatgtgagggt

SEQ ID NO: 42469 - DNA, 20 bp, Human adenovirus
aatttgcctaaaagctattt

SEQ ID NO: 42470 - DNA, 20 bp, Human adenovirus
gcgctcggtacacttatgct

SEQ ID NO: 42471 - DNA, 20 bp, Human adenovirus
tgctcccacacgcagcaacc

SEQ ID NO: 42472 - DNA, 20 bp, Human adenovirus
ccaggaattctgttggacac

SEQ ID NO: 42473 - DNA, 20 bp, Human adenovirus
tgttggacaccggcataagc

SEQ ID NO: 42474 - DNA, 20 bp, Human adenovirus
gacaccggcataagcttgca

SEQ ID NO: 42475 - DNA, 20 bp, Human adenovirus
ccaagctgaaactaggggct

SEQ ID NO: 42476 - DNA, 20 bp, Human adenovirus
ccggattgcgaacaacaaca

SEQ ID NO: 42477 - DNA, 20 bp, Human adenovirus
cgaacaacaacaacattctt

SEQ ID NO: 42478 - DNA, 20 bp, Human adenovirus
ttttcattttcgtcgctgtt

SEQ ID NO: 42479 - DNA, 20 bp, Human adenovirus
tcattttcgtcgctgttttg

SEQ ID NO: 42480 - DNA, 20 bp, Human adenovirus
agcagaacttgggctacgag

SEQ ID NO: 42481 - DNA, 20 bp, Human adenovirus
ggctacgagactccccccga

SEQ ID NO: 42482 - DNA, 20 bp, Human adenovirus
gaaggctttcttcaaatcca

SEQ ID NO: 42483 - DNA, 20 bp, Human adenovirus
aaggctttcttcaaatccaa

SEQ ID NO: 42484 - DNA, 20 bp, Human adenovirus
cttcaaatccaaaagcaacc

SEQ ID NO: 42485 - DNA, 20 bp, Human adenovirus
tctttaaaaatcacaaaata

SEQ ID NO: 42486 - DNA, 20 bp, Human adenovirus
ctttaaaaatcacaaaatac

SEQ ID NO: 42487 - DNA, 20 bp, Human adenovirus
tttaaaaatcacaaaatacc

SEQ ID NO: 42488 - DNA, 20 bp, Human adenovirus
aaaaatcacaaaatacccct

SEQ ID NO: 42489 - DNA, 20 bp, Human adenovirus
aaaatcacaaaataccccta

SEQ ID NO: 42490 - DNA, 20 bp, Human adenovirus
agcgagcccaacccattgac

SEQ ID NO: 42491 - DNA, 20 bp, Human adenovirus
acaaagatgcaaacttgcaa

SEQ ID NO: 42492 - DNA, 20 bp, Human adenovirus
caagacccggaggcaacaga

SEQ ID NO: 42493 - DNA, 20 bp, Human adenovirus
taagcgacgagcaattaact

SEQ ID NO: 42494 - DNA, 20 bp, Human adenovirus
actaagtggttgggaacaga

SEQ ID NO: 42495 - DNA, 20 bp, Human adenovirus
catacctggcaaactgggat

SEQ ID NO: 42496 - DNA, 20 bp, Human adenovirus
ggcagcaatgcttggaagaa

SEQ ID NO: 42497 - DNA, 20 bp, Human adenovirus
gcagcaatgcttggaagaaa

SEQ ID NO: 42498 - DNA, 20 bp, Human adenovirus
gaagaaaaaaaccttcgaga

SEQ ID NO: 42499 - DNA, 20 bp, Human adenovirus
gagaactaaacaaactgtta

SEQ ID NO: 42500 - DNA, 20 bp, Human adenovirus
gtaccttcgaaatgcaggga

SEQ ID NO: 42501 - DNA, 20 bp, Human adenovirus
gaaatgcagggaccgcagtc

SEQ ID NO: 42502 - DNA, 20 bp, Human adenovirus
cacgacgaacctaagactta

SEQ ID NO: 42503 - DNA, 20 bp, Human adenovirus
acgacgaacctaagacttac

SEQ ID NO: 42504 - DNA, 20 bp, Human adenovirus
cccctgggctttggacttct

SEQ ID NO: 42505 - DNA, 20 bp, Human adenovirus
gcagcatgtccccgaaagcc

SEQ ID NO: 42506 - DNA, 20 bp, Human adenovirus
cgcagcaacgctcaaagaaa

SEQ ID NO: 42507 - DNA, 20 bp, Human adenovirus
ttcctcccagatttcctgcc

SEQ ID NO: 42508 - DNA, 20 bp, Human adenovirus
ctcccagatttcctgccgtt

SEQ ID NO: 42509 - DNA, 20 bp, Human adenovirus
cctgccgttgctgctgtttc

SEQ ID NO: 42510 - DNA, 20 bp, Human adenovirus
ggtaagaatcgcaagcaggc

SEQ ID NO: 42511 - DNA, 20 bp, Human adenovirus
tagcctgctttcagcactgc

SEQ ID NO: 42512 - DNA, 20 bp, Human adenovirus
cagcactgcggggggaatat

SEQ ID NO: 42513 - DNA, 20 bp, Human adenovirus
agcactgcggggggaatatc

SEQ ID NO: 42514 - DNA, 20 bp, Human adenovirus
gcaaggcggtatttgctata

SEQ ID NO: 42515 - DNA, 20 bp, Human adenovirus
atatgctatttttcagcaga

SEQ ID NO: 42516 - DNA, 20 bp, Human adenovirus
tatgctatttttcagcagag

SEQ ID NO: 42517 - DNA, 20 bp, Human adenovirus
ttcagcagagtcgaggtcaa

SEQ ID NO: 42518 - DNA, 20 bp, Human adenovirus
tcagcagagtcgaggtcaag

SEQ ID NO: 42519 - DNA, 20 bp, Human adenovirus
cagcagagtcgaggtcaaga

SEQ ID NO: 42520 - DNA, 20 bp, Human adenovirus
accctccctcttggccagct

SEQ ID NO: 42521 - DNA, 20 bp, Human adenovirus
gccagctgccctgatatatc

SEQ ID NO: 42522 - DNA, 20 bp, Human adenovirus
tcctgatatatcagggcagc

SEQ ID NO: 42523 - DNA, 20 bp, Human adenovirus
cctgatatatcagggcagct

SEQ ID NO: 42524 - DNA, 20 bp, Human adenovirus
ctgatatatcagggcagctg

SEQ ID NO: 42525 - DNA, 20 bp, Human adenovirus
actttatattgcatttgtcc

SEQ ID NO: 42526 - DNA, 20 bp, Human adenovirus
atattgcatttgtcctgttc

SEQ ID NO: 42527 - DNA, 20 bp, Human adenovirus
tattgcatttgtcctgttcc

SEQ ID NO: 42528 - DNA, 20 bp, Human adenovirus
catttgtcctgttcccggat

SEQ ID NO: 42529 - DNA, 20 bp, Human adenovirus
gtcctgttcccggattacat

SEQ ID NO: 42530 - DNA, 20 bp, Human adenovirus
tttgttgctccagttattga

SEQ ID NO: 42531 - DNA, 20 bp, Human adenovirus
ttgttgctccagttattgac

SEQ ID NO: 42532 - DNA, 20 bp, Human adenovirus
tgttgctccagttattgaca

SEQ ID NO: 42533 - DNA, 20 bp, Human adenovirus
gttgctccagttattgacaa

SEQ ID NO: 42534 - DNA, 20 bp, Human adenovirus
ttgctccagttattgacaaa

SEQ ID NO: 42535 - DNA, 20 bp, Human adenovirus
gtattcatactaacaatgct

SEQ ID NO: 42536 - DNA, 20 bp, Human adenovirus
tattcatactaacaatgctt

SEQ ID NO: 42537 - DNA, 20 bp, Human adenovirus
atactaacaatgctttccat

SEQ ID NO: 42538 - DNA, 20 bp, Human adenovirus
ccatttttcttttatttctc

SEQ ID NO: 42539 - DNA, 20 bp, Human adenovirus
catttttcttttatttctct

SEQ ID NO: 42540 - DNA, 20 bp, Human adenovirus
ccccaataaggttgtgttta

SEQ ID NO: 42541 - DNA, 20 bp, Human adenovirus
tgtttaataatgtcagtcga

SEQ ID NO: 42542 - DNA, 20 bp, Human adenovirus
aataatgtcagtcgatggta

SEQ ID NO: 42543 - DNA, 20 bp, Human adenovirus
ataatgtcagtcgatggtac

SEQ ID NO: 42544 - DNA, 20 bp, Human adenovirus
ccaactactttataactaac

SEQ ID NO: 42545 - DNA, 20 bp, Human adenovirus
cttactagttttcttttttc

SEQ ID NO: 42546 - DNA, 20 bp, Human adenovirus
ctagttttcttttttcttac

SEQ ID NO: 42547 - DNA, 20 bp, Human adenovirus
tcttttttcttacagtatgg

SEQ ID NO: 42548 - DNA, 20 bp, Human adenovirus
cttttttcttacagtatggt

SEQ ID NO: 42549 - DNA, 20 bp, Human adenovirus
ttttttcttacagtatggtg

SEQ ID NO: 42550 - DNA, 20 bp, Human adenovirus
attttagttggaataagtat

SEQ ID NO: 42551 - DNA, 20 bp, Human adenovirus
tagttggaataagtatactg

SEQ ID NO: 42552 - DNA, 20 bp, Human adenovirus
agttggaataagtatactga

SEQ ID NO: 42553 - DNA, 20 bp, Human adenovirus
gttggaataagtatactgat

SEQ ID NO: 42554 - DNA, 20 bp, Human adenovirus
gaataagtatactgatgatc

SEQ ID NO: 42555 - DNA, 20 bp, Human adenovirus
gctatgaatctttaccaggc

SEQ ID NO: 42556 - DNA, 20 bp, Human adenovirus
accaggcaaagaacatcaac

SEQ ID NO: 42557 - DNA, 20 bp, Human adenovirus
ccaggcaaagaacatcaact

SEQ ID NO: 42558 - DNA, 20 bp, Human adenovirus
cagtaaaggtttgtcgctga

SEQ ID NO: 42559 - DNA, 20 bp, Human adenovirus
gtcgctgagtgggcagcgtg

SEQ ID NO: 42560 - DNA, 20 bp, Human adenovirus
taaaatttccctcttcccaa

SEQ ID NO: 42561 - DNA, 20 bp, Human adenovirus
ccctcttcccaactgtcaaa

SEQ ID NO: 42562 - DNA, 20 bp, Human adenovirus
cctcttcccaactgtcaaac

SEQ ID NO: 42563 - DNA, 20 bp, Human adenovirus
ccaactgtcaaacctgacag

SEQ ID NO: 42564 - DNA, 20 bp, Human adenovirus
caaacagcaaactttctcca

SEQ ID NO: 42565 - DNA, 20 bp, Human adenovirus
cagctagtaataatatcaat

SEQ ID NO: 42566 - DNA, 20 bp, Human adenovirus
tggagccccttaccaacacc

SEQ ID NO: 42567 - DNA, 20 bp, Human adenovirus
ggagccccttaccaacacct

SEQ ID NO: 42568 - DNA, 20 bp, Human adenovirus
gagccccttaccaacacctc

SEQ ID NO: 42569 - DNA, 20 bp, Human adenovirus
ccaacacctcacaaggtctt

SEQ ID NO: 42570 - DNA, 20 bp, Human adenovirus
ctactgcagaccccataagt

SEQ ID NO: 42571 - DNA, 20 bp, Human adenovirus
gcaacaacgctcttacccta

SEQ ID NO: 42572 - DNA, 20 bp, Human adenovirus
ccctacctacggcagatccg

SEQ ID NO: 42573 - DNA, 20 bp, Human adenovirus
atggtgagctccgatgggtt

SEQ ID NO: 42574 - DNA, 20 bp, Human adenovirus
ggaataagtgtcactagtcc

SEQ ID NO: 42575 - DNA, 20 bp, Human adenovirus
ccgggggaatgagaacttct

SEQ ID NO: 42576 - DNA, 20 bp, Human adenovirus
tggcggtagaataattttag

SEQ ID NO: 42577 - DNA, 20 bp, Human adenovirus
tagatgttaattatcccttt

SEQ ID NO: 42578 - DNA, 20 bp, Human adenovirus
agatgttaattatccctttg

SEQ ID NO: 42579 - DNA, 20 bp, Human adenovirus
gatgttaattatccctttga

SEQ ID NO: 42580 - DNA, 20 bp, Human adenovirus
agtgtttgatgaacagggaa

SEQ ID NO: 42581 - DNA, 20 bp, Human adenovirus
gtgtttgatgaacagggaag

SEQ ID NO: 42582 - DNA, 20 bp, Human adenovirus
gatgaacagggaagattaat

SEQ ID NO: 42583 - DNA, 20 bp, Human adenovirus
atgaacagggaagattaatc

SEQ ID NO: 42584 - DNA, 20 bp, Human adenovirus
atcacatcaacccctactgc

SEQ ID NO: 42585 - DNA, 20 bp, Human adenovirus
tcttacattacccaagaata

SEQ ID NO: 42586 - DNA, 20 bp, Human adenovirus
cttacattacccaagaataa

SEQ ID NO: 42587 - DNA, 20 bp, Human adenovirus
ttacattacccaagaataaa

SEQ ID NO: 42588 - DNA, 20 bp, Human adenovirus
cattacccaagaataaaaac

SEQ ID NO: 42589 - DNA, 20 bp, Human adenovirus
cccaagaataaaaacacaca

SEQ ID NO: 42590 - DNA, 20 bp, Human adenovirus
cccatccaaaaccaggtcca

SEQ ID NO: 42591 - DNA, 20 bp, Human adenovirus
tatcctacaaaaagtaacaa

SEQ ID NO: 42592 - DNA, 20 bp, Human adenovirus
atcctacaaaaagtaacaac

SEQ ID NO: 42593 - DNA, 20 bp, Human adenovirus
tcctacaaaaagtaacaaca

SEQ ID NO: 42594 - DNA, 20 bp, Human adenovirus
tctcgttgattataatctcc

SEQ ID NO: 42595 - DNA, 20 bp, Human adenovirus
tgaaccagcgtcccaaaagc

SEQ ID NO: 42596 - DNA, 20 bp, Human adenovirus
gaaccagcgtcccaaaagca

SEQ ID NO: 42597 - DNA, 20 bp, Human adenovirus
aaccagcgtcccaaaagcat

SEQ ID NO: 42598 - DNA, 20 bp, Human adenovirus
ttcattgtcattgccagcgt

SEQ ID NO: 42599 - DNA, 20 bp, Human adenovirus
attgtcattgccagcgtccg

SEQ ID NO: 42600 - DNA, 20 bp, Human adenovirus
tccgaagtactcaacgtagc

SEQ ID NO: 42601 - DNA, 20 bp, Human adenovirus
ccgaagtactcaacgtagct

SEQ ID NO: 42602 - DNA, 20 bp, Human adenovirus
cgaagtactcaacgtagctt

SEQ ID NO: 42603 - DNA, 20 bp, Human adenovirus
tgactgttcctcacagggcg

SEQ ID NO: 42604 - DNA, 20 bp, Human adenovirus
gactgttcctcacagggcgg

SEQ ID NO: 42605 - DNA, 20 bp, Human adenovirus
gaatgcgtaaatctcgcagg

SEQ ID NO: 42606 - DNA, 20 bp, Human adenovirus
aatgcgtaaatctcgcaggt

SEQ ID NO: 42607 - DNA, 20 bp, Human adenovirus
caatttgatctggctgtgat

SEQ ID NO: 42608 - DNA, 20 bp, Human adenovirus
gatctggctgtgatctttca

SEQ ID NO: 42609 - DNA, 20 bp, Human adenovirus
atctggctgtgatctttcac

SEQ ID NO: 42610 - DNA, 20 bp, Human adenovirus
gtctcgcagctgacatctta

SEQ ID NO: 42611 - DNA, 20 bp, Human adenovirus
atgccagttgtataaaatca

SEQ ID NO: 42612 - DNA, 20 bp, Human adenovirus
tataaaatcatacaaatcag

SEQ ID NO: 42613 - DNA, 20 bp, Human adenovirus
acctccaggtacaagttccg

SEQ ID NO: 42614 - DNA, 20 bp, Human adenovirus
tacctggaggtgaactttct

SEQ ID NO: 42615 - DNA, 20 bp, Human adenovirus
aggttagcctgaaaaataaa

SEQ ID NO: 42616 - DNA, 20 bp, Human adenovirus
ggttagcctgaaaaataaaa

SEQ ID NO: 42617 - DNA, 20 bp, Human adenovirus
gcctgaaaaataaaaatatg

SEQ ID NO: 42618 - DNA, 20 bp, Human adenovirus
aattaaagatgcctggcaaa

SEQ ID NO: 42619 - DNA, 20 bp, Human adenovirus
aagatgcctggcaaacgggt

SEQ ID NO: 42620 - DNA, 20 bp, Human adenovirus
gcaggagaaaataacacata

SEQ ID NO: 42621 - DNA, 20 bp, Human adenovirus
gagtcgccctcttgtttagg

SEQ ID NO: 42622 - DNA, 20 bp, Human adenovirus
tttaggcaacatagccccag

SEQ ID NO: 42623 - DNA, 20 bp, Human adenovirus
aggcaacatagccccaggtc

SEQ ID NO: 42624 - DNA, 20 bp, Human adenovirus
ggcaacatagccccaggtcc

SEQ ID NO: 42625 - DNA, 20 bp, Human rhinovirus
acccgaggcgaaaagtgagg

SEQ ID NO: 42626 - DNA, 20 bp, Human rhinovirus
tcgttatccgcaaagtgcct

SEQ ID NO: 42627 - DNA, 20 bp, Human rhinovirus
tccgcaaagtgcctacgaga

SEQ ID NO: 42628 - DNA, 20 bp, Human rhinovirus
tgaagcctatggctggtcgc

SEQ ID NO: 42629 - DNA, 20 bp, Human rhinovirus
gaagcctatggctggtcgct

SEQ ID NO: 42630 - DNA, 20 bp, Human rhinovirus
actcaacccgtggctgatgt

SEQ ID NO: 42631 - DNA, 20 bp, Human rhinovirus
atgtctccctcagttgaggc

SEQ ID NO: 42632 - DNA, 20 bp, Human rhinovirus
aggcttgtgggttttccgat

SEQ ID NO: 42633 - DNA, 20 bp, Human rhinovirus
tgggttttccgataggctca

SEQ ID NO: 42634 - DNA, 20 bp, Human rhinovirus
tccgataggctcaagcaaat

SEQ ID NO: 42635 - DNA, 20 bp, Human rhinovirus
ttcacactcaatgcaacgcc

SEQ ID NO: 42636 - DNA, 20 bp, Human rhinovirus
acactcaatgcaacgccacc

SEQ ID NO: 42637 - DNA, 20 bp, Human rhinovirus
cacagtggatgtttgttggt

SEQ ID NO: 42638 - DNA, 20 bp, Human rhinovirus
acagtggatgtttgttggtg

SEQ ID NO: 42639 - DNA, 20 bp, Human rhinovirus
gttggtggcagtggtgcctg

SEQ ID NO: 42640 - DNA, 20 bp, Human rhinovirus
tcaggagctagacaggccat

SEQ ID NO: 42641 - DNA, 20 bp, Human rhinovirus
caggagctagacaggccatt

SEQ ID NO: 42642 - DNA, 20 bp, Human rhinovirus
aggagctagacaggccatta

SEQ ID NO: 42643 - DNA, 20 bp, Human rhinovirus
aagctaccgcacagggtcta

SEQ ID NO: 42644 - DNA, 20 bp, Human rhinovirus
atgacaacagaagatgaaca

SEQ ID NO: 42645 - DNA, 20 bp, Human rhinovirus
ttgtcccctggattagctcc

SEQ ID NO: 42646 - DNA, 20 bp, Human rhinovirus
tcccctggattagctcccat

SEQ ID NO: 42647 - DNA, 20 bp, Human rhinovirus
gctcccatttcttcagaaga

SEQ ID NO: 42648 - DNA, 20 bp, Human rhinovirus
cttcagaagaacaaagaaag

SEQ ID NO: 42649 - DNA, 20 bp, Human rhinovirus
ttcagaagaacaaagaaaga

SEQ ID NO: 42650 - DNA, 20 bp, Human rhinovirus
ctgggtaggtctgccctatg

SEQ ID NO: 42651 - DNA, 20 bp, Human rhinovirus
tgggtaggtctgccctatgg

SEQ ID NO: 42652 - DNA, 20 bp, Human rhinovirus
cacactagataggagcttca

SEQ ID NO: 42653 - DNA, 20 bp, Human rhinovirus
acactagataggagcttcaa

SEQ ID NO: 42654 - DNA, 20 bp, Human rhinovirus
aagagctggaaaataaactt

SEQ ID NO: 42655 - DNA, 20 bp, Human rhinovirus
gattcctcgaccacccagag

SEQ ID NO: 42656 - DNA, 20 bp, Human rhinovirus
ctcgaccacccagagccacc

SEQ ID NO: 42657 - DNA, 20 bp, Human rhinovirus
agtaccaattacaacaagca

SEQ ID NO: 42658 - DNA, 20 bp, Human rhinovirus
gtaccaattacaacaagcaa

SEQ ID NO: 42659 - DNA, 20 bp, Human rhinovirus
caacaagcaaaagccagata

SEQ ID NO: 42660 - DNA, 20 bp, Human rhinovirus
tggtggcaaattgttgtgtg

SEQ ID NO: 42661 - DNA, 20 bp, Human rhinovirus
ttgtgtgtacatggaaccat

SEQ ID NO: 42662 - DNA, 20 bp, Human rhinovirus
tgtgtacatggaaccatagg

SEQ ID NO: 42663 - DNA, 20 bp, Human rhinovirus
tctccacctgcagtcaccat

SEQ ID NO: 42664 - DNA, 20 bp, Human rhinovirus
ctccacctgcagtcaccatc

SEQ ID NO: 42665 - DNA, 20 bp, Human rhinovirus
tgcaatgcagctcgtggctt

SEQ ID NO: 42666 - DNA, 20 bp, Human rhinovirus
gcaatgcagctcgtggcttg

SEQ ID NO: 42667 - DNA, 20 bp, Human rhinovirus
caatgcagctcgtggcttgg

SEQ ID NO: 42668 - DNA, 20 bp, Human rhinovirus
gaatggattggtgacaagtt

SEQ ID NO: 42669 - DNA, 20 bp, Human rhinovirus
gtgacaagttatccaagttc

SEQ ID NO: 42670 - DNA, 20 bp, Human rhinovirus
gtcaaaatccagatggaaga

SEQ ID NO: 42671 - DNA, 20 bp, Human rhinovirus
tgtcagatggtttcaagcac

SEQ ID NO: 42672 - DNA, 20 bp, Human rhinovirus
gtcagatggtttcaagcact

SEQ ID NO: 42673 - DNA, 20 bp, Human rhinovirus
tcagatggtttcaagcactg

SEQ ID NO: 42674 - DNA, 20 bp, Human rhinovirus
caagcactgaattcataaca

SEQ ID NO: 42675 - DNA, 20 bp, Human rhinovirus
cagggtctgggagatgattc

SEQ ID NO: 42676 - DNA, 20 bp, Human rhinovirus
aactccggggttcattgtag

SEQ ID NO: 42677 - DNA, 20 bp, Human rhinovirus
attgtagatcttcttagtgc

SEQ ID NO: 42678 - DNA, 20 bp, Human rhinovirus
tagatcttcttagtgcctcc

SEQ ID NO: 42679 - DNA, 20 bp, Human rhinovirus
ttagtgcctccaaagaccca

SEQ ID NO: 42680 - DNA, 20 bp, Human rhinovirus
atggtgttgaaaccaaagtt

SEQ ID NO: 42681 - DNA, 20 bp, Human rhinovirus
aaaccaaagttctaaaacaa

SEQ ID NO: 42682 - DNA, 20 bp, Human rhinovirus
taaaacaaacaattgtcaca

SEQ ID NO: 42683 - DNA, 20 bp, Human rhinovirus
tcacagatgaaaatgatgtg

SEQ ID NO: 42684 - DNA, 20 bp, Human rhinovirus
tgtggctagatcgaaatgaa

SEQ ID NO: 42685 - DNA, 20 bp, Human rhinovirus
tatgatatattccccggtga

SEQ ID NO: 42686 - DNA, 20 bp, Human rhinovirus
atgatatattccccggtgaa

SEQ ID NO: 42687 - DNA, 20 bp, Human rhinovirus
tgatatattccccggtgaaa

SEQ ID NO: 42688 - DNA, 20 bp, Human rhinovirus
cccggtgaaaaagaacccgc

SEQ ID NO: 42689 - DNA, 20 bp, Human rhinovirus
acccagaaagatcctagact

SEQ ID NO: 42690 - DNA, 20 bp, Human rhinovirus
agaagggtgtttggtaatct

SEQ ID NO: 42691 - DNA, 20 bp, Human rhinovirus
ggtaatctctatgctggctt

SEQ ID NO: 42692 - DNA, 20 bp, Human rhinovirus
gtaatctctatgctggcttc

SEQ ID NO: 42693 - DNA, 20 bp, Human rhinovirus
catgcaaacccaggaatcct

SEQ ID NO: 42694 - DNA, 20 bp, Human rhinovirus
ctgggtttgcatggaagcca

SEQ ID NO: 42695 - DNA, 20 bp, Human rhinovirus
acccagcacagatagccgtt

SEQ ID NO: 42696 - DNA, 20 bp, Human rhinovirus
ctggcctcaaatatggattg

SEQ ID NO: 42697 - DNA, 20 bp, Human rhinovirus
tggcctcaaatatggattga

SEQ ID NO: 42698 - DNA, 20 bp, Human rhinovirus
acaataacacctgctgacaa

SEQ ID NO: 42699 - DNA, 20 bp, Human rhinovirus
cacaaattgatcagacttgt

SEQ ID NO: 42700 - DNA, 20 bp, Human papillomavirus type 4
gacgacttctgcagacgatt

SEQ ID NO: 42701 - DNA, 20 bp, Human papillomavirus type 4
tgcagacgattcgacatttc

SEQ ID NO: 42702 - DNA, 20 bp, Human papillomavirus type 4
gacatttccttttttgattt

SEQ ID NO: 42703 - DNA, 20 bp, Human papillomavirus type 4
ccttttttgatttgcgcctt

SEQ ID NO: 42704 - DNA, 20 bp, Human papillomavirus type 4
cttttttgatttgcgcctta

SEQ ID NO: 42705 - DNA, 20 bp, Human papillomavirus type 4
caatcttcagatgatgagta

SEQ ID NO: 42706 - DNA, 20 bp, Human papillomavirus type 4
agatgatgagtatgagatta

SEQ ID NO: 42707 - DNA, 20 bp, Human papillomavirus type 4
cagaggaggagtcggtggtt

SEQ ID NO: 42708 - DNA, 20 bp, Human papillomavirus type 4
catttagaatagacacctgt

SEQ ID NO: 42709 - DNA, 20 bp, Human papillomavirus type 4
agaatagacacctgttgcta

SEQ ID NO: 42710 - DNA, 20 bp, Human papillomavirus type 4
tgacttagaagggaataatt

SEQ ID NO: 42711 - DNA, 20 bp, Human papillomavirus type 4
gacttagaagggaataattg

SEQ ID NO: 42712 - DNA, 20 bp, Human papillomavirus type 4
acttagaagggaataattgg

SEQ ID NO: 42713 - DNA, 20 bp, Human papillomavirus type 4
gaagggaataattggtatat

SEQ ID NO: 42714 - DNA, 20 bp, Human papillomavirus type 4
gtatattgtccatgaagcag

SEQ ID NO: 42715 - DNA, 20 bp, Human papillomavirus type 4
agtccgcagttgcaggctgt

SEQ ID NO: 42716 - DNA, 20 bp, Human papillomavirus type 4
caggctgtgaaaataactcc

SEQ ID NO: 42717 - DNA, 20 bp, Human papillomavirus type 4
tttcaggacagtgggatttt

SEQ ID NO: 42718 - DNA, 20 bp, Human papillomavirus type 4
caggacagtgggattttcga

SEQ ID NO: 42719 - DNA, 20 bp, Human papillomavirus type 4
tgctgtgtctttcaggagtt

SEQ ID NO: 42720 - DNA, 20 bp, Human papillomavirus type 4
cgaagtgtacccacagcatt

SEQ ID NO: 42721 - DNA, 20 bp, Human papillomavirus type 4
tacttttataagcatgctat

SEQ ID NO: 42722 - DNA, 20 bp, Human papillomavirus type 4
tataagcatgctatgttaac

SEQ ID NO: 42723 - DNA, 20 bp, Human papillomavirus type 4
ataagcatgctatgttaaca

SEQ ID NO: 42724 - DNA, 20 bp, Human papillomavirus type 4
taagcatgctatgttaacag

SEQ ID NO: 42725 - DNA, 20 bp, Human papillomavirus type 4
cgatgcacttcaagaagcaa

SEQ ID NO: 42726 - DNA, 20 bp, Human papillomavirus type 4
gatgcacttcaagaagcaat

SEQ ID NO: 42727 - DNA, 20 bp, Human papillomavirus type 4
aagaagcaattctgactcat

SEQ ID NO: 42728 - DNA, 20 bp, Human papillomavirus type 4
tgactcatattgagtcacag

SEQ ID NO: 42729 - DNA, 20 bp, Human papillomavirus type 4
agtcacaggagagcactttg

SEQ ID NO: 42730 - DNA, 20 bp, Human papillomavirus type 4
cattatttagctctgatgct

SEQ ID NO: 42731 - DNA, 20 bp, Human papillomavirus type 4
tttagctctgatgctcaaag

SEQ ID NO: 42732 - DNA, 20 bp, Human papillomavirus type 4
agctctgatgctcaaagatt

SEQ ID NO: 42733 - DNA, 20 bp, Human papillomavirus type 4
gctctgatgctcaaagattt

SEQ ID NO: 42734 - DNA, 20 bp, Human papillomavirus type 4
agcagaactggactgtggac

SEQ ID NO: 42735 - DNA, 20 bp, Human papillomavirus type 4
ctcctcctcttcttcttttg

SEQ ID NO: 42736 - DNA, 20 bp, Human papillomavirus type 4
ttcttttgcggggggtttct

SEQ ID NO: 42737 - DNA, 20 bp, Human papillomavirus type 4
ttttgcggggggtttctcct

SEQ ID NO: 42738 - DNA, 20 bp, Human papillomavirus type 4
tgcggggggtttctcctgac

SEQ ID NO: 42739 - DNA, 20 bp, Human papillomavirus type 4
gcggggggtttctcctgacc

SEQ ID NO: 42740 - DNA, 20 bp, Human papillomavirus type 4
tttgaaatgttggagatata

SEQ ID NO: 42741 - DNA, 20 bp, Human papillomavirus type 4
gaaatgttggagatatagaa

SEQ ID NO: 42742 - DNA, 20 bp, Human papillomavirus type 4
aaatgttggagatatagaaa

SEQ ID NO: 42743 - DNA, 20 bp, Human papillomavirus type 4
gagatatagaaaagttaact

SEQ ID NO: 42744 - DNA, 20 bp, Human papillomavirus type 4
actcaaattgctgcaacttc

SEQ ID NO: 42745 - DNA, 20 bp, Human papillomavirus type 4
ctgatcgtttgctgagatgg

SEQ ID NO: 42746 - DNA, 20 bp, Human papillomavirus type 4
gctgagatggttgggaagtg

SEQ ID NO: 42747 - DNA, 20 bp, Human papillomavirus type 4
ctgagatggttgggaagtgt

SEQ ID NO: 42748 - DNA, 20 bp, Human papillomavirus type 4
ggaagtgtaatatacctagg

SEQ ID NO: 42749 - DNA, 20 bp, Human papillomavirus type 4
ggtattggtactgggagagg

SEQ ID NO: 42750 - DNA, 20 bp, Human papillomavirus type 4
gggaccctcagaaataatcc

SEQ ID NO: 42751 - DNA, 20 bp, Human papillomavirus type 4
ggaccctcagaaataatccc

SEQ ID NO: 42752 - DNA, 20 bp, Human papillomavirus type 4
tgttgtgccattagaggatc

SEQ ID NO: 42753 - DNA, 20 bp, Human papillomavirus type 4
tgccattagaggatctgacc

SEQ ID NO: 42754 - DNA, 20 bp, Human papillomavirus type 4
gaggatctgaccatcccaga

SEQ ID NO: 42755 - DNA, 20 bp, Human papillomavirus type 4
gatgtgtcccctatagaacc

SEQ ID NO: 42756 - DNA, 20 bp, Human papillomavirus type 4
gcaactaggggagcctcagc

SEQ ID NO: 42757 - DNA, 20 bp, Human papillomavirus type 4
ggttgtgccagatatgacac

SEQ ID NO: 42758 - DNA, 20 bp, Human papillomavirus type 4
tgccagatatgacacttaca

SEQ ID NO: 42759 - DNA, 20 bp, Human papillomavirus type 4
catgtggagttgctgaggct

SEQ ID NO: 42760 - DNA, 20 bp, Human papillomavirus type 4
atataatagaagggttcagc

SEQ ID NO: 42761 - DNA, 20 bp, Human papillomavirus type 4
tataatagaagggttcagca

SEQ ID NO: 42762 - DNA, 20 bp, Human papillomavirus type 4
agcaaatacctactaggaac

SEQ ID NO: 42763 - DNA, 20 bp, Human papillomavirus type 4
actgacacagccttcccgcg

SEQ ID NO: 42764 - DNA, 20 bp, Human papillomavirus type 4
ctgacacagccttcccgcgc

SEQ ID NO: 42765 - DNA, 20 bp, Human papillomavirus type 4
gagttagcaggcttggacgc

SEQ ID NO: 42766 - DNA, 20 bp, Human papillomavirus type 4
gcaggcttggacgccgaggc

SEQ ID NO: 42767 - DNA, 20 bp, Human papillomavirus type 4
gacgccgaggcacaataaaa

SEQ ID NO: 42768 - DNA, 20 bp, Human papillomavirus type 4
ggcaggcggttcatttttat

SEQ ID NO: 42769 - DNA, 20 bp, Human papillomavirus type 4
atttttattacgacctaagt

SEQ ID NO: 42770 - DNA, 20 bp, Human papillomavirus type 4
caggaagtcaatttagagtg

SEQ ID NO: 42771 - DNA, 20 bp, Human papillomavirus type 4
aggaagtcaatttagagtgt

SEQ ID NO: 42772 - DNA, 20 bp, Human papillomavirus type 4
agagtgtttagattcaattt

SEQ ID NO: 42773 - DNA, 20 bp, Human papillomavirus type 4
gagtgtttagattcaatttg

SEQ ID NO: 42774 - DNA, 20 bp, Human papillomavirus type 4
agattcaatttgccagaccc

SEQ ID NO: 42775 - DNA, 20 bp, Human papillomavirus type 4
tttaaaaatggggaaagata

SEQ ID NO: 42776 - DNA, 20 bp, Human papillomavirus type 4
ttaaaaatggggaaagatat

SEQ ID NO: 42777 - DNA, 20 bp, Human papillomavirus type 4
taaaaatggggaaagatatc

SEQ ID NO: 42778 - DNA, 20 bp, Human papillomavirus type 4
aaaaatggggaaagatatct

SEQ ID NO: 42779 - DNA, 20 bp, Human papillomavirus type 4
aaaatggggaaagatatcta

SEQ ID NO: 42780 - DNA, 20 bp, Human papillomavirus type 4
aattttgttccaccacctcc

SEQ ID NO: 42781 - DNA, 20 bp, Human papillomavirus type 4
tgttccaccacctccctctg

SEQ ID NO: 42782 - DNA, 20 bp, Human papillomavirus type 4
gttccaccacctccctctgg

SEQ ID NO: 42783 - DNA, 20 bp, Human papillomavirus type 4
ttccaccacctccctctgga

SEQ ID NO: 42784 - DNA, 20 bp, Human papillomavirus type 4
caccacctccctctggaatt

SEQ ID NO: 42785 - DNA, 20 bp, Human papillomavirus type 4
ccagtgtccagtctctctga

SEQ ID NO: 42786 - DNA, 20 bp, Human papillomavirus type 4
ggtcaacatgcgtccgcacc

SEQ ID NO: 42787 - DNA, 20 bp, Human papillomavirus type 4
gtcaacatgcgtccgcaccc

SEQ ID NO: 42788 - DNA, 20 bp, Human papillomavirus type 4
tttgcatacacagatcagta

SEQ ID NO: 42789 - DNA, 20 bp, Human papillomavirus type 4
gcatacacagatcagtagga

SEQ ID NO: 42790 - DNA, 20 bp, Human herpesvirus 7
gcagctgacgccggtgtgag

SEQ ID NO: 42791 - DNA, 20 bp, Human herpesvirus 7
tgccaattgttgttctgagt

SEQ ID NO: 42792 - DNA, 20 bp, Human herpesvirus 7
ttgttctgagtaaccagcaa

SEQ ID NO: 42793 - DNA, 20 bp, Human herpesvirus 7
ttctgagtaaccagcaacgt

SEQ ID NO: 42794 - DNA, 20 bp, Human herpesvirus 7
tgagtaaccagcaacgtcaa

SEQ ID NO: 42795 - DNA, 20 bp, Human herpesvirus 7
accacaaattctttggccaa

SEQ ID NO: 42796 - DNA, 20 bp, Human herpesvirus 7
aaaaaccgggcttttttata

SEQ ID NO: 42797 - DNA, 20 bp, Human herpesvirus 7
tttataacggatggatgcca

SEQ ID NO: 42798 - DNA, 20 bp, Human herpesvirus 7
ttataacggatggatgccag

SEQ ID NO: 42799 - DNA, 20 bp, Human herpesvirus 7
tataacggatggatgccagc

SEQ ID NO: 42800 - DNA, 20 bp, Human herpesvirus 7
ataacggatggatgccagcc

SEQ ID NO: 42801 - DNA, 20 bp, Human herpesvirus 7
cgcgtcctcctcatagccag

SEQ ID NO: 42802 - DNA, 20 bp, Human herpesvirus 7
tcatgtgatgcacatacatt

SEQ ID NO: 42803 - DNA, 20 bp, Human herpesvirus 7
ctccgtccctggctatgagg

SEQ ID NO: 42804 - DNA, 20 bp, Influenza C virus
taaacaacgacgtcacatcg

SEQ ID NO: 42805 - DNA, 20 bp, Influenza C virus
taatagtttccaaagtgtat

SEQ ID NO: 42806 - DNA, 20 bp, Influenza C virus
aatagtttccaaagtgtatt

SEQ ID NO: 42807 - DNA, 20 bp, Influenza C virus
atagtttccaaagtgtattt

SEQ ID NO: 42808 - DNA, 20 bp, Influenza C virus
ccaaagtgtatttggttgat

SEQ ID NO: 42809 - DNA, 20 bp, Influenza C virus
ggccttgcagagatgatgga

SEQ ID NO: 42810 - DNA, 20 bp, Influenza C virus
cagagatgatggagaaaaga

SEQ ID NO: 42811 - DNA, 20 bp, Influenza C virus
tttaagcattgtgtaatgga

SEQ ID NO: 42812 - DNA, 20 bp, Influenza C virus
ttaagcattgtgtaatggag

SEQ ID NO: 42813 - DNA, 20 bp, Influenza C virus
taagcattgtgtaatggagg

SEQ ID NO: 42814 - DNA, 20 bp, Influenza C virus
gtggtaatgagaagaaagca

SEQ ID NO: 42815 - DNA, 20 bp, Influenza C virus
agactactgttacttctctc

SEQ ID NO: 42816 - DNA, 20 bp, Influenza C virus
cttctctcaatgccaggatg

SEQ ID NO: 42817 - DNA, 20 bp, Influenza C virus
tctcaatgccaggatgaaca

SEQ ID NO: 42818 - DNA, 20 bp, Influenza C virus
gcagttaatataactggaga

SEQ ID NO: 42819 - DNA, 20 bp, Influenza C virus
ccagctttcactactgcagg

SEQ ID NO: 42820 - DNA, 20 bp, Influenza C virus
cactactgcaggagttaatg

SEQ ID NO: 42821 - DNA, 20 bp, Influenza C virus
actactgcaggagttaatga

SEQ ID NO: 42822 - DNA, 20 bp, Influenza C virus
atgaaggagttgattttaca

SEQ ID NO: 42823 - DNA, 20 bp, Influenza C virus
attttacagctgcaatgtca

SEQ ID NO: 42824 - DNA, 20 bp, Influenza C virus
gcgacatgtttaaaagcgtg

SEQ ID NO: 42825 - DNA, 20 bp, Influenza C virus
cgacatgtttaaaagcgtgt

SEQ ID NO: 42826 - DNA, 20 bp, Influenza C virus
aaaagcgtgtttgaatcagc

SEQ ID NO: 42827 - DNA, 20 bp, Influenza C virus
aaagcgtgtttgaatcagcg

SEQ ID NO: 42828 - DNA, 20 bp, Influenza C virus
gaatcagcggacataaatcc

SEQ ID NO: 42829 - DNA, 20 bp, Human papillomavirus type 6b
tggaaagtgcaaatgcctcc

SEQ ID NO: 42830 - DNA, 20 bp, Human papillomavirus type 6b
tgcaagacgtttaatctatc

SEQ ID NO: 42831 - DNA, 20 bp, Human papillomavirus type 6b
aatctatctatgcatacgtt

SEQ ID NO: 42832 - DNA, 20 bp, Human papillomavirus type 6b
atctatctatgcatacgttg

SEQ ID NO: 42833 - DNA, 20 bp, Human papillomavirus type 6b
caacgtatgcatagatagat

SEQ ID NO: 42834 - DNA, 20 bp, Human papillomavirus type 6b
gattatgctggatatgcaac

SEQ ID NO: 42835 - DNA, 20 bp, Human papillomavirus type 6b
attatgctggatatgcaaca

SEQ ID NO: 42836 - DNA, 20 bp, Human papillomavirus type 6b
tgctggatatgcaacaacag

SEQ ID NO: 42837 - DNA, 20 bp, Human papillomavirus type 6b
aagaagaaactaaacaagac

SEQ ID NO: 42838 - DNA, 20 bp, Human papillomavirus type 6b
gacgtgctaattcggtgcta

SEQ ID NO: 42839 - DNA, 20 bp, Human papillomavirus type 6b
cattgctatgagcaattagt

SEQ ID NO: 42840 - DNA, 20 bp, Human papillomavirus type 6b
ctatgagcaattagtagaca

SEQ ID NO: 42841 - DNA, 20 bp, Human papillomavirus type 6b
gtagacagctcagaagatga

SEQ ID NO: 42842 - DNA, 20 bp, Human papillomavirus type 6b
ttttaaaggttgtgaatctt

SEQ ID NO: 42843 - DNA, 20 bp, Human papillomavirus type 6b
taaaggttgtgaatcttgtc

SEQ ID NO: 42844 - DNA, 20 bp, Human papillomavirus type 6b
atggtagaagctatagtgca

SEQ ID NO: 42845 - DNA, 20 bp, Human papillomavirus type 6b
tggtagaagctatagtgcaa

SEQ ID NO: 42846 - DNA, 20 bp, Human papillomavirus type 6b
gtgtacctgttgggtgttgc

SEQ ID NO: 42847 - DNA, 20 bp, Human papillomavirus type 6b
tgtacctgttgggtgttgca

SEQ ID NO: 42848 - DNA, 20 bp, Human papillomavirus type 6b
ggtgttgcactatagcttct

SEQ ID NO: 42849 - DNA, 20 bp, Human papillomavirus type 6b
gtcctataaacactatagcc

SEQ ID NO: 42850 - DNA, 20 bp, Human papillomavirus type 6b
gacgccattaaacttacaag

SEQ ID NO: 42851 - DNA, 20 bp, Human papillomavirus type 6b
aacttacaagacagccaaaa

SEQ ID NO: 42852 - DNA, 20 bp, Human papillomavirus type 6b
caagacagccaaaaaaggta

SEQ ID NO: 42853 - DNA, 20 bp, Human papillomavirus type 6b
accttttttggctgtcttgt

SEQ ID NO: 42854 - DNA, 20 bp, Human papillomavirus type 6b
gaattgttaaaatgtaaaga

SEQ ID NO: 42855 - DNA, 20 bp, Human papillomavirus type 6b
ttaaaatgtaaagatttacg

SEQ ID NO: 42856 - DNA, 20 bp, Human papillomavirus type 6b
aaatgtaaagatttacgggc

SEQ ID NO: 42857 - DNA, 20 bp, Human papillomavirus type 6b
acattttaacaattccaata

SEQ ID NO: 42858 - DNA, 20 bp, Human papillomavirus type 6b
cattttaacaattccaatat

SEQ ID NO: 42859 - DNA, 20 bp, Human papillomavirus type 6b
acagaaatggtgcagtgggc

SEQ ID NO: 42860 - DNA, 20 bp, Human papillomavirus type 6b
catttgaatatgcacaaagg

SEQ ID NO: 42861 - DNA, 20 bp, Human papillomavirus type 6b
gaatatgcacaaaggggaga

SEQ ID NO: 42862 - DNA, 20 bp, Human papillomavirus type 6b
aatatgcacaaaggggagat

SEQ ID NO: 42863 - DNA, 20 bp, Human papillomavirus type 6b
gaatcaaaatctcccctttg

SEQ ID NO: 42864 - DNA, 20 bp, Human papillomavirus type 6b
aggattctgaggacgaggaa

SEQ ID NO: 42865 - DNA, 20 bp, Human papillomavirus type 6b
tgaggacgaggaagatggaa

SEQ ID NO: 42866 - DNA, 20 bp, Human papillomavirus type 6b
agatgcgtgccaggaacagt

SEQ ID NO: 42867 - DNA, 20 bp, Human papillomavirus type 6b
gatgcgtgccaggaacagtt

SEQ ID NO: 42868 - DNA, 20 bp, Human papillomavirus type 6b
taacaactgttcctggcacg

SEQ ID NO: 42869 - DNA, 20 bp, Human papillomavirus type 6b
aaatgcaaatgcatttagaa

SEQ ID NO: 42870 - DNA, 20 bp, Human papillomavirus type 6b
agaatcattattaaggactg

SEQ ID NO: 42871 - DNA, 20 bp, Human papillomavirus type 6b
gaatcattattaaggactga

SEQ ID NO: 42872 - DNA, 20 bp, Human papillomavirus type 6b
ttaaggactgagtatagtat

SEQ ID NO: 42873 - DNA, 20 bp, Human papillomavirus type 6b
aggactgagtatagtatgga

SEQ ID NO: 42874 - DNA, 20 bp, Human papillomavirus type 6b
caacgccttgtgtgtggccc

SEQ ID NO: 42875 - DNA, 20 bp, Human papillomavirus type 6b
tgtgtggcccacattggacc

SEQ ID NO: 42876 - DNA, 20 bp, Human papillomavirus type 6b
gacccgtggacagtggaaac

SEQ ID NO: 42877 - DNA, 20 bp, Human papillomavirus type 6b
agctacgcctatagtgcaat

SEQ ID NO: 42878 - DNA, 20 bp, Human papillomavirus type 6b
aaattgcactataggcgtag

SEQ ID NO: 42879 - DNA, 20 bp, Human papillomavirus type 6b
ttagatgttgtaaaaatacc

SEQ ID NO: 42880 - DNA, 20 bp, Human papillomavirus type 6b
tagatgttgtaaaaataccc

SEQ ID NO: 42881 - DNA, 20 bp, Human papillomavirus type 6b
agatgttgtaaaaatacccc

SEQ ID NO: 42882 - DNA, 20 bp, Human papillomavirus type 6b
gatgttgtaaaaataccccc

SEQ ID NO: 42883 - DNA, 20 bp, Human papillomavirus type 6b
taaaaataccccctaccatt

SEQ ID NO: 42884 - DNA, 20 bp, Human papillomavirus type 6b
tatatttactattgtggctg

SEQ ID NO: 42885 - DNA, 20 bp, Human papillomavirus type 6b
atatttactattgtggctgc

SEQ ID NO: 42886 - DNA, 20 bp, Human papillomavirus type 6b
tatttactattgtggctgct

SEQ ID NO: 42887 - DNA, 20 bp, Human papillomavirus type 6b
actattgtggctgctattaa

SEQ ID NO: 42888 - DNA, 20 bp, Human papillomavirus type 6b
ctattgtggctgctattaac

SEQ ID NO: 42889 - DNA, 20 bp, Human papillomavirus type 6b
ctggtactgcacctcggcct

SEQ ID NO: 42890 - DNA, 20 bp, Human papillomavirus type 6b
caccaggtgcaggttacaga

SEQ ID NO: 42891 - DNA, 20 bp, Human papillomavirus type 6b
cagaccctgcatttctttcc

SEQ ID NO: 42892 - DNA, 20 bp, Human papillomavirus type 6b
ctttccactcctcaacgctt

SEQ ID NO: 42893 - DNA, 20 bp, Human papillomavirus type 6b
tttccactcctcaacgctta

SEQ ID NO: 42894 - DNA, 20 bp, Human papillomavirus type 6b
cattgtcacttcctaatgac

SEQ ID NO: 42895 - DNA, 20 bp, Human papillomavirus type 6b
tcacttcctaatgacctgtt

SEQ ID NO: 42896 - DNA, 20 bp, Human papillomavirus type 6b
ctaatgacctgtttttacaa

SEQ ID NO: 42897 - DNA, 20 bp, Human papillomavirus type 6b
ttacaatctggccctgatat

SEQ ID NO: 42898 - DNA, 20 bp, Human papillomavirus type 6b
tacaatctggccctgatata

SEQ ID NO: 42899 - DNA, 20 bp, Human papillomavirus type 6b
ttgccacggatgcttatgtt

SEQ ID NO: 42900 - DNA, 20 bp, Human papillomavirus type 6b
ccacggatgcttatgttact

SEQ ID NO: 42901 - DNA, 20 bp, Human papillomavirus type 6b
tgttactcgcaccaacatat

SEQ ID NO: 42902 - DNA, 20 bp, Human papillomavirus type 6b
ctcgcaccaacatattttat

SEQ ID NO: 42903 - DNA, 20 bp, Human papillomavirus type 6b
tatcatgccagcagttctag

SEQ ID NO: 42904 - DNA, 20 bp, Human papillomavirus type 6b
acacaggctttggtgctatg

SEQ ID NO: 42905 - DNA, 20 bp, Human papillomavirus type 6b
ggtgctatgaattttgctga

SEQ ID NO: 42906 - DNA, 20 bp, Human papillomavirus type 6b
gtgctatgaattttgctgat

SEQ ID NO: 42907 - DNA, 20 bp, Human papillomavirus type 6b
tgctgatttgcagaccaata

SEQ ID NO: 42908 - DNA, 20 bp, Human papillomavirus type 6b
gctgatttgcagaccaataa

SEQ ID NO: 42909 - DNA, 20 bp, Human papillomavirus type 6b
tttaataagccatattggct

SEQ ID NO: 42910 - DNA, 20 bp, Human papillomavirus type 6b
aataagccatattggctaca

SEQ ID NO: 42911 - DNA, 20 bp, Human papillomavirus type 6b
ataagccatattggctacaa

SEQ ID NO: 42912 - DNA, 20 bp, Human papillomavirus type 6b
gctacaaaaagcccagggac

SEQ ID NO: 42913 - DNA, 20 bp, Human papillomavirus type 6b
gttggggtaatcaactgttt

SEQ ID NO: 42914 - DNA, 20 bp, Human papillomavirus type 6b
ccttactcataaacctgtct

SEQ ID NO: 42915 - DNA, 20 bp, Human papillomavirus type 6b
ctcataaacctgtctttgtg

SEQ ID NO: 42916 - DNA, 20 bp, Human papillomavirus type 6b
gtgttatacttttatgcact

SEQ ID NO: 42917 - DNA, 20 bp, Human papillomavirus type 6b
tgttatacttttatgcactg

SEQ ID NO: 42918 - DNA, 20 bp, Human papillomavirus type 6b
tacttttatgcactgtagcc

SEQ ID NO: 42919 - DNA, 20 bp, Hepatitis C virus
ggaaccggtgagtacaccgg

SEQ ID NO: 42920 - DNA, 20 bp, Hepatitis C virus
cttggattaacccgctcaat

SEQ ID NO: 42921 - DNA, 20 bp, Hepatitis C virus
ttggattaacccgctcaatg

SEQ ID NO: 42922 - DNA, 20 bp, Hepatitis C virus
gattaacccgctcaatgccc

SEQ ID NO: 42923 - DNA, 20 bp, Hepatitis C virus
acccgctcaatgcccggaaa

SEQ ID NO: 42924 - DNA, 20 bp, Hepatitis C virus
gcggagtttacttgttgccg

SEQ ID NO: 42925 - DNA, 20 bp, Hepatitis C virus
acttgttgccgcgcaggggc

SEQ ID NO: 42926 - DNA, 20 bp, Hepatitis C virus
cttgttgccgcgcaggggcc

SEQ ID NO: 42927 - DNA, 20 bp, Hepatitis C virus
ttgccgcgcaggggccccag

SEQ ID NO: 42928 - DNA, 20 bp, Hepatitis C virus
ccgcgcaggggccccagatt

SEQ ID NO: 42929 - DNA, 20 bp, Hepatitis C virus
ggaggacgggatcaattatg

SEQ ID NO: 42930 - DNA, 20 bp, Hepatitis C virus
gaggacgggatcaattatgc

SEQ ID NO: 42931 - DNA, 20 bp, Hepatitis C virus
tgcaacagggaatctccccg

SEQ ID NO: 42932 - DNA, 20 bp, Hepatitis C virus
cctgttgcataattgatccc

SEQ ID NO: 42933 - DNA, 20 bp, Hepatitis C virus
cataattgatcccgtcctcc

SEQ ID NO: 42934 - DNA, 20 bp, Hepatitis C virus
ctcctaccgtcgcagcgcca

SEQ ID NO: 42935 - DNA, 20 bp, Hepatitis C virus
ctctctggaggccactgggg

SEQ ID NO: 42936 - DNA, 20 bp, Hepatitis C virus
cagcatgcaggccaattggg

SEQ ID NO: 42937 - DNA, 20 bp, Hepatitis C virus
agcatgcaggccaattgggc

SEQ ID NO: 42938 - DNA, 20 bp, Hepatitis C virus
ggccaaagtcatcttggtcc

SEQ ID NO: 42939 - DNA, 20 bp, Hepatitis C virus
ggcccaattggcctgcatgc

SEQ ID NO: 42940 - DNA, 20 bp, Hepatitis C virus
acagctacggccaaggctgg

SEQ ID NO: 42941 - DNA, 20 bp, Hepatitis C virus
ttgctggcactacgcgcctc

SEQ ID NO: 42942 - DNA, 20 bp, Hepatitis C virus
gcgaccccgagtgggcccca

SEQ ID NO: 42943 - DNA, 20 bp, Hepatitis C virus
gccgtagctgtcaaggctct

SEQ ID NO: 42944 - DNA, 20 bp, Hepatitis C virus
ggatgcgtgtggatgaacag

SEQ ID NO: 42945 - DNA, 20 bp, Hepatitis C virus
gatgcgtgtggatgaacagt

SEQ ID NO: 42946 - DNA, 20 bp, Hepatitis C virus
accaaaacctgtggcgcccc

SEQ ID NO: 42947 - DNA, 20 bp, Hepatitis C virus
acaccaataatgggacctgg

SEQ ID NO: 42948 - DNA, 20 bp, Hepatitis C virus
ttggtgttaacctcgcatgg

SEQ ID NO: 42949 - DNA, 20 bp, Hepatitis C virus
gagcacagggatcgggtaga

SEQ ID NO: 42950 - DNA, 20 bp, Hepatitis C virus
ccactacagcgtggcagatc

SEQ ID NO: 42951 - DNA, 20 bp, Hepatitis C virus
ccagctgctgctgcctacgc

SEQ ID NO: 42952 - DNA, 20 bp, Hepatitis C virus
tctcctgcttctgatgctgc

SEQ ID NO: 42953 - DNA, 20 bp, Hepatitis C virus
ctcctgcttctgatgctgcc

SEQ ID NO: 42954 - DNA, 20 bp, Hepatitis C virus
tcctgcttctgatgctgcct

SEQ ID NO: 42955 - DNA, 20 bp, Hepatitis C virus
tgatgctgcctgagagggct

SEQ ID NO: 42956 - DNA, 20 bp, Hepatitis C virus
catccttcaacgtgcgcggg

SEQ ID NO: 42957 - DNA, 20 bp, Hepatitis C virus
aacgtgcgcgggcctcgcga

SEQ ID NO: 42958 - DNA, 20 bp, Hepatitis C virus
ttcttgcagtcctggtctgt

SEQ ID NO: 42959 - DNA, 20 bp, Hepatitis C virus
ttgcagtcctggtctgtcca

SEQ ID NO: 42960 - DNA, 20 bp, Hepatitis C virus
cagtcctggtctgtccagac

SEQ ID NO: 42961 - DNA, 20 bp, Hepatitis C virus
cctgtttcggccaggttggg

SEQ ID NO: 42962 - DNA, 20 bp, Hepatitis C virus
cggccaggttgggcaatgag

SEQ ID NO: 42963 - DNA, 20 bp, Hepatitis C virus
ggccaggttgggcaatgaga

SEQ ID NO: 42964 - DNA, 20 bp, Hepatitis C virus
ggcaatgagatcttgctcgg

SEQ ID NO: 42965 - DNA, 20 bp, Hepatitis C virus
ctcggaccagccgatacaga

SEQ ID NO: 42966 - DNA, 20 bp, Hepatitis C virus
tccaccgctacgcagtcctt

SEQ ID NO: 42967 - DNA, 20 bp, Hepatitis C virus
ctgggtactgcggttaacgg

SEQ ID NO: 42968 - DNA, 20 bp, Hepatitis C virus
acggcgtgatgtggaccgtc

SEQ ID NO: 42969 - DNA, 20 bp, Hepatitis C virus
gcacccgccccgtggtagac

SEQ ID NO: 42970 - DNA, 20 bp, Hepatitis C virus
accgcagtacccaggaagga

SEQ ID NO: 42971 - DNA, 20 bp, Hepatitis C virus
gtcccggttgaatctcttga

SEQ ID NO: 42972 - DNA, 20 bp, Hepatitis C virus
aatctcttgagactaccatg

SEQ ID NO: 42973 - DNA, 20 bp, Hepatitis C virus
agactaccatgagatcacca

SEQ ID NO: 42974 - DNA, 20 bp, Hepatitis C virus
actgacaactcaacaccccc

SEQ ID NO: 42975 - DNA, 20 bp, Hepatitis C virus
agttgtcagtgaacactggt

SEQ ID NO: 42976 - DNA, 20 bp, Hepatitis C virus
ctggctgatggaggttgcag

SEQ ID NO: 42977 - DNA, 20 bp, Hepatitis C virus
ccatacgttgagtacgtgat

SEQ ID NO: 42978 - DNA, 20 bp, Hepatitis C virus
agtacgtgattggcgcaccc

SEQ ID NO: 42979 - DNA, 20 bp, Hepatitis C virus
gcgcacccgtggtgatggtc

SEQ ID NO: 42980 - DNA, 20 bp, Hepatitis C virus
tacggcaaggcgatccctct

SEQ ID NO: 42981 - DNA, 20 bp, Hepatitis C virus
acggcaaggcgatccctctg

SEQ ID NO: 42982 - DNA, 20 bp, Hepatitis C virus
cggcaaggcgatccctctgg

SEQ ID NO: 42983 - DNA, 20 bp, Hepatitis C virus
tgccattcaaagaaaaagtg

SEQ ID NO: 42984 - DNA, 20 bp, Hepatitis C virus
aaagaaaaagtgcgatgaac

SEQ ID NO: 42985 - DNA, 20 bp, Hepatitis C virus
ggcacataccggtatgtcac

SEQ ID NO: 42986 - DNA, 20 bp, Hepatitis C virus
ttgcttaccaagcgacggtg

SEQ ID NO: 42987 - DNA, 20 bp, Hepatitis C virus
cttaccaagcgacggtgtcg

SEQ ID NO: 42988 - DNA, 20 bp, Hepatitis C virus
ccaagcgacggtgtcggcca

SEQ ID NO: 42989 - DNA, 20 bp, Hepatitis C virus
gccttaagcccaccctgcac

SEQ ID NO: 42990 - DNA, 20 bp, Hepatitis C virus
agcccaccctgcacgggccc

SEQ ID NO: 42991 - DNA, 20 bp, Hepatitis C virus
ctgatcgcgaagtgctctac

SEQ ID NO: 42992 - DNA, 20 bp, Hepatitis C virus
gacgaaatggaggagtgttc

SEQ ID NO: 42993 - DNA, 20 bp, Hepatitis C virus
caaacacctcccactagtcg

SEQ ID NO: 42994 - DNA, 20 bp, Hepatitis C virus
taacccgtgctcgactagtg

SEQ ID NO: 42995 - DNA, 20 bp, Hepatitis C virus
ggaacactcctccatttcgt

SEQ ID NO: 42996 - DNA, 20 bp, Hepatitis C virus
actgctgccgttacaagccc

SEQ ID NO: 42997 - DNA, 20 bp, Hepatitis C virus
ctgctgccgttacaagccct

SEQ ID NO: 42998 - DNA, 20 bp, Hepatitis C virus
caagccctctgaccacccaa

SEQ ID NO: 42999 - DNA, 20 bp, Hepatitis C virus
ttaacatcttggggggatgg

SEQ ID NO: 43000 - DNA, 20 bp, Hepatitis C virus
taacatcttggggggatggg

SEQ ID NO: 43001 - DNA, 20 bp, Hepatitis C virus
gtggtggaggtggtatgccc

SEQ ID NO: 43002 - DNA, 20 bp, Hepatitis C virus
tgcgccgccacgtgggcccg

SEQ ID NO: 43003 - DNA, 20 bp, Hepatitis C virus
gcgccgccacgtgggcccgg

SEQ ID NO: 43004 - DNA, 20 bp, Hepatitis C virus
cgccgccacgtgggcccggg

SEQ ID NO: 43005 - DNA, 20 bp, Hepatitis C virus
gacggttcatccactgcacg

SEQ ID NO: 43006 - DNA, 20 bp, Hepatitis C virus
aaagcaaagttcgtgccctt

SEQ ID NO: 43007 - DNA, 20 bp, Hepatitis C virus
gtgcccttaatgccaggcat

SEQ ID NO: 43008 - DNA, 20 bp, Hepatitis C virus
atgccaggcatccccctcct

SEQ ID NO: 43009 - DNA, 20 bp, Hepatitis C virus
tagcctcttggccatgagag

SEQ ID NO: 43010 - DNA, 20 bp, Hepatitis C virus
gccatgagaggagggggatg

SEQ ID NO: 43011 - DNA, 20 bp, Hepatitis C virus
cggccccagagctcttcacg

SEQ ID NO: 43012 - DNA, 20 bp, Hepatitis C virus
acggaagtggacggcatcag

SEQ ID NO: 43013 - DNA, 20 bp, Hepatitis C virus
ctgcgggacgaagtgtcgtt

SEQ ID NO: 43014 - DNA, 20 bp, Hepatitis C virus
tcagtaggactcaattcgtt

SEQ ID NO: 43015 - DNA, 20 bp, Hepatitis C virus
agtcctactgagaacgacac

SEQ ID NO: 43016 - DNA, 20 bp, Hepatitis C virus
ctcggcgagtcagctttcgc

SEQ ID NO: 43017 - DNA, 20 bp, Hepatitis C virus
cgccccgtcttcttcaggcc

SEQ ID NO: 43018 - DNA, 20 bp, Hepatitis C virus
gccccgtcttcttcaggcca

SEQ ID NO: 43019 - DNA, 20 bp, Hepatitis C virus
ttcaggccacgtgtaccgct

SEQ ID NO: 43020 - DNA, 20 bp, Hepatitis C virus
aggccacgtgtaccgctccc

SEQ ID NO: 43021 - DNA, 20 bp, Hepatitis C virus
cgctctgcctccggcaaagc

SEQ ID NO: 43022 - DNA, 20 bp, Hepatitis C virus
cctctcccaggaggaaacgg

SEQ ID NO: 43023 - DNA, 20 bp, Hepatitis C virus
cctcctgggagagggaacag

SEQ ID NO: 43024 - DNA, 20 bp, Hepatitis C virus
ctcctgggagagggaacagg

SEQ ID NO: 43025 - DNA, 20 bp, Hepatitis C virus
gccggaggcagagcgcaacc

SEQ ID NO: 43026 - DNA, 20 bp, Hepatitis C virus
gcggatcggaggacgtcgtg

SEQ ID NO: 43027 - DNA, 20 bp, Hepatitis C virus
gatgtcatactcgtggactg

SEQ ID NO: 43028 - DNA, 20 bp, Hepatitis C virus
taacaccttgcgcggctgaa

SEQ ID NO: 43029 - DNA, 20 bp, Hepatitis C virus
cgcggctgaagaatcaaagc

SEQ ID NO: 43030 - DNA, 20 bp, Hepatitis C virus
gcagctttgattcttcagcc

SEQ ID NO: 43031 - DNA, 20 bp, Hepatitis C virus
ggctacgggaaaaaggatgt

SEQ ID NO: 43032 - DNA, 20 bp, Hepatitis C virus
ggagccattcccgcaaggcc

SEQ ID NO: 43033 - DNA, 20 bp, Hepatitis C virus
ccgcaaggccattaaccaca

SEQ ID NO: 43034 - DNA, 20 bp, Hepatitis C virus
accacatcagctccgtgtgg

SEQ ID NO: 43035 - DNA, 20 bp, Hepatitis C virus
ctggacgacaacaatacccc

SEQ ID NO: 43036 - DNA, 20 bp, Hepatitis C virus
gaagtcgaagaacgacccaa

SEQ ID NO: 43037 - DNA, 20 bp, Hepatitis C virus
tcttatgatacccgctgctt

SEQ ID NO: 43038 - DNA, 20 bp, Hepatitis C virus
tgatacccgctgctttgact

SEQ ID NO: 43039 - DNA, 20 bp, Hepatitis C virus
gactccactgtaaccgaaaa

SEQ ID NO: 43040 - DNA, 20 bp, Hepatitis C virus
actccactgtaaccgaaaag

SEQ ID NO: 43041 - DNA, 20 bp, Hepatitis C virus
gtttgcggtgatgacttagt

SEQ ID NO: 43042 - DNA, 20 bp, Hepatitis C virus
gcggtgatgacttagtcgtc

SEQ ID NO: 43043 - DNA, 20 bp, Hepatitis C virus
cggtgatgacttagtcgtca

SEQ ID NO: 43044 - DNA, 20 bp, Hepatitis C virus
gtcgtcatcgctgagagcga

SEQ ID NO: 43045 - DNA, 20 bp, Hepatitis C virus
acggaggctatgacgagata

SEQ ID NO: 43046 - DNA, 20 bp, Hepatitis C virus
cctgccgctgccaaactcga

SEQ ID NO: 43047 - DNA, 20 bp, Hepatitis C virus
atcgggttggtttacggtag

SEQ ID NO: 43048 - DNA, 20 bp, Hepatitis C virus
tcgggttggtttacggtagg

SEQ ID NO: 43049 - DNA, 20 bp, Hepatitis C virus
gtttacggtaggcgccggcg

SEQ ID NO: 43050 - DNA, 20 bp, Hepatitis C virus
acggtaggcgccggcggggg

SEQ ID NO: 43051 - DNA, 20 bp, Human rhinovirus 14
gggtgtccgtgtttctcatt

SEQ ID NO: 43052 - DNA, 20 bp, Human rhinovirus 14
ggtgtccgtgtttctcattt

SEQ ID NO: 43053 - DNA, 20 bp, Human rhinovirus 14
ctcatttttcttcatattgt

SEQ ID NO: 43054 - DNA, 20 bp, Human rhinovirus 14
tcatttttcttcatattgtc

SEQ ID NO: 43055 - DNA, 20 bp, Human rhinovirus 14
ttcttcatattgtcttatgg

SEQ ID NO: 43056 - DNA, 20 bp, Human rhinovirus 14
agggtgcaccagcattgaat

SEQ ID NO: 43057 - DNA, 20 bp, Human rhinovirus 14
aattcacccaatgttgaggc

SEQ ID NO: 43058 - DNA, 20 bp, Human rhinovirus 14
acccaatgttgaggcctgtg

SEQ ID NO: 43059 - DNA, 20 bp, Human rhinovirus 14
aggcctgtggttatagtgat

SEQ ID NO: 43060 - DNA, 20 bp, Human rhinovirus 14
tagtgatagagtacaacaaa

SEQ ID NO: 43061 - DNA, 20 bp, Human rhinovirus 14
taaaggctggtgctggaaat

SEQ ID NO: 43062 - DNA, 20 bp, Human rhinovirus 14
ccagatgcactcaaggatat

SEQ ID NO: 43063 - DNA, 20 bp, Human rhinovirus 14
gggcaaaacatgtttttcca

SEQ ID NO: 43064 - DNA, 20 bp, Human rhinovirus 14
tgcccgaacacacccatatc

SEQ ID NO: 43065 - DNA, 20 bp, Human rhinovirus 14
gcccgaacacacccatatcc

SEQ ID NO: 43066 - DNA, 20 bp, Human rhinovirus 14
ttgggacaaacctgtttatt

SEQ ID NO: 43067 - DNA, 20 bp, Human rhinovirus 14
tgggacaaacctgtttattg

SEQ ID NO: 43068 - DNA, 20 bp, Human rhinovirus 14
gggacaaacctgtttattgg

SEQ ID NO: 43069 - DNA, 20 bp, Human rhinovirus 14
ggacaaacctgtttattggt

SEQ ID NO: 43070 - DNA, 20 bp, Human rhinovirus 14
attggtgatggggtcttcaa

SEQ ID NO: 43071 - DNA, 20 bp, Human rhinovirus 14
tctgggatattggtctgcaa

SEQ ID NO: 43072 - DNA, 20 bp, Human rhinovirus 14
gtctgcaatccaccatagta

SEQ ID NO: 43073 - DNA, 20 bp, Human rhinovirus 14
agatatactgatccagatac

SEQ ID NO: 43074 - DNA, 20 bp, Human rhinovirus 14
gatatactgatccagataca

SEQ ID NO: 43075 - DNA, 20 bp, Human rhinovirus 14
tcattactatggtggattgc

SEQ ID NO: 43076 - DNA, 20 bp, Human rhinovirus 14
cactcactgaaggcttaggt

SEQ ID NO: 43077 - DNA, 20 bp, Human rhinovirus 14
ggtgatgaattagaagaagt

SEQ ID NO: 43078 - DNA, 20 bp, Human rhinovirus 14
gaagaagtcatcgttgagaa

SEQ ID NO: 43079 - DNA, 20 bp, Human rhinovirus 14
agaaaacgaaacagacggtg

SEQ ID NO: 43080 - DNA, 20 bp, Human rhinovirus 14
tggaccagatgagattgagg

SEQ ID NO: 43081 - DNA, 20 bp, Human rhinovirus 14
cacatggcaaagtgcttcaa

SEQ ID NO: 43082 - DNA, 20 bp, Human rhinovirus 14
aaaccccagtgtattcttca

SEQ ID NO: 43083 - DNA, 20 bp, Human rhinovirus 14
ttcaaggtgggggatacatc

SEQ ID NO: 43084 - DNA, 20 bp, Human rhinovirus 14
aagaatacactggggtttga

SEQ ID NO: 43085 - DNA, 20 bp, Human rhinovirus 14
gaagcactttgccatgtgta

SEQ ID NO: 43086 - DNA, 20 bp, Human rhinovirus 14
aagcatggattccaagagca

SEQ ID NO: 43087 - DNA, 20 bp, Human rhinovirus 14
caagagcacccagagcacta

SEQ ID NO: 43088 - DNA, 20 bp, Human rhinovirus 14
tcctaagaatacagaaccag

SEQ ID NO: 43089 - DNA, 20 bp, Human rhinovirus 14
tgtattcttaggataatttg

SEQ ID NO: 43090 - DNA, 20 bp, Human rhinovirus 14
ttaggataatttgtgcgccc

SEQ ID NO: 43091 - DNA, 20 bp, Human rhinovirus 14
actattccacatattacaga

SEQ ID NO: 43092 - DNA, 20 bp, Human rhinovirus 14
ctattccacatattacagaa

SEQ ID NO: 43093 - DNA, 20 bp, Human rhinovirus 14
cacatattacagaaagtatt

SEQ ID NO: 43094 - DNA, 20 bp, Human rhinovirus 14
cagaaagtattaccccataa

SEQ ID NO: 43095 - DNA, 20 bp, Human rhinovirus 14
ccccataatttgcgaaaagc

SEQ ID NO: 43096 - DNA, 20 bp, Human rhinovirus 14
gattgttaacagctgaaggt

SEQ ID NO: 43097 - DNA, 20 bp, Human rhinovirus 14
ttaacagctgaaggtagtgg

SEQ ID NO: 43098 - DNA, 20 bp, Human rhinovirus 14
acagctgaaggtagtggata

SEQ ID NO: 43099 - DNA, 20 bp, Human rhinovirus 14
gttttgctgacatacgacag

SEQ ID NO: 43100 - DNA, 20 bp, Human rhinovirus 14
ttttgctgacatacgacagt

SEQ ID NO: 43101 - DNA, 20 bp, Human rhinovirus 14
cggccactctagcactactt

SEQ ID NO: 43102 - DNA, 20 bp, Human rhinovirus 14
gatgtgatggatctccttgg

SEQ ID NO: 43103 - DNA, 20 bp, Human rhinovirus 14
gagatttctgaagatgtaca

SEQ ID NO: 43104 - DNA, 20 bp, Human rhinovirus 14
ctgaagatgtacatttccaa

SEQ ID NO: 43105 - DNA, 20 bp, Human rhinovirus 14
tgaagatgtacatttccaaa

SEQ ID NO: 43106 - DNA, 20 bp, Human rhinovirus 14
tggtaaatcattaacaacat

SEQ ID NO: 43107 - DNA, 20 bp, Human rhinovirus 14
acaacatccattgtgggacg

SEQ ID NO: 43108 - DNA, 20 bp, Human rhinovirus 14
tgggacgtgcaattgcagaa

SEQ ID NO: 43109 - DNA, 20 bp, Human rhinovirus 14
cagaacacttcaattcagca

SEQ ID NO: 43110 - DNA, 20 bp, Human rhinovirus 14
aattcagcagtatattcact

SEQ ID NO: 43111 - DNA, 20 bp, Human rhinovirus 14
ttcaccagtaattttgttct

SEQ ID NO: 43112 - DNA, 20 bp, Human rhinovirus 14
accagtaattttgttctagc

SEQ ID NO: 43113 - DNA, 20 bp, Human rhinovirus 14
tgttctagcctccacaaatt

SEQ ID NO: 43114 - DNA, 20 bp, Human rhinovirus 14
gttctagcctccacaaattc

SEQ ID NO: 43115 - DNA, 20 bp, Human rhinovirus 14
ttctagcctccacaaattct

SEQ ID NO: 43116 - DNA, 20 bp, Human rhinovirus 14
gccctgtaacaatggcagga

SEQ ID NO: 43117 - DNA, 20 bp, Human rhinovirus 14
ttaatttgagtagcaccccc

SEQ ID NO: 43118 - DNA, 20 bp, Human rhinovirus 14
atttgagtagcacccccact

SEQ ID NO: 43119 - DNA, 20 bp, Human rhinovirus 14
gagtagcacccccactaaca

SEQ ID NO: 43120 - DNA, 20 bp, Human rhinovirus 14
agtagcacccccactaacag

SEQ ID NO: 43121 - DNA, 20 bp, Human rhinovirus 14
catcccagtgtattttatga

SEQ ID NO: 43122 - DNA, 20 bp, Human rhinovirus 14
tatgatgtttttccaggtga

SEQ ID NO: 43123 - DNA, 20 bp, Human rhinovirus 14
atgatgtttttccaggtgac

SEQ ID NO: 43124 - DNA, 20 bp, Human rhinovirus 14
tgatgtttttccaggtgaca

SEQ ID NO: 43125 - DNA, 20 bp, Human rhinovirus 14
ttccaggtgacaaggaacct

SEQ ID NO: 43126 - DNA, 20 bp, Human rhinovirus 14
attgaagcctccagtttgaa

SEQ ID NO: 43127 - DNA, 20 bp, Human rhinovirus 14
aagcctccagtttgaatgat

SEQ ID NO: 43128 - DNA, 20 bp, Human rhinovirus 14
gaatgattctgttaacatga

SEQ ID NO: 43129 - DNA, 20 bp, Human rhinovirus 14
aatgattctgttaacatgag

SEQ ID NO: 43130 - DNA, 20 bp, Human rhinovirus 14
tgttaacatgagaatgaaac

SEQ ID NO: 43131 - DNA, 20 bp, Human rhinovirus 14
gcaactcttggtaaaaatta

SEQ ID NO: 43132 - DNA, 20 bp, Human rhinovirus 14
gtaaaaattatggactaacc

SEQ ID NO: 43133 - DNA, 20 bp, Human rhinovirus 14
tggactaaccatcacacccc

SEQ ID NO: 43134 - DNA, 20 bp, Human rhinovirus 14
tacaaaaatgacatgggaaa

SEQ ID NO: 43135 - DNA, 20 bp, Human rhinovirus 14
acaaaaatgacatgggaaaa

SEQ ID NO: 43136 - DNA, 20 bp, Human genital-associated circular DNA virus-1
cgctcaatgcggagagctgg

SEQ ID NO: 43137 - DNA, 20 bp, Human genital-associated circular DNA virus-1
acgactctattacttcatac

SEQ ID NO: 43138 - DNA, 20 bp, Human genital-associated circular DNA virus-1
cttcatacccagctgagtgt

SEQ ID NO: 43139 - DNA, 20 bp, Human genital-associated circular DNA virus-1
atacccagctgagtgtctca

SEQ ID NO: 43140 - DNA, 20 bp, Human genital-associated circular DNA virus-1
gtcgagagaaccacgctgat

SEQ ID NO: 43141 - DNA, 20 bp, Human genital-associated circular DNA virus-1
tcgcaggagggctcagtacc

SEQ ID NO: 43142 - DNA, 20 bp, Human genital-associated circular DNA virus-1
agggaactgacaacgtctgg

SEQ ID NO: 43143 - DNA, 20 bp, Human genital-associated circular DNA virus-1
cagatgcagcaagtgtggag

SEQ ID NO: 43144 - DNA, 20 bp, Human genital-associated circular DNA virus-1
tgggagcttgttcgagagct

SEQ ID NO: 43145 - DNA, 20 bp, Human genital-associated circular DNA virus-1
gggagcttgttcgagagctg

SEQ ID NO: 43146 - DNA, 20 bp, Human genital-associated circular DNA virus-1
gcgtcttccagccctgactt

SEQ ID NO: 43147 - DNA, 20 bp, Human genital-associated circular DNA virus-1
cagccctgacttgaggtcgt

SEQ ID NO: 43148 - DNA, 20 bp, Human genital-associated circular DNA virus-1
aggtcgtccacgttccactg

SEQ ID NO: 43149 - DNA, 20 bp, Human genital-associated circular DNA virus-1
cactgcaggcagcagtggat

SEQ ID NO: 43150 - DNA, 20 bp, Human genital-associated circular DNA virus-1
gcggaatgtgcgggacattc

SEQ ID NO: 43151 - DNA, 20 bp, Human genital-associated circular DNA virus-1
cgctctcatcgccggggttg

SEQ ID NO: 43152 - DNA, 20 bp, Human genital-associated circular DNA virus-1
agtgtgactgttcggtcata

SEQ ID NO: 43153 - DNA, 20 bp, Human genital-associated circular DNA virus-1
ggtcatacatcggtgtgatg

SEQ ID NO: 43154 - DNA, 20 bp, Human genital-associated circular DNA virus-1
gatccaccactttgttgtaa

SEQ ID NO: 43155 - DNA, 20 bp, Human genital-associated circular DNA virus-1
gttgtaatagggtacaatcc

SEQ ID NO: 43156 - DNA, 20 bp, Human genital-associated circular DNA virus-1
ttgtaatagggtacaatcca

SEQ ID NO: 43157 - DNA, 20 bp, Human genital-associated circular DNA virus-1
taatagggtacaatccacgg

SEQ ID NO: 43158 - DNA, 20 bp, Human genital-associated circular DNA virus-1
taagtgaaaacaacgcggcg

SEQ ID NO: 43159 - DNA, 20 bp, Human papillomavirus type 140
gcttttttaaactgcaattg

SEQ ID NO: 43160 - DNA, 20 bp, Human papillomavirus type 140
tttaaactgcaattgaaatg

SEQ ID NO: 43161 - DNA, 20 bp, Human papillomavirus type 140
ttaaactgcaattgaaatgt

SEQ ID NO: 43162 - DNA, 20 bp, Human papillomavirus type 140
taaactgcaattgaaatgta

SEQ ID NO: 43163 - DNA, 20 bp, Human papillomavirus type 140
aaactgcaattgaaatgtat

SEQ ID NO: 43164 - DNA, 20 bp, Human papillomavirus type 140
cagagttgacagtttgtgta

SEQ ID NO: 43165 - DNA, 20 bp, Human papillomavirus type 140
acagtttgtgtaattcttgt

SEQ ID NO: 43166 - DNA, 20 bp, Human papillomavirus type 140
gtgtaattcttgtacagcca

SEQ ID NO: 43167 - DNA, 20 bp, Human papillomavirus type 140
tgtaattcttgtacagccag

SEQ ID NO: 43168 - DNA, 20 bp, Human papillomavirus type 140
ttgtacagccagagtcaggc

SEQ ID NO: 43169 - DNA, 20 bp, Human papillomavirus type 140
aaaggagactgtttgaggac

SEQ ID NO: 43170 - DNA, 20 bp, Human papillomavirus type 140
gaggacagtggaatagcaga

SEQ ID NO: 43171 - DNA, 20 bp, Human papillomavirus type 140
aggacagtggaatagcagaa

SEQ ID NO: 43172 - DNA, 20 bp, Human papillomavirus type 140
gtcatacgaaaatggcggga

SEQ ID NO: 43173 - DNA, 20 bp, Human papillomavirus type 140
tcatacgaaaatggcgggac

SEQ ID NO: 43174 - DNA, 20 bp, Human papillomavirus type 140
caaacaaaaaattaccgaga

SEQ ID NO: 43175 - DNA, 20 bp, Human papillomavirus type 140
ccgagaaagcatattcattt

SEQ ID NO: 43176 - DNA, 20 bp, Human papillomavirus type 140
atttggaatattaccagatt

SEQ ID NO: 43177 - DNA, 20 bp, Human papillomavirus type 140
ggaatattaccagattgggt

SEQ ID NO: 43178 - DNA, 20 bp, Human papillomavirus type 140
gaatattaccagattgggtt

SEQ ID NO: 43179 - DNA, 20 bp, Human papillomavirus type 140
tggattcagccattactaga

SEQ ID NO: 43180 - DNA, 20 bp, Human papillomavirus type 140
ggattcagccattactagat

SEQ ID NO: 43181 - DNA, 20 bp, Human papillomavirus type 140
gattcagccattactagatt

SEQ ID NO: 43182 - DNA, 20 bp, Human papillomavirus type 140
agccattactagattgtaaa

SEQ ID NO: 43183 - DNA, 20 bp, Human papillomavirus type 140
ctagattgtaaagtaggatt

SEQ ID NO: 43184 - DNA, 20 bp, Human papillomavirus type 140
ctccgtctttctgcggggtc

SEQ ID NO: 43185 - DNA, 20 bp, Human papillomavirus type 140
ctgcggggtcttggtgtagg

SEQ ID NO: 43186 - DNA, 20 bp, Human papillomavirus type 140
tgcggggtcttggtgtaggt

SEQ ID NO: 43187 - DNA, 20 bp, Human papillomavirus type 140
gtgtaggtggtggggctgct

SEQ ID NO: 43188 - DNA, 20 bp, Human papillomavirus type 140
atctcctgtctgtgtccccg

SEQ ID NO: 43189 - DNA, 20 bp, Human papillomavirus type 140
gaagtagccatcgatctgtt

SEQ ID NO: 43190 - DNA, 20 bp, Human papillomavirus type 140
cacgatcaggtctctcaaga

SEQ ID NO: 43191 - DNA, 20 bp, Human papillomavirus type 140
aaagacttgaagaggaagct

SEQ ID NO: 43192 - DNA, 20 bp, Human papillomavirus type 140
aagaggaagctagggatcca

SEQ ID NO: 43193 - DNA, 20 bp, Human papillomavirus type 140
accacgaggattggtggatc

SEQ ID NO: 43194 - DNA, 20 bp, Human papillomavirus type 140
attgacactgttccacttcc

SEQ ID NO: 43195 - DNA, 20 bp, Human papillomavirus type 140
ttgacactgttccacttcct

SEQ ID NO: 43196 - DNA, 20 bp, Human papillomavirus type 140
acactgttccacttcctaag

SEQ ID NO: 43197 - DNA, 20 bp, Human papillomavirus type 140
cacttcctaagggtacctcc

SEQ ID NO: 43198 - DNA, 20 bp, Human papillomavirus type 140
ctaagggtacctccatgtgt

SEQ ID NO: 43199 - DNA, 20 bp, Human papillomavirus type 140
gggtatagaccatttaatgc

SEQ ID NO: 43200 - DNA, 20 bp, Human papillomavirus type 140
ggtatagaccatttaatgct

SEQ ID NO: 43201 - DNA, 20 bp, Human papillomavirus type 140
aatgctcaaacacctaggga

SEQ ID NO: 43202 - DNA, 20 bp, Human papillomavirus type 140
atgctcaaacacctagggag

SEQ ID NO: 43203 - DNA, 20 bp, Human papillomavirus type 140
ggccacgtcctaccataccc

SEQ ID NO: 43204 - DNA, 20 bp, Human papillomavirus type 140
aattagaacaaattaatact

SEQ ID NO: 43205 - DNA, 20 bp, Human papillomavirus type 140
gaacaaattaatactatggc

SEQ ID NO: 43206 - DNA, 20 bp, Human papillomavirus type 140
atactatggcgcagtttgaa

SEQ ID NO: 43207 - DNA, 20 bp, Human papillomavirus type 140
gaaatagatgagggaccttt

SEQ ID NO: 43208 - DNA, 20 bp, Human papillomavirus type 140
aaatagatgagggaccttta

SEQ ID NO: 43209 - DNA, 20 bp, Human papillomavirus type 140
agcagaattagctgacaact

SEQ ID NO: 43210 - DNA, 20 bp, Human papillomavirus type 140
gcagaattagctgacaactc

SEQ ID NO: 43211 - DNA, 20 bp, Human papillomavirus type 140
gctgacaactcctctagaca

SEQ ID NO: 43212 - DNA, 20 bp, Human papillomavirus type 140
catttacagaacagccacga

SEQ ID NO: 43213 - DNA, 20 bp, Human papillomavirus type 140
acagaacagccacgactttt

SEQ ID NO: 43214 - DNA, 20 bp, Human papillomavirus type 140
ccaagtgcaatagataatag

SEQ ID NO: 43215 - DNA, 20 bp, Human papillomavirus type 140
cgaccctaaacagaatcaga

SEQ ID NO: 43216 - DNA, 20 bp, Human papillomavirus type 140
gaccctaaacagaatcagat

SEQ ID NO: 43217 - DNA, 20 bp, Human papillomavirus type 140
attgttggttgtgcacctgc

SEQ ID NO: 43218 - DNA, 20 bp, Human papillomavirus type 140
ttggttgtgcacctgccatt

SEQ ID NO: 43219 - DNA, 20 bp, Human papillomavirus type 140
ttaattccatttgcaaatgg

SEQ ID NO: 43220 - DNA, 20 bp, Human papillomavirus type 140
attccatttgcaaatggccg

SEQ ID NO: 43221 - DNA, 20 bp, Human papillomavirus type 140
catttgcaaatggccggatt

SEQ ID NO: 43222 - DNA, 20 bp, Human papillomavirus type 140
gcaaatggccggattttata

SEQ ID NO: 43223 - DNA, 20 bp, Human papillomavirus type 140
caaatggccggattttatac

SEQ ID NO: 43224 - DNA, 20 bp, Human papillomavirus type 140
ctttcctacacccagtggtt

SEQ ID NO: 43225 - DNA, 20 bp, Human papillomavirus type 140
cctacacccagtggttctct

SEQ ID NO: 43226 - DNA, 20 bp, Human papillomavirus type 140
ctacacccagtggttctcta

SEQ ID NO: 43227 - DNA, 20 bp, Human papillomavirus type 140
tctagttactagtgaggccc

SEQ ID NO: 43228 - DNA, 20 bp, Human papillomavirus type 140
ctagtgaggcccagttattt

SEQ ID NO: 43229 - DNA, 20 bp, Human papillomavirus type 140
ggacattgatttgcaggatc

SEQ ID NO: 43230 - DNA, 20 bp, Human papillomavirus type 140
atttgcaggatcgctttact

SEQ ID NO: 43231 - DNA, 20 bp, Human papillomavirus type 140
gcaggatcgctttacttctg

SEQ ID NO: 43232 - DNA, 20 bp, Human papillomavirus type 140
caggatcgctttacttctga

SEQ ID NO: 43233 - DNA, 20 bp, Human papillomavirus type 140
acttctgatttggatcagac

SEQ ID NO: 43234 - DNA, 20 bp, Human papillomavirus type 140
tcggtgggttagagaccgat

SEQ ID NO: 43235 - DNA, 20 bp, Human papillomavirus type 140
cggtgggttagagaccgatt

SEQ ID NO: 43236 - DNA, 20 bp, Human papillomavirus type 140
ggtgggttagagaccgattt

SEQ ID NO: 43237 - DNA, 20 bp, Human papillomavirus type 140
gagaccgatttcggtgttct

SEQ ID NO: 43238 - DNA, 20 bp, Human papillomavirus type 140
cggtgttctatcactttaac

SEQ ID NO: 43239 - DNA, 20 bp, Hepatitis E virus
cgaatgctgtggtagttagg

SEQ ID NO: 43240 - DNA, 20 bp, Hepatitis E virus
ggccttttctctctcaccag

SEQ ID NO: 43241 - DNA, 20 bp, Hepatitis E virus
tctctctcaccagcagattg

SEQ ID NO: 43242 - DNA, 20 bp, Hepatitis E virus
ctctctcaccagcagattga

SEQ ID NO: 43243 - DNA, 20 bp, Hepatitis E virus
tctctcaccagcagattgag

SEQ ID NO: 43244 - DNA, 20 bp, Hepatitis E virus
ctccgccctgccgggcgtga

SEQ ID NO: 43245 - DNA, 20 bp, Hepatitis E virus
agcgttggtatactgcccct

SEQ ID NO: 43246 - DNA, 20 bp, Hepatitis E virus
gtatactgcccctacccgcg

SEQ ID NO: 43247 - DNA, 20 bp, Hepatitis E virus
ccggcgttccgcactgcgcg

SEQ ID NO: 43248 - DNA, 20 bp, Hepatitis E virus
cgcactgcgcgggctccccg

SEQ ID NO: 43249 - DNA, 20 bp, Hepatitis E virus
acgctgccctccacctcccg

SEQ ID NO: 43250 - DNA, 20 bp, Hepatitis E virus
cgctgccctccacctcccgc

SEQ ID NO: 43251 - DNA, 20 bp, Hepatitis E virus
ccccctggcacataccgcac

SEQ ID NO: 43252 - DNA, 20 bp, Hepatitis E virus
gtcctcttactcacggcagc

SEQ ID NO: 43253 - DNA, 20 bp, Hepatitis E virus
tcctcttactcacggcagcc

SEQ ID NO: 43254 - DNA, 20 bp, Hepatitis E virus
ctcacggcagccccggagcc

SEQ ID NO: 43255 - DNA, 20 bp, Hepatitis E virus
cttacccccggtctaccgag

SEQ ID NO: 43256 - DNA, 20 bp, Hepatitis E virus
cccccggtctaccgaggtct

SEQ ID NO: 43257 - DNA, 20 bp, Hepatitis E virus
ttgccaatgaaggctggaac

SEQ ID NO: 43258 - DNA, 20 bp, Hepatitis E virus
ccaatgaaggctggaacgcc

SEQ ID NO: 43259 - DNA, 20 bp, Hepatitis E virus
cagctgtcatcactgccgcc

SEQ ID NO: 43260 - DNA, 20 bp, Hepatitis E virus
ccatctgccaccagcggtac

SEQ ID NO: 43261 - DNA, 20 bp, Hepatitis E virus
gatatagcctgagtgcggag

SEQ ID NO: 43262 - DNA, 20 bp, Hepatitis E virus
catcttgacccacgggtgtt

SEQ ID NO: 43263 - DNA, 20 bp, Hepatitis E virus
atcttgacccacgggtgttg

SEQ ID NO: 43264 - DNA, 20 bp, Hepatitis E virus
acccacgggtgttggttttt

SEQ ID NO: 43265 - DNA, 20 bp, Hepatitis E virus
gtttttgatgagtcggcccc

SEQ ID NO: 43266 - DNA, 20 bp, Hepatitis E virus
ttgatgagtcggccccctgc

SEQ ID NO: 43267 - DNA, 20 bp, Hepatitis E virus
gtgacatatctgggtcctac

SEQ ID NO: 43268 - DNA, 20 bp, Hepatitis E virus
accaagcccttgacctcccc

SEQ ID NO: 43269 - DNA, 20 bp, Hepatitis E virus
ccaagcccttgacctccccg

SEQ ID NO: 43270 - DNA, 20 bp, Hepatitis E virus
acctccccgctgagattgtg

SEQ ID NO: 43271 - DNA, 20 bp, Hepatitis E virus
tggctcgtgcaggccggctg

SEQ ID NO: 43272 - DNA, 20 bp, Hepatitis E virus
cagtctcacctatgccgcct

SEQ ID NO: 43273 - DNA, 20 bp, Hepatitis E virus
agtctcacctatgccgcctc

SEQ ID NO: 43274 - DNA, 20 bp, Hepatitis E virus
acctacccggatggctctaa

SEQ ID NO: 43275 - DNA, 20 bp, Hepatitis E virus
cctacccggatggctctaag

SEQ ID NO: 43276 - DNA, 20 bp, Hepatitis E virus
gccggctcgctgtttgagtc

SEQ ID NO: 43277 - DNA, 20 bp, Hepatitis E virus
gagtcgacatgtacctggct

SEQ ID NO: 43278 - DNA, 20 bp, Hepatitis E virus
agtcgacatgtacctggctc

SEQ ID NO: 43279 - DNA, 20 bp, Hepatitis E virus
acgccgtcgctcctgattat

SEQ ID NO: 43280 - DNA, 20 bp, Hepatitis E virus
taggttggaacataacccaa

SEQ ID NO: 43281 - DNA, 20 bp, Hepatitis E virus
gaacataacccaaagatgct

SEQ ID NO: 43282 - DNA, 20 bp, Hepatitis E virus
aggctgcctaccgggagact

SEQ ID NO: 43283 - DNA, 20 bp, Hepatitis E virus
ctcccgcctcggtaccgctg

SEQ ID NO: 43284 - DNA, 20 bp, Hepatitis E virus
cacggacagcaaatctggct

SEQ ID NO: 43285 - DNA, 20 bp, Hepatitis E virus
actcagccacagacgtcggc

SEQ ID NO: 43286 - DNA, 20 bp, Hepatitis E virus
gatagccagatttgctgtcc

SEQ ID NO: 43287 - DNA, 20 bp, Hepatitis E virus
gctgtccgtgcaacatcctc

SEQ ID NO: 43288 - DNA, 20 bp, Hepatitis E virus
ctgtccgtgcaacatcctca

SEQ ID NO: 43289 - DNA, 20 bp, Hepatitis E virus
accccgcacactgccgccag

SEQ ID NO: 43290 - DNA, 20 bp, Hepatitis E virus
tcattgatgaggccccgtcc

SEQ ID NO: 43291 - DNA, 20 bp, Hepatitis E virus
atgaggccccgtcccttccc

SEQ ID NO: 43292 - DNA, 20 bp, Hepatitis E virus
cccctcacttgctgctgctc

SEQ ID NO: 43293 - DNA, 20 bp, Hepatitis E virus
ctgctgctccacatgcagcg

SEQ ID NO: 43294 - DNA, 20 bp, Hepatitis E virus
agaccactagtcgggtcctc

SEQ ID NO: 43295 - DNA, 20 bp, Hepatitis E virus
ttctggggtgagcctgctgt

SEQ ID NO: 43296 - DNA, 20 bp, Hepatitis E virus
tggggtgagcctgctgttgg

SEQ ID NO: 43297 - DNA, 20 bp, Hepatitis E virus
ggcagaaactagtgttcacc

SEQ ID NO: 43298 - DNA, 20 bp, Hepatitis E virus
ctgcccaacagcaggctcac

SEQ ID NO: 43299 - DNA, 20 bp, Hepatitis E virus
acgcaccaggcctgcttcgc

SEQ ID NO: 43300 - DNA, 20 bp, Hepatitis E virus
gcgaggtgggcatctccgat

SEQ ID NO: 43301 - DNA, 20 bp, Hepatitis E virus
ataactttttccttgctggt

SEQ ID NO: 43302 - DNA, 20 bp, Hepatitis E virus
ttccttgctggtggcgaaat

SEQ ID NO: 43303 - DNA, 20 bp, Hepatitis E virus
tccttgctggtggcgaaatt

SEQ ID NO: 43304 - DNA, 20 bp, Hepatitis E virus
agctcgacctttgtaaccgc

SEQ ID NO: 43305 - DNA, 20 bp, Hepatitis E virus
gtaaccgcgacgtgtccagg

SEQ ID NO: 43306 - DNA, 20 bp, Hepatitis E virus
taaccgcgacgtgtccagga

SEQ ID NO: 43307 - DNA, 20 bp, Hepatitis E virus
ttccagaaagattgtaataa

SEQ ID NO: 43308 - DNA, 20 bp, Hepatitis E virus
cagaaagattgtaataaatt

SEQ ID NO: 43309 - DNA, 20 bp, Hepatitis E virus
gccggccggcttactgagaa

SEQ ID NO: 43310 - DNA, 20 bp, Hepatitis E virus
ctgagaagaattggggccct

SEQ ID NO: 43311 - DNA, 20 bp, Hepatitis E virus
gggccctggccccgagcggg

SEQ ID NO: 43312 - DNA, 20 bp, Hepatitis E virus
tctccgcaagctcacgaatg

SEQ ID NO: 43313 - DNA, 20 bp, Hepatitis E virus
ctccgcaagctcacgaatgt

SEQ ID NO: 43314 - DNA, 20 bp, Hepatitis E virus
gccaacccgcccgaccactc

SEQ ID NO: 43315 - DNA, 20 bp, Hepatitis E virus
gcgtgaccaggcccagcgcc

SEQ ID NO: 43316 - DNA, 20 bp, Hepatitis E virus
cgcaacctcacccccggtaa

SEQ ID NO: 43317 - DNA, 20 bp, Hepatitis E virus
ctccagcactgcccgtcacc

SEQ ID NO: 43318 - DNA, 20 bp, Hepatitis E virus
gtcgcggtgcagatgggact

SEQ ID NO: 43319 - DNA, 20 bp, Hepatitis E virus
gtattaccgggggtgaggtt

SEQ ID NO: 43320 - DNA, 20 bp, Hepatitis E virus
ccgggggtgaggttgcggaa

SEQ ID NO: 43321 - DNA, 20 bp, Hepatitis E virus
cggctcttcgaccggcccag

SEQ ID NO: 43322 - DNA, 20 bp, Hepatitis E virus
gaccggcccagtctatgtct

SEQ ID NO: 43323 - DNA, 20 bp, Hepatitis E virus
gttaatgtagcgaccggcgc

SEQ ID NO: 43324 - DNA, 20 bp, Hepatitis E virus
atgtagcgaccggcgcgcag

SEQ ID NO: 43325 - DNA, 20 bp, Hepatitis E virus
accaaggtcacagagtcaga

SEQ ID NO: 43326 - DNA, 20 bp, Hepatitis E virus
agaatgccgctgggcatcgg

SEQ ID NO: 43327 - DNA, 20 bp, Hepatitis E virus
ctatttccacttacaccact

SEQ ID NO: 43328 - DNA, 20 bp, Hepatitis E virus
ccacttacaccactagcctg

SEQ ID NO: 43329 - DNA, 20 bp, Hepatitis E virus
cacttacaccactagcctgg

SEQ ID NO: 43330 - DNA, 20 bp, Hepatitis E virus
caccactagcctgggtgctg

SEQ ID NO: 43331 - DNA, 20 bp, Human herpesvirus 3
acgttcgtaatgggcatata

SEQ ID NO: 43332 - DNA, 20 bp, Human herpesvirus 3
gtaatgggcatataatgatg

SEQ ID NO: 43333 - DNA, 20 bp, Human herpesvirus 3
tatgcccattacgaacgtca

SEQ ID NO: 43334 - DNA, 20 bp, Human herpesvirus 3
cgaacgtcaagtattggctg

SEQ ID NO: 43335 - DNA, 20 bp, Human herpesvirus 3
gctgcatatcgacgactcta

SEQ ID NO: 43336 - DNA, 20 bp, Human herpesvirus 3
tgcttggattacaccataat

SEQ ID NO: 43337 - DNA, 20 bp, Human herpesvirus 3
gattacaccataataatgtt

SEQ ID NO: 43338 - DNA, 20 bp, Human herpesvirus 3
caccataataatgttcctga

SEQ ID NO: 43339 - DNA, 20 bp, Human herpesvirus 3
ctgaatcgttggtggtctcg

SEQ ID NO: 43340 - DNA, 20 bp, Human herpesvirus 3
gtggtctcgtgtatgtctaa

SEQ ID NO: 43341 - DNA, 20 bp, Human herpesvirus 3
ctatataacataaccggtaa

SEQ ID NO: 43342 - DNA, 20 bp, Human herpesvirus 3
acgcattgcccagttgacgg

SEQ ID NO: 43343 - DNA, 20 bp, Human herpesvirus 3
cccagttgacggtgcggatc

SEQ ID NO: 43344 - DNA, 20 bp, Human herpesvirus 3
acggtgcggatctataaggt

SEQ ID NO: 43345 - DNA, 20 bp, Human herpesvirus 3
tagatccgcaccgtcaactg

SEQ ID NO: 43346 - DNA, 20 bp, Human herpesvirus 3
caactttcgatcataaacga

SEQ ID NO: 43347 - DNA, 20 bp, Human herpesvirus 3
cgatcataaacgatttatag

SEQ ID NO: 43348 - DNA, 20 bp, Human herpesvirus 3
gatcataaacgatttatagg

SEQ ID NO: 43349 - DNA, 20 bp, Human herpesvirus 3
ataggaacggcatatgaaag

SEQ ID NO: 43350 - DNA, 20 bp, Human herpesvirus 3
taggaacggcatatgaaaga

SEQ ID NO: 43351 - DNA, 20 bp, Human herpesvirus 3
gatgttgtgttgcaaaaaca

SEQ ID NO: 43352 - DNA, 20 bp, Human herpesvirus 3
tgttgcaaaaacaaagacag

SEQ ID NO: 43353 - DNA, 20 bp, Human herpesvirus 3
caaaaacaaagacagtttga

SEQ ID NO: 43354 - DNA, 20 bp, Human herpesvirus 3
gaagagaccgcgtctcgctt

SEQ ID NO: 43355 - DNA, 20 bp, Human herpesvirus 3
aagagaccgcgtctcgctta

SEQ ID NO: 43356 - DNA, 20 bp, Human herpesvirus 3
tgttttatgggaacgaaaag

SEQ ID NO: 43357 - DNA, 20 bp, Human herpesvirus 3
tatgggaacgaaaagactcg

SEQ ID NO: 43358 - DNA, 20 bp, Human herpesvirus 3
atgggaacgaaaagactcga

SEQ ID NO: 43359 - DNA, 20 bp, Human herpesvirus 3
tgggaacgaaaagactcgat

SEQ ID NO: 43360 - DNA, 20 bp, Human herpesvirus 3
cagctccggattatgtggtc

SEQ ID NO: 43361 - DNA, 20 bp, Human herpesvirus 3
cacataaattttttgagttg

SEQ ID NO: 43362 - DNA, 20 bp, Human herpesvirus 3
tttgagttggtcaacggccc

SEQ ID NO: 43363 - DNA, 20 bp, Human herpesvirus 3
ttgagttggtcaacggccca

SEQ ID NO: 43364 - DNA, 20 bp, Human herpesvirus 3
tgagttggtcaacggcccat

SEQ ID NO: 43365 - DNA, 20 bp, Human herpesvirus 3
gagttggtcaacggcccatt

SEQ ID NO: 43366 - DNA, 20 bp, Human herpesvirus 3
taattccactataaaacaaa

SEQ ID NO: 43367 - DNA, 20 bp, Human herpesvirus 3
aattccactataaaacaaac

SEQ ID NO: 43368 - DNA, 20 bp, Human herpesvirus 3
attccactataaaacaaacg

SEQ ID NO: 43369 - DNA, 20 bp, Human herpesvirus 3
cactataaaacaaacggtct

SEQ ID NO: 43370 - DNA, 20 bp, Human herpesvirus 3
ccggcaccactggattccgt

SEQ ID NO: 43371 - DNA, 20 bp, Human herpesvirus 3
cgttaagcgcgtctcgtatc

SEQ ID NO: 43372 - DNA, 20 bp, Human herpesvirus 3
agcgcgtctcgtatctcggg

SEQ ID NO: 43373 - DNA, 20 bp, Human herpesvirus 3
ctggtaactccaacatacgc

SEQ ID NO: 43374 - DNA, 20 bp, Human herpesvirus 3
tggtaactccaacatacgca

SEQ ID NO: 43375 - DNA, 20 bp, Human herpesvirus 3
gagttaccagaaagtttgca

SEQ ID NO: 43376 - DNA, 20 bp, Human herpesvirus 3
caactggaaatgtgctgtca

SEQ ID NO: 43377 - DNA, 20 bp, Human herpesvirus 3
catttttgatttttttaaac

SEQ ID NO: 43378 - DNA, 20 bp, Human herpesvirus 3
ttgatttttttaaacaaata

SEQ ID NO: 43379 - DNA, 20 bp, Human herpesvirus 3
tgatttttttaaacaaatac

SEQ ID NO: 43380 - DNA, 20 bp, Human herpesvirus 3
gatttttttaaacaaatacg

SEQ ID NO: 43381 - DNA, 20 bp, Human herpesvirus 3
ataacaccgctatacgcatt

SEQ ID NO: 43382 - DNA, 20 bp, Human herpesvirus 3
cgatgaggtgctgcttcttc

SEQ ID NO: 43383 - DNA, 20 bp, Human herpesvirus 3
gatgaggtgctgcttcttcc

SEQ ID NO: 43384 - DNA, 20 bp, Human herpesvirus 3
ttccggtgaatattcataaa

SEQ ID NO: 43385 - DNA, 20 bp, Human herpesvirus 3
cggtgaatattcataaaact

SEQ ID NO: 43386 - DNA, 20 bp, Human herpesvirus 3
gcattttaaacgggtccggc

SEQ ID NO: 43387 - DNA, 20 bp, Human herpesvirus 3
taaacgggtccggctgccta

SEQ ID NO: 43388 - DNA, 20 bp, Human herpesvirus 3
aaacgggtccggctgcctaa

SEQ ID NO: 43389 - DNA, 20 bp, Human herpesvirus 3
aacgggtccggctgcctaaa

SEQ ID NO: 43390 - DNA, 20 bp, Human herpesvirus 3
cctttactgtaagtacaaaa

SEQ ID NO: 43391 - DNA, 20 bp, Human herpesvirus 3
ctctgggaatcggggggagg

SEQ ID NO: 43392 - DNA, 20 bp, Human herpesvirus 3
cgagcctcgtccgccgacgc

SEQ ID NO: 43393 - DNA, 20 bp, Human herpesvirus 3
ccagagtaatgtggccgccc

SEQ ID NO: 43394 - DNA, 20 bp, Human herpesvirus 3
tggggccgcggagacggtgt

SEQ ID NO: 43395 - DNA, 20 bp, Human herpesvirus 3
ggggccgcggagacggtgtt

SEQ ID NO: 43396 - DNA, 20 bp, Human herpesvirus 3
caaccgtcaaaacccggcag

SEQ ID NO: 43397 - DNA, 20 bp, Human herpesvirus 3
acggggcgacagggggacgc

SEQ ID NO: 43398 - DNA, 20 bp, Human herpesvirus 3
tgacggttgcaaggacctcg

SEQ ID NO: 43399 - DNA, 20 bp, Human herpesvirus 3
gacggttgcaaggacctcgc

SEQ ID NO: 43400 - DNA, 20 bp, Human herpesvirus 3
acggttgcaaggacctcgcg

SEQ ID NO: 43401 - DNA, 20 bp, Human herpesvirus 3
gatgggaggggtgccgatcc

SEQ ID NO: 43402 - DNA, 20 bp, Human herpesvirus 3
cgtcgggcatcatgagcggc

SEQ ID NO: 43403 - DNA, 20 bp, Human herpesvirus 3
gcccggatcggcacccctcc

SEQ ID NO: 43404 - DNA, 20 bp, Human herpesvirus 3
ggaccgtccggggagaccag

SEQ ID NO: 43405 - DNA, 20 bp, Human herpesvirus 3
gaccgtccggggagaccaga

SEQ ID NO: 43406 - DNA, 20 bp, Human herpesvirus 3
taccccgggcatcatgtttc

SEQ ID NO: 43407 - DNA, 20 bp, Human herpesvirus 3
ccttgggcgggtatcatcgg

SEQ ID NO: 43408 - DNA, 20 bp, Human herpesvirus 3
cttgggcgggtatcatcggt

SEQ ID NO: 43409 - DNA, 20 bp, Human herpesvirus 3
ggcgggtatcatcggtctca

SEQ ID NO: 43410 - DNA, 20 bp, Human herpesvirus 3
gagaccgatgatacccgccc

SEQ ID NO: 43411 - DNA, 20 bp, Human immunodeficiency virus 1
ggttaaggccagggggaaag

SEQ ID NO: 43412 - DNA, 20 bp, Human immunodeficiency virus 1
aggccagggggaaagaaaaa

SEQ ID NO: 43413 - DNA, 20 bp, Human immunodeficiency virus 1
aaacatatagtatgggcaag

SEQ ID NO: 43414 - DNA, 20 bp, Human immunodeficiency virus 1
gcagttaatcctggcctgtt

SEQ ID NO: 43415 - DNA, 20 bp, Human immunodeficiency virus 1
atcctggcctgttagaaaca

SEQ ID NO: 43416 - DNA, 20 bp, Human immunodeficiency virus 1
ccctatagtgcagaacatcc

SEQ ID NO: 43417 - DNA, 20 bp, Human immunodeficiency virus 1
cccctggatgttctgcacta

SEQ ID NO: 43418 - DNA, 20 bp, Human immunodeficiency virus 1
tgcactatagggtaattttg

SEQ ID NO: 43419 - DNA, 20 bp, Human immunodeficiency virus 1
tggctgacctgattgctgtg

SEQ ID NO: 43420 - DNA, 20 bp, Human immunodeficiency virus 1
ggctgacctgattgctgtgt

SEQ ID NO: 43421 - DNA, 20 bp, Human immunodeficiency virus 1
caccaggccagatgagagaa

SEQ ID NO: 43422 - DNA, 20 bp, Human immunodeficiency virus 1
ctgctatgtcacttcccctt

SEQ ID NO: 43423 - DNA, 20 bp, Human immunodeficiency virus 1
cccttggttctctcatctgg

SEQ ID NO: 43424 - DNA, 20 bp, Human immunodeficiency virus 1
gttctctcatctggcctggt

SEQ ID NO: 43425 - DNA, 20 bp, Human immunodeficiency virus 1
tctcatctggcctggtgcaa

SEQ ID NO: 43426 - DNA, 20 bp, Human immunodeficiency virus 1
gatgacagaaaccttgttgg

SEQ ID NO: 43427 - DNA, 20 bp, Human immunodeficiency virus 1
ttggtccaaaatgcgaaccc

SEQ ID NO: 43428 - DNA, 20 bp, Human immunodeficiency virus 1
gtccaaaatgcgaacccaga

SEQ ID NO: 43429 - DNA, 20 bp, Human immunodeficiency virus 1
taagactattttaaaagcat

SEQ ID NO: 43430 - DNA, 20 bp, Human immunodeficiency virus 1
taaaagcattgggaccagcg

SEQ ID NO: 43431 - DNA, 20 bp, Human immunodeficiency virus 1
cacagggatggaaaggatca

SEQ ID NO: 43432 - DNA, 20 bp, Human immunodeficiency virus 1
caaagtagcatgacaaaaat

SEQ ID NO: 43433 - DNA, 20 bp, Human immunodeficiency virus 1
gagccttttagaaaacaaaa

SEQ ID NO: 43434 - DNA, 20 bp, Human immunodeficiency virus 1
tgttttctaaaaggctctaa

SEQ ID NO: 43435 - DNA, 20 bp, Human immunodeficiency virus 1
gttttctaaaaggctctaag

SEQ ID NO: 43436 - DNA, 20 bp, Human immunodeficiency virus 1
gtggggaaattgaattgggc

SEQ ID NO: 43437 - DNA, 20 bp, Human immunodeficiency virus 1
aattgggcaagtcagattta

SEQ ID NO: 43438 - DNA, 20 bp, Human immunodeficiency virus 1
ggcaagtcagatttacccag

SEQ ID NO: 43439 - DNA, 20 bp, Human immunodeficiency virus 1
ctttaatccctgggtaaatc

SEQ ID NO: 43440 - DNA, 20 bp, Human immunodeficiency virus 1
aatccctgggtaaatctgac

SEQ ID NO: 43441 - DNA, 20 bp, Human immunodeficiency virus 1
acagaggcagtgcaaaaaat

SEQ ID NO: 43442 - DNA, 20 bp, Human immunodeficiency virus 1
aaactgcccatacaaaagga

SEQ ID NO: 43443 - DNA, 20 bp, Human immunodeficiency virus 1
aactgcccatacaaaaggaa

SEQ ID NO: 43444 - DNA, 20 bp, Human immunodeficiency virus 1
ccaatactctgtccaccatg

SEQ ID NO: 43445 - DNA, 20 bp, Human immunodeficiency virus 1
cccatgtttccttttgtatg

SEQ ID NO: 43446 - DNA, 20 bp, Human immunodeficiency virus 1
gagagcaatggctagtgatt

SEQ ID NO: 43447 - DNA, 20 bp, Human immunodeficiency virus 1
taacctgccacctgtagtag

SEQ ID NO: 43448 - DNA, 20 bp, Human immunodeficiency virus 1
aacctgccacctgtagtagc

SEQ ID NO: 43449 - DNA, 20 bp, Human immunodeficiency virus 1
acctgccacctgtagtagca

SEQ ID NO: 43450 - DNA, 20 bp, Human immunodeficiency virus 1
cttttgctactacaggtggc

SEQ ID NO: 43451 - DNA, 20 bp, Human immunodeficiency virus 1
tcttttaaaattagcaggaa

SEQ ID NO: 43452 - DNA, 20 bp, Human immunodeficiency virus 1
cttttaaaattagcaggaag

SEQ ID NO: 43453 - DNA, 20 bp, Human immunodeficiency virus 1
ttttaaaattagcaggaaga

SEQ ID NO: 43454 - DNA, 20 bp, Human immunodeficiency virus 1
taaaattagcaggaagatgg

SEQ ID NO: 43455 - DNA, 20 bp, Human immunodeficiency virus 1
aaaattagcaggaagatggc

SEQ ID NO: 43456 - DNA, 20 bp, Human immunodeficiency virus 1
tatagacatcactatgaaag

SEQ ID NO: 43457 - DNA, 20 bp, Human immunodeficiency virus 1
atagacatcactatgaaagc

SEQ ID NO: 43458 - DNA, 20 bp, Human immunodeficiency virus 1
tagacatcactatgaaagcc

SEQ ID NO: 43459 - DNA, 20 bp, Human immunodeficiency virus 1
agaagtacacatcccactag

SEQ ID NO: 43460 - DNA, 20 bp, Human immunodeficiency virus 1
gtaataacaacatattgggg

SEQ ID NO: 43461 - DNA, 20 bp, Human immunodeficiency virus 1
gcactagcagcattaataac

SEQ ID NO: 43462 - DNA, 20 bp, Human immunodeficiency virus 1
ataacaccaaaaaagataaa

SEQ ID NO: 43463 - DNA, 20 bp, Human immunodeficiency virus 1
gcctagtgttacgaaactga

SEQ ID NO: 43464 - DNA, 20 bp, Human immunodeficiency virus 1
cctagtgttacgaaactgac

SEQ ID NO: 43465 - DNA, 20 bp, Human immunodeficiency virus 1
cgaaactgacagaggataga

SEQ ID NO: 43466 - DNA, 20 bp, Human immunodeficiency virus 1
tggggatacttgggcaggag

SEQ ID NO: 43467 - DNA, 20 bp, Human immunodeficiency virus 1
ggcaggagtggaagccataa

SEQ ID NO: 43468 - DNA, 20 bp, Human immunodeficiency virus 1
tgcaacaactgctgtttatc

SEQ ID NO: 43469 - DNA, 20 bp, Human immunodeficiency virus 1
atccattttcagaattgggt

SEQ ID NO: 43470 - DNA, 20 bp, Human immunodeficiency virus 1
tccattttcagaattgggtg

SEQ ID NO: 43471 - DNA, 20 bp, Human immunodeficiency virus 1
tgggtcacagtctattatgg

SEQ ID NO: 43472 - DNA, 20 bp, Human immunodeficiency virus 1
tggggtacctgtgtggaagg

SEQ ID NO: 43473 - DNA, 20 bp, Human immunodeficiency virus 1
tgtgcatcagatgctaaagc

SEQ ID NO: 43474 - DNA, 20 bp, Human immunodeficiency virus 1
gtgcatcagatgctaaagca

SEQ ID NO: 43475 - DNA, 20 bp, Human immunodeficiency virus 1
tgcatcagatgctaaagcat

SEQ ID NO: 43476 - DNA, 20 bp, Human immunodeficiency virus 1
ggccagtagtatcaactcaa

SEQ ID NO: 43477 - DNA, 20 bp, Human immunodeficiency virus 1
aatggcagtctagcagaaga

SEQ ID NO: 43478 - DNA, 20 bp, Human immunodeficiency virus 1
ctacctcttcttctgctaga

SEQ ID NO: 43479 - DNA, 20 bp, Human immunodeficiency virus 1
ttctgctagactgccattta

SEQ ID NO: 43480 - DNA, 20 bp, Human immunodeficiency virus 1
tgctagactgccatttaaca

SEQ ID NO: 43481 - DNA, 20 bp, Human immunodeficiency virus 1
gatgttcatcaaatattaca

SEQ ID NO: 43482 - DNA, 20 bp, Human immunodeficiency virus 1
atcaaatattacagggctgc

SEQ ID NO: 43483 - DNA, 20 bp, Human immunodeficiency virus 1
cagggctgctattaacaaga

SEQ ID NO: 43484 - DNA, 20 bp, Human immunodeficiency virus 1
acaagagatggtggtaatag

SEQ ID NO: 43485 - DNA, 20 bp, Human immunodeficiency virus 1
agacctggaggaggagatat

SEQ ID NO: 43486 - DNA, 20 bp, Human immunodeficiency virus 1
ttgtctggtatagtgcagca

SEQ ID NO: 43487 - DNA, 20 bp, Human immunodeficiency virus 1
tctggtatagtgcagcagca

SEQ ID NO: 43488 - DNA, 20 bp, Human immunodeficiency virus 1
gctgagggctattgaggcgc

SEQ ID NO: 43489 - DNA, 20 bp, Human immunodeficiency virus 1
ctgagggctattgaggcgca

SEQ ID NO: 43490 - DNA, 20 bp, Human immunodeficiency virus 1
aggcgcaacagcatctgttg

SEQ ID NO: 43491 - DNA, 20 bp, Human immunodeficiency virus 1
tgcctggctagaagcacaag

SEQ ID NO: 43492 - DNA, 20 bp, Human immunodeficiency virus 1
tgcttctagccaggcacaag

SEQ ID NO: 43493 - DNA, 20 bp, Human immunodeficiency virus 1
tagccaggcacaagcagcat

SEQ ID NO: 43494 - DNA, 20 bp, Human immunodeficiency virus 1
gtagctgctgtattgctact

SEQ ID NO: 43495 - DNA, 20 bp, Human immunodeficiency virus 1
ctacttgtgattgctccatg

SEQ ID NO: 43496 - DNA, 20 bp, Human immunodeficiency virus 1
aagaactgctgacatcgagc

SEQ ID NO: 43497 - DNA, 20 bp, Human immunodeficiency virus 1
ctacaagggactttccgctg

SEQ ID NO: 43498 - DNA, 20 bp, Human immunodeficiency virus 1
ccgctggggactttccaggg

SEQ ID NO: 43499 - DNA, 20 bp, Human immunodeficiency virus 1
cgctggggactttccaggga

SEQ ID NO: 43500 - DNA, 20 bp, Human immunodeficiency virus 1
ccagggaggcgtggcctggg

SEQ ID NO: 43501 - DNA, 20 bp, Human herpesvirus 2
accgcgactccacctccgag

SEQ ID NO: 43502 - DNA, 20 bp, Human herpesvirus 2
ccacctcggtctcctcctcc

SEQ ID NO: 43503 - DNA, 20 bp, Human herpesvirus 2
tccagactgagcccctggga

SEQ ID NO: 43504 - DNA, 20 bp, Human herpesvirus 2
ggagctgatgccgtagtcgg

SEQ ID NO: 43505 - DNA, 20 bp, Human herpesvirus 2
gagctgatgccgtagtcggc

SEQ ID NO: 43506 - DNA, 20 bp, Human herpesvirus 2
tccacgtaggtgctgaaggg

SEQ ID NO: 43507 - DNA, 20 bp, Human herpesvirus 2
tcctacgggagctcttcggg

SEQ ID NO: 43508 - DNA, 20 bp, Human herpesvirus 2
ggggaggtgtttgagagcgc

SEQ ID NO: 43509 - DNA, 20 bp, Human herpesvirus 2
gagagcgcccccttcagcac

SEQ ID NO: 43510 - DNA, 20 bp, Human herpesvirus 2
agagcgcccccttcagcacc

SEQ ID NO: 43511 - DNA, 20 bp, Human herpesvirus 2
gtccagcccggcgaagataa

SEQ ID NO: 43512 - DNA, 20 bp, Human herpesvirus 2
cccgacgacgaccttgacgt

SEQ ID NO: 43513 - DNA, 20 bp, Human herpesvirus 2
acgttatcttcgccgggctg

SEQ ID NO: 43514 - DNA, 20 bp, Human herpesvirus 2
tcttcgccgggctggacgaa

SEQ ID NO: 43515 - DNA, 20 bp, Human herpesvirus 2
gccgggctggacgaacagca

SEQ ID NO: 43516 - DNA, 20 bp, Human herpesvirus 2
acgaagctgtcgtcgcgcag

SEQ ID NO: 43517 - DNA, 20 bp, Human herpesvirus 2
cggaggcgcgcggtcaccgc

SEQ ID NO: 43518 - DNA, 20 bp, Human herpesvirus 2
gggttcgacgggacgtttcg

SEQ ID NO: 43519 - DNA, 20 bp, Human herpesvirus 2
ggttcgacgggacgtttcgg

SEQ ID NO: 43520 - DNA, 20 bp, Human herpesvirus 2
gacgggacgtttcggacctt

SEQ ID NO: 43521 - DNA, 20 bp, Human herpesvirus 2
aggtaggcgtggagcttggc

SEQ ID NO: 43522 - DNA, 20 bp, Human herpesvirus 2
ggtaggcgtggagcttggcc

SEQ ID NO: 43523 - DNA, 20 bp, Human herpesvirus 2
gccatgtacgcgctgacctc

SEQ ID NO: 43524 - DNA, 20 bp, Human herpesvirus 2
tgggacgagaacagccgcgt

SEQ ID NO: 43525 - DNA, 20 bp, Human herpesvirus 2
cggggtggacgcggctgttc

SEQ ID NO: 43526 - DNA, 20 bp, Human herpesvirus 2
gcgtggcgcccgtgaccacg

SEQ ID NO: 43527 - DNA, 20 bp, Human herpesvirus 2
agggtctgcacgcacgtact

SEQ ID NO: 43528 - DNA, 20 bp, Human herpesvirus 2
ccggatccggcgttgccggt

SEQ ID NO: 43529 - DNA, 20 bp, Human herpesvirus 2
aagattctgcgccaccgcaa

SEQ ID NO: 43530 - DNA, 20 bp, Human herpesvirus 2
tgcgccaccgcaacaaccag

SEQ ID NO: 43531 - DNA, 20 bp, Human herpesvirus 2
cctggccctggttgttgcgg

SEQ ID NO: 43532 - DNA, 20 bp, Human herpesvirus 2
ctggccctggttgttgcggt

SEQ ID NO: 43533 - DNA, 20 bp, Human herpesvirus 2
ttgcggtggcgcagaatctt

SEQ ID NO: 43534 - DNA, 20 bp, Human herpesvirus 2
gtcaaggtgtcggcgtggtt

SEQ ID NO: 43535 - DNA, 20 bp, Human herpesvirus 2
acgaacagcgagggcgtggc

SEQ ID NO: 43536 - DNA, 20 bp, Human herpesvirus 2
tccaggtacatcagcaggca

SEQ ID NO: 43537 - DNA, 20 bp, Human herpesvirus 2
gacgacgagctagtcctgcc

SEQ ID NO: 43538 - DNA, 20 bp, Human herpesvirus 2
ttggccagcaggtagtgggc

SEQ ID NO: 43539 - DNA, 20 bp, Human herpesvirus 2
gccagcaggtagtgggccat

SEQ ID NO: 43540 - DNA, 20 bp, Human herpesvirus 2
catgccacgacgcccggggg

SEQ ID NO: 43541 - DNA, 20 bp, Human herpesvirus 2
ccgtgtatcgaacgagcgcg

SEQ ID NO: 43542 - DNA, 20 bp, Human herpesvirus 2
tagggtgctaaagttcaccg

SEQ ID NO: 43543 - DNA, 20 bp, Human herpesvirus 2
agcaccctataagtctgggg

SEQ ID NO: 43544 - DNA, 20 bp, Human herpesvirus 2
gcaccctataagtctggggc

SEQ ID NO: 43545 - DNA, 20 bp, Human herpesvirus 2
cagtggcccagttcgaacac

SEQ ID NO: 43546 - DNA, 20 bp, Human herpesvirus 2
gaacaccagctgcatgtagc

SEQ ID NO: 43547 - DNA, 20 bp, Human herpesvirus 2
agcagctccagcacgtcctc

SEQ ID NO: 43548 - DNA, 20 bp, Human herpesvirus 2
gaactgggccactgtaacgt

SEQ ID NO: 43549 - DNA, 20 bp, Human herpesvirus 2
agggtggggtgtagggccac

SEQ ID NO: 43550 - DNA, 20 bp, Human herpesvirus 2
gggtggggtgtagggccaca

SEQ ID NO: 43551 - DNA, 20 bp, Human herpesvirus 2
atcgtggggatgacgcccgt

SEQ ID NO: 43552 - DNA, 20 bp, Human herpesvirus 2
tggccctacaccccacccta

SEQ ID NO: 43553 - DNA, 20 bp, Human herpesvirus 2
cggagagtccgtacccgccc

SEQ ID NO: 43554 - DNA, 20 bp, Human herpesvirus 2
tgtagatgaccacccggtac

SEQ ID NO: 43555 - DNA, 20 bp, Human herpesvirus 2
acggaccgcgtgctgctgct

SEQ ID NO: 43556 - DNA, 20 bp, Human herpesvirus 2
cggaccgcgtgctgctgctc

SEQ ID NO: 43557 - DNA, 20 bp, Human herpesvirus 2
tgtcggcagcagcagggccg

SEQ ID NO: 43558 - DNA, 20 bp, Human herpesvirus 2
gcgagcgtatcgtcgaaggc

SEQ ID NO: 43559 - DNA, 20 bp, Human herpesvirus 2
gacgatacgctcgccaagtt

SEQ ID NO: 43560 - DNA, 20 bp, Human herpesvirus 2
tgggcctcgcgttctccggg

SEQ ID NO: 43561 - DNA, 20 bp, Human herpesvirus 2
tccggggcgcggccctgctg

SEQ ID NO: 43562 - DNA, 20 bp, Human herpesvirus 2
agggggcggttgttaaactc

SEQ ID NO: 43563 - DNA, 20 bp, Human herpesvirus 2
ttaaactcggcccgctcgtt

SEQ ID NO: 43564 - DNA, 20 bp, Human herpesvirus 2
aactcggcccgctcgttgtt

SEQ ID NO: 43565 - DNA, 20 bp, Human herpesvirus 2
aacaaccgccccctgaagca

SEQ ID NO: 43566 - DNA, 20 bp, Human herpesvirus 2
acaaccgccccctgaagcac

SEQ ID NO: 43567 - DNA, 20 bp, Human herpesvirus 2
gcggcggccgcacccacgac

SEQ ID NO: 43568 - DNA, 20 bp, Human herpesvirus 2
atcaccccgctcgggttctc

SEQ ID NO: 43569 - DNA, 20 bp, Human herpesvirus 2
tcaccccgctcgggttctcg

SEQ ID NO: 43570 - DNA, 20 bp, Human herpesvirus 2
agccgcgcctccaattccaa

SEQ ID NO: 43571 - DNA, 20 bp, Human herpesvirus 2
gccgcgcctccaattccaag

SEQ ID NO: 43572 - DNA, 20 bp, Human herpesvirus 2
caagtgggccgccttggcgg

SEQ ID NO: 43573 - DNA, 20 bp, Human herpesvirus 2
gcggccataaaggcgccaac

SEQ ID NO: 43574 - DNA, 20 bp, Human herpesvirus 2
tgtactcacgccctcccggt

SEQ ID NO: 43575 - DNA, 20 bp, Human herpesvirus 2
caggccctgcaccgctccga

SEQ ID NO: 43576 - DNA, 20 bp, Human herpesvirus 2
aggccctgcaccgctccgaa

SEQ ID NO: 43577 - DNA, 20 bp, Human herpesvirus 2
cggcagttggttcacttcgt

SEQ ID NO: 43578 - DNA, 20 bp, Human herpesvirus 2
ggcagttggttcacttcgtg

SEQ ID NO: 43579 - DNA, 20 bp, Human herpesvirus 2
gttcacttcgtgcgggactt

SEQ ID NO: 43580 - DNA, 20 bp, Human herpesvirus 2
tcgttcccggacggctcgcg

SEQ ID NO: 43581 - DNA, 20 bp, Human herpesvirus 2
ccggacggctcgcgcagcac

SEQ ID NO: 43582 - DNA, 20 bp, Human herpesvirus 2
gcctccagccacaacacgaa

SEQ ID NO: 43583 - DNA, 20 bp, Human herpesvirus 2
cctccagccacaacacgaac

SEQ ID NO: 43584 - DNA, 20 bp, Human herpesvirus 2
cgttcgtgttgtggctggag

SEQ ID NO: 43585 - DNA, 20 bp, Human herpesvirus 2
gggggggggtgggtgagcgg

SEQ ID NO: 43586 - DNA, 20 bp, Human herpesvirus 2
tgtcgcggggcggctacggg

SEQ ID NO: 43587 - DNA, 20 bp, Human herpesvirus 2
tccgctgacgcgtgcttttg

SEQ ID NO: 43588 - DNA, 20 bp, Human herpesvirus 2
tgttccaccgctcacccacc

SEQ ID NO: 43589 - DNA, 20 bp, Human herpesvirus 2
gttccaccgctcacccaccc

SEQ ID NO: 43590 - DNA, 20 bp, Human herpesvirus 2
aacccaaggcagaggtacgc

SEQ ID NO: 43591 - DNA, 20 bp, Human herpesvirus 2
ctcgcagaccctgtgtgggg

SEQ ID NO: 43592 - DNA, 20 bp, Human herpesvirus 2
cgggagagagctacgcgtac

SEQ ID NO: 43593 - DNA, 20 bp, Human herpesvirus 2
ggttcaatcgccgcctctgc

SEQ ID NO: 43594 - DNA, 20 bp, Human herpesvirus 2
gtggcggcgtagatgcgctt

SEQ ID NO: 43595 - DNA, 20 bp, Human herpesvirus 2
tccagggcctccaggaagac

SEQ ID NO: 43596 - DNA, 20 bp, Human herpesvirus 2
ctggaggccctggagaagcg

SEQ ID NO: 43597 - DNA, 20 bp, Human herpesvirus 2
gggttttggcggcccgtggg

SEQ ID NO: 43598 - DNA, 20 bp, Human herpesvirus 2
tggcggcccgtgggttgtta

SEQ ID NO: 43599 - DNA, 20 bp, Human herpesvirus 2
ggcggcccgtgggttgttag

SEQ ID NO: 43600 - DNA, 20 bp, Human herpesvirus 2
gcggcccgtgggttgttagt

SEQ ID NO: 43601 - DNA, 20 bp, Human herpesvirus 2
ttagtcgcgtccgccggcgg

SEQ ID NO: 43602 - DNA, 20 bp, Human herpesvirus 2
tatccgatcccgcggggcaa

SEQ ID NO: 43603 - DNA, 20 bp, Human herpesvirus 2
ccccgcgggatcggatacaa

SEQ ID NO: 43604 - DNA, 20 bp, Human herpesvirus 2
cgggcgttgacgtccgccgc

SEQ ID NO: 43605 - DNA, 20 bp, Human herpesvirus 2
tgccatgacgtccgccggga

SEQ ID NO: 43606 - DNA, 20 bp, Human herpesvirus 2
ccggagcgccgtcgtcgccc

SEQ ID NO: 43607 - DNA, 20 bp, Human herpesvirus 2
cgacgcgctggacgtttggg

SEQ ID NO: 43608 - DNA, 20 bp, Human herpesvirus 2
gacgcgctggacgtttggga

SEQ ID NO: 43609 - DNA, 20 bp, Human herpesvirus 2
gggaacacaggcgcttcatc

SEQ ID NO: 43610 - DNA, 20 bp, Human herpesvirus 2
ggaacacaggcgcttcatcg

SEQ ID NO: 43611 - DNA, 20 bp, Human herpesvirus 2
cgccttcgagtgcgccgtgc

SEQ ID NO: 43612 - DNA, 20 bp, Human herpesvirus 2
gagtgcgccgtgctgtgtct

SEQ ID NO: 43613 - DNA, 20 bp, Human herpesvirus 2
ggtacagcagatacagacac

SEQ ID NO: 43614 - DNA, 20 bp, Human herpesvirus 2
tcgaggcggtccgcgtacac

SEQ ID NO: 43615 - DNA, 20 bp, Human herpesvirus 2
aggtcgatgaaggtgctgac

SEQ ID NO: 43616 - DNA, 20 bp, Human herpesvirus 2
atcgacctgaacatcaccat

SEQ ID NO: 43617 - DNA, 20 bp, Human herpesvirus 2
ctccttgaggtgcggcagga

SEQ ID NO: 43618 - DNA, 20 bp, Human herpesvirus 2
aggtgcggcaggagccccac

SEQ ID NO: 43619 - DNA, 20 bp, Human herpesvirus 2
tcgacgctgtagtacagcgc

SEQ ID NO: 43620 - DNA, 20 bp, Human herpesvirus 2
atcatgggcgcggggggttc

SEQ ID NO: 43621 - DNA, 20 bp, Human herpesvirus 2
cgctggagggcggtccagaa

SEQ ID NO: 43622 - DNA, 20 bp, Human herpesvirus 2
ggctggttcgaccccggggg

SEQ ID NO: 43623 - DNA, 20 bp, Human herpesvirus 2
tggaccgccctccagcgcaa

SEQ ID NO: 43624 - DNA, 20 bp, Human herpesvirus 2
ccgccggcagaacttctaca

SEQ ID NO: 43625 - DNA, 20 bp, Human herpesvirus 2
tacaacccccacctcgctca

SEQ ID NO: 43626 - DNA, 20 bp, Human herpesvirus 2
ggctgcgttccggtctgagc

SEQ ID NO: 43627 - DNA, 20 bp, Human herpesvirus 2
gctgcgttccggtctgagcg

SEQ ID NO: 43628 - DNA, 20 bp, Human herpesvirus 2
cggtctgagcgaggtggggg

SEQ ID NO: 43629 - DNA, 20 bp, Human herpesvirus 2
ggaacctcgagcgacgtcga

SEQ ID NO: 43630 - DNA, 20 bp, Human herpesvirus 2
aactgcacggcggacaacct

SEQ ID NO: 43631 - DNA, 20 bp, Human herpesvirus 2
actgcacggcggacaacctg

SEQ ID NO: 43632 - DNA, 20 bp, Human herpesvirus 2
tccgccgtgcagttaaactc

SEQ ID NO: 43633 - DNA, 20 bp, Human herpesvirus 2
aactcgacgtcgctcgaggt

SEQ ID NO: 43634 - DNA, 20 bp, Human herpesvirus 2
gcgcagaggaacgcgtaatc

SEQ ID NO: 43635 - DNA, 20 bp, Human herpesvirus 2
cgcgttcctctgcgccaagt

SEQ ID NO: 43636 - DNA, 20 bp, Human herpesvirus 2
ctctgcgccaagtgcctggg

SEQ ID NO: 43637 - DNA, 20 bp, Human herpesvirus 2
cggtgctgtttcaggggttt

SEQ ID NO: 43638 - DNA, 20 bp, Human herpesvirus 2
ggtgctgtttcaggggtttt

SEQ ID NO: 43639 - DNA, 20 bp, Human herpesvirus 2
caggggttttttaaccggcc

SEQ ID NO: 43640 - DNA, 20 bp, Human herpesvirus 2
aggggttttttaaccggccc

SEQ ID NO: 43641 - DNA, 20 bp, Human herpesvirus 2
tttaaccggccccacggcgc

SEQ ID NO: 43642 - DNA, 20 bp, Human herpesvirus 2
gtgcgcatgccccgggtgca

SEQ ID NO: 43643 - DNA, 20 bp, Human herpesvirus 2
tgcgcatgccccgggtgcag

SEQ ID NO: 43644 - DNA, 20 bp, Human herpesvirus 2
ggggacttgacggtcgccac

SEQ ID NO: 43645 - DNA, 20 bp, Human herpesvirus 2
acggtcgccactctcctgcg

SEQ ID NO: 43646 - DNA, 20 bp, Human herpesvirus 2
gcccaccgattcctgttgcg

SEQ ID NO: 43647 - DNA, 20 bp, Human herpesvirus 2
ctgttgcgttcctgtcggcc

SEQ ID NO: 43648 - DNA, 20 bp, Human herpesvirus 2
cgttcctgtcggccggtgct

SEQ ID NO: 43649 - DNA, 20 bp, Human herpesvirus 2
ccccggtcccccccaacgca

SEQ ID NO: 43650 - DNA, 20 bp, Human herpesvirus 2
acgggttcaaacccctggtg

SEQ ID NO: 43651 - DNA, 20 bp, Human herpesvirus 2
aaacccctggtgcggcggtc

SEQ ID NO: 43652 - DNA, 20 bp, Human herpesvirus 2
gaacccgttaaccagccgcg

SEQ ID NO: 43653 - DNA, 20 bp, Human herpesvirus 2
aacccgttaaccagccgcgt

SEQ ID NO: 43654 - DNA, 20 bp, Human herpesvirus 2
gttgtgcgccgccaccaggg

SEQ ID NO: 43655 - DNA, 20 bp, Human herpesvirus 2
ttgtgcgccgccaccaggga

SEQ ID NO: 43656 - DNA, 20 bp, Human herpesvirus 2
tgcgccgccaccagggagtc

SEQ ID NO: 43657 - DNA, 20 bp, Human herpesvirus 2
agggccggcatgatgctggc

SEQ ID NO: 43658 - DNA, 20 bp, Human herpesvirus 2
gcatgcagggcctgcacacg

SEQ ID NO: 43659 - DNA, 20 bp, Human herpesvirus 2
aggcacgccgtgtgcaggcc

SEQ ID NO: 43660 - DNA, 20 bp, Human herpesvirus 2
gtgggggacgaggaggacgt

SEQ ID NO: 43661 - DNA, 20 bp, Human herpesvirus 2
gagacgtcctcctcgtcccc

SEQ ID NO: 43662 - DNA, 20 bp, Human herpesvirus 2
tggccgggaccgcggtagtg

SEQ ID NO: 43663 - DNA, 20 bp, Human herpesvirus 2
ccgcagccgacgatagcgca

SEQ ID NO: 43664 - DNA, 20 bp, Human herpesvirus 2
ttgcccgccgatccgtcagg

SEQ ID NO: 43665 - DNA, 20 bp, Human herpesvirus 2
tgcccgccgatccgtcaggt

SEQ ID NO: 43666 - DNA, 20 bp, Human herpesvirus 2
gcccgccgatccgtcaggtc

SEQ ID NO: 43667 - DNA, 20 bp, Human herpesvirus 2
cccgccgatccgtcaggtcg

SEQ ID NO: 43668 - DNA, 20 bp, Human herpesvirus 2
gcgggggcggagtcgttcaa

SEQ ID NO: 43669 - DNA, 20 bp, Human herpesvirus 2
aactgaacatggtcaacaaa

SEQ ID NO: 43670 - DNA, 20 bp, Human herpesvirus 2
gttgaccatgttcagttgaa

SEQ ID NO: 43671 - DNA, 20 bp, Human herpesvirus 2
ttgaccatgttcagttgaac

SEQ ID NO: 43672 - DNA, 20 bp, Human herpesvirus 2
accatgttcagttgaacgac

SEQ ID NO: 43673 - DNA, 20 bp, Human herpesvirus 2
cggctcccgtggaggttacg

SEQ ID NO: 43674 - DNA, 20 bp, Human herpesvirus 2
cggcgctgtatgcgaccgac

SEQ ID NO: 43675 - DNA, 20 bp, Human herpesvirus 2
tcacctcctcgctcgccctc

SEQ ID NO: 43676 - DNA, 20 bp, Human herpesvirus 2
gtgaggagggcgagcgagga

SEQ ID NO: 43677 - DNA, 20 bp, Human herpesvirus 2
tgaggagggcgagcgaggag

SEQ ID NO: 43678 - DNA, 20 bp, Human herpesvirus 2
tgcacggctccctgacgatg

SEQ ID NO: 43679 - DNA, 20 bp, Human herpesvirus 2
ttcgagaagaaggcgtcgcg

SEQ ID NO: 43680 - DNA, 20 bp, Human herpesvirus 2
tcgagaagaaggcgtcgcgc

SEQ ID NO: 43681 - DNA, 20 bp, Human herpesvirus 2
cgagaagaaggcgtcgcgca

SEQ ID NO: 43682 - DNA, 20 bp, Human herpesvirus 2
gagaagaaggcgtcgcgcaa

SEQ ID NO: 43683 - DNA, 20 bp, Human herpesvirus 2
cgcgacgccttcttctcgaa

SEQ ID NO: 43684 - DNA, 20 bp, Human herpesvirus 2
ctcgcgctgagcgtcgggac

SEQ ID NO: 43685 - DNA, 20 bp, Human herpesvirus 2
tcgcgctgagcgtcgggacc

SEQ ID NO: 43686 - DNA, 20 bp, Human herpesvirus 2
agtggcaaagcactgctgac

SEQ ID NO: 43687 - DNA, 20 bp, Human herpesvirus 2
gtggcaaagcactgctgaca

SEQ ID NO: 43688 - DNA, 20 bp, Human herpesvirus 2
ttggtcccgacgctcagcgc

SEQ ID NO: 43689 - DNA, 20 bp, Human herpesvirus 2
gtttctgtatctagcgttcg

SEQ ID NO: 43690 - DNA, 20 bp, Human herpesvirus 2
ctgtatctagcgttcgtcgc

SEQ ID NO: 43691 - DNA, 20 bp, Human herpesvirus 2
tgtatctagcgttcgtcgcc

SEQ ID NO: 43692 - DNA, 20 bp, Human herpesvirus 2
gtcgcccttcaccaacgacg

SEQ ID NO: 43693 - DNA, 20 bp, Human herpesvirus 2
accaacgacgatgcatgttc

SEQ ID NO: 43694 - DNA, 20 bp, Human herpesvirus 2
aacgccagaccctggtgcag

SEQ ID NO: 43695 - DNA, 20 bp, Human herpesvirus 2
gaggcggatccggtcacctt

SEQ ID NO: 43696 - DNA, 20 bp, Human herpesvirus 2
ttgtaccaccgcccggccgt

SEQ ID NO: 43697 - DNA, 20 bp, Human herpesvirus 2
taccaccgcccggccgttgg

SEQ ID NO: 43698 - DNA, 20 bp, Human herpesvirus 2
aacggatagctcgcagagga

SEQ ID NO: 43699 - DNA, 20 bp, Human herpesvirus 2
tggtcgtgtgcagggcgttt

SEQ ID NO: 43700 - DNA, 20 bp, Human herpesvirus 2
ggtcgtgtgcagggcgtttt

SEQ ID NO: 43701 - DNA, 20 bp, Human herpesvirus 2
gtcgtgtgcagggcgttttc

SEQ ID NO: 43702 - DNA, 20 bp, Human herpesvirus 2
tcggcctgccacgtggcatt

SEQ ID NO: 43703 - DNA, 20 bp, Human herpesvirus 2
cggcctgccacgtggcattc

SEQ ID NO: 43704 - DNA, 20 bp, Human herpesvirus 2
gcggctcagaagcctgcatg

SEQ ID NO: 43705 - DNA, 20 bp, Human herpesvirus 2
gactacgaccgaccacacga

SEQ ID NO: 43706 - DNA, 20 bp, Human herpesvirus 2
tgagccgcgaatccccacca

SEQ ID NO: 43707 - DNA, 20 bp, Human herpesvirus 2
catgccccgcaaaacgcgtc

SEQ ID NO: 43708 - DNA, 20 bp, Human herpesvirus 2
tgcggggcatgcaagtcgac

SEQ ID NO: 43709 - DNA, 20 bp, Human herpesvirus 2
gcggggcatgcaagtcgaca

SEQ ID NO: 43710 - DNA, 20 bp, Human herpesvirus 2
cggggcatgcaagtcgacac

SEQ ID NO: 43711 - DNA, 20 bp, Human herpesvirus 2
ccctagcggccccggccccc

SEQ ID NO: 43712 - DNA, 20 bp, Human herpesvirus 2
cgcaacggaatccaggtctt

SEQ ID NO: 43713 - DNA, 20 bp, Human herpesvirus 2
atgcacgggatgcagaaggg

SEQ ID NO: 43714 - DNA, 20 bp, Human herpesvirus 2
tccctgcctgcaccccttct

SEQ ID NO: 43715 - DNA, 20 bp, Human herpesvirus 2
ccctgcctgcaccccttctg

SEQ ID NO: 43716 - DNA, 20 bp, Human herpesvirus 2
cctgcctgcaccccttctgc

SEQ ID NO: 43717 - DNA, 20 bp, Human herpesvirus 2
gttgtgaggagccacgaggg

SEQ ID NO: 43718 - DNA, 20 bp, Human herpesvirus 2
ttgtgaggagccacgaggga

SEQ ID NO: 43719 - DNA, 20 bp, Human herpesvirus 2
tgaggagccacgagggaccg

SEQ ID NO: 43720 - DNA, 20 bp, Human herpesvirus 2
tgctccccagagcctgctgg

SEQ ID NO: 43721 - DNA, 20 bp, Human herpesvirus 2
gctccccagagcctgctggt

SEQ ID NO: 43722 - DNA, 20 bp, Human herpesvirus 2
ctccccagagcctgctggtg

SEQ ID NO: 43723 - DNA, 20 bp, Human herpesvirus 2
cgggccgcacgtttattcgg

SEQ ID NO: 43724 - DNA, 20 bp, Human herpesvirus 2
gcagacccctcgcttaagat

SEQ ID NO: 43725 - DNA, 20 bp, Human herpesvirus 2
agatggccgatcccaatcga

SEQ ID NO: 43726 - DNA, 20 bp, Human herpesvirus 2
cgcgggaagaaccttccggt

SEQ ID NO: 43727 - DNA, 20 bp, Human herpesvirus 2
gcgggaagaaccttccggtt

SEQ ID NO: 43728 - DNA, 20 bp, Human herpesvirus 2
cggttttggaccagctgacc

SEQ ID NO: 43729 - DNA, 20 bp, Human herpesvirus 2
gttttgggggtggcgctctc

SEQ ID NO: 43730 - DNA, 20 bp, Human herpesvirus 2
ttttgggggtggcgctctct

SEQ ID NO: 43731 - DNA, 20 bp, Human herpesvirus 2
tgggggtggcgctctctgcc

SEQ ID NO: 43732 - DNA, 20 bp, Human herpesvirus 2
gggggtggcgctctctgcca

SEQ ID NO: 43733 - DNA, 20 bp, Human herpesvirus 2
ggggtggcgctctctgccaa

SEQ ID NO: 43734 - DNA, 20 bp, Human herpesvirus 2
gatctagcacacccacgggt

SEQ ID NO: 43735 - DNA, 20 bp, Human herpesvirus 2
atacgatctcgtcgaccggg

SEQ ID NO: 43736 - DNA, 20 bp, Human papillomavirus type 41
gttctcagtgtactagagtg

SEQ ID NO: 43737 - DNA, 20 bp, Human papillomavirus type 41
ttctcagtgtactagagtgc

SEQ ID NO: 43738 - DNA, 20 bp, Human papillomavirus type 41
tcagtgtactagagtgcttg

SEQ ID NO: 43739 - DNA, 20 bp, Human papillomavirus type 41
caaggctggagttcactgca

SEQ ID NO: 43740 - DNA, 20 bp, Human papillomavirus type 41
actgcacggcacgaagtgtc

SEQ ID NO: 43741 - DNA, 20 bp, Human papillomavirus type 41
tgttcgatgtatggtaggac

SEQ ID NO: 43742 - DNA, 20 bp, Human papillomavirus type 41
gatgtatggtaggactgtat

SEQ ID NO: 43743 - DNA, 20 bp, Human papillomavirus type 41
gctgtgagactaatatactg

SEQ ID NO: 43744 - DNA, 20 bp, Human papillomavirus type 41
gctgtattgtattgctgtaa

SEQ ID NO: 43745 - DNA, 20 bp, Human papillomavirus type 41
ctgtattgtattgctgtaat

SEQ ID NO: 43746 - DNA, 20 bp, Human papillomavirus type 41
gtatgcgtagcaagcaacac

SEQ ID NO: 43747 - DNA, 20 bp, Human papillomavirus type 41
tatgcgtagcaagcaacact

SEQ ID NO: 43748 - DNA, 20 bp, Human papillomavirus type 41
acctcgcttgtcacgcctgt

SEQ ID NO: 43749 - DNA, 20 bp, Human papillomavirus type 41
accaggagtgcctgtagatt

SEQ ID NO: 43750 - DNA, 20 bp, Human papillomavirus type 41
cgtatcccagtgttgcttgc

SEQ ID NO: 43751 - DNA, 20 bp, Human papillomavirus type 41
ggttgtggccgcctactatt

SEQ ID NO: 43752 - DNA, 20 bp, Human papillomavirus type 41
tggccgcctactatttagct

SEQ ID NO: 43753 - DNA, 20 bp, Human papillomavirus type 41
agcttttgatagtgagataa

SEQ ID NO: 43754 - DNA, 20 bp, Human papillomavirus type 41
gcttttgatagtgagataag

SEQ ID NO: 43755 - DNA, 20 bp, Human papillomavirus type 41
tgatagtgagataagtgcta

SEQ ID NO: 43756 - DNA, 20 bp, Human papillomavirus type 41
atgggtacagggggtataaa

SEQ ID NO: 43757 - DNA, 20 bp, Human papillomavirus type 41
tgggtacagggggtataaaa

SEQ ID NO: 43758 - DNA, 20 bp, Human papillomavirus type 41
taaaccagtgcgtggtgtct

SEQ ID NO: 43759 - DNA, 20 bp, Human papillomavirus type 41
gaattatcacgtatggtaca

SEQ ID NO: 43760 - DNA, 20 bp, Human papillomavirus type 41
aattatcacgtatggtacag

SEQ ID NO: 43761 - DNA, 20 bp, Human papillomavirus type 41
cacagtatgtgaataagcgg

SEQ ID NO: 43762 - DNA, 20 bp, Human papillomavirus type 41
acagtatgtgaataagcggt

SEQ ID NO: 43763 - DNA, 20 bp, Human papillomavirus type 41
cccgccagctgttttcatca

SEQ ID NO: 43764 - DNA, 20 bp, Human papillomavirus type 41
tcatcagcttccccatggtc

SEQ ID NO: 43765 - DNA, 20 bp, Human papillomavirus type 41
catcagcttccccatggtcc

SEQ ID NO: 43766 - DNA, 20 bp, Human papillomavirus type 41
gtcagcaatgggtcacattt

SEQ ID NO: 43767 - DNA, 20 bp, Human papillomavirus type 41
tcagcaatgggtcacatttt

SEQ ID NO: 43768 - DNA, 20 bp, Human papillomavirus type 41
ttggttatcaccattacgtg

SEQ ID NO: 43769 - DNA, 20 bp, Human papillomavirus type 41
tggttatcaccattacgtgg

SEQ ID NO: 43770 - DNA, 20 bp, Human papillomavirus type 41
ggttatcaccattacgtggg

SEQ ID NO: 43771 - DNA, 20 bp, Human papillomavirus type 41
gacaatgatcccgaaaacct

SEQ ID NO: 43772 - DNA, 20 bp, Human papillomavirus type 41
acaatgatcccgaaaacctt

SEQ ID NO: 43773 - DNA, 20 bp, Human papillomavirus type 41
cagaagttgtattgtggaaa

SEQ ID NO: 43774 - DNA, 20 bp, Human papillomavirus type 41
tattgtggaaatgggtttat

SEQ ID NO: 43775 - DNA, 20 bp, Human papillomavirus type 41
tggaaatgggtttattatat

SEQ ID NO: 43776 - DNA, 20 bp, Human papillomavirus type 41
ccgacagctcctccacgagg

SEQ ID NO: 43777 - DNA, 20 bp, Human papillomavirus type 41
cctcgtttctgcgtcgtctc

SEQ ID NO: 43778 - DNA, 20 bp, Human papillomavirus type 41
ctcgtttctgcgtcgtctcg

SEQ ID NO: 43779 - DNA, 20 bp, Human papillomavirus type 41
ctgcgtcgtctcgacccctg

SEQ ID NO: 43780 - DNA, 20 bp, Human papillomavirus type 41
tgcgtcgtctcgacccctgc

SEQ ID NO: 43781 - DNA, 20 bp, Human papillomavirus type 41
cgcgcacacgcagaaaagct

SEQ ID NO: 43782 - DNA, 20 bp, Human papillomavirus type 41
gcgcacacgcagaaaagctg

SEQ ID NO: 43783 - DNA, 20 bp, Human papillomavirus type 41
aacaatgcttgctaggcaaa

SEQ ID NO: 43784 - DNA, 20 bp, Human papillomavirus type 41
ctaggcaaagggttaaacgc

SEQ ID NO: 43785 - DNA, 20 bp, Human papillomavirus type 41
aacgcgctaatcctgaacaa

SEQ ID NO: 43786 - DNA, 20 bp, Human papillomavirus type 41
gggctggggcagttggggga

SEQ ID NO: 43787 - DNA, 20 bp, Human papillomavirus type 41
ggggacgcccgtccatatcc

SEQ ID NO: 43788 - DNA, 20 bp, Human papillomavirus type 41
gtccccgggatattttgcca

SEQ ID NO: 43789 - DNA, 20 bp, Human papillomavirus type 41
tgccaattgaatcagggggg

SEQ ID NO: 43790 - DNA, 20 bp, Human papillomavirus type 41
gccaattgaatcaggggggc

SEQ ID NO: 43791 - DNA, 20 bp, Human papillomavirus type 41
gctagatatatcccgggggg

SEQ ID NO: 43792 - DNA, 20 bp, Human papillomavirus type 41
ctagatatatcccgggggga

SEQ ID NO: 43793 - DNA, 20 bp, Human papillomavirus type 41
acacaacaatacttgcccct

SEQ ID NO: 43794 - DNA, 20 bp, Human papillomavirus type 41
cccctggcgaggaggagact

SEQ ID NO: 43795 - DNA, 20 bp, Human papillomavirus type 41
gtgaccagcactcctgaacg

SEQ ID NO: 43796 - DNA, 20 bp, Human papillomavirus type 41
ttaccagaggcgcactactg

SEQ ID NO: 43797 - DNA, 20 bp, Human papillomavirus type 41
ccagaggcgcactactggcc

SEQ ID NO: 43798 - DNA, 20 bp, Human papillomavirus type 41
gtgttagtcgcctggggcaa

SEQ ID NO: 43799 - DNA, 20 bp, Human papillomavirus type 41
gtcgcctggggcaacgtcgg

SEQ ID NO: 43800 - DNA, 20 bp, Human papillomavirus type 41
ccccaggcgactaacacgaa

SEQ ID NO: 43801 - DNA, 20 bp, Human papillomavirus type 41
tgagaggagaccctacgcct

SEQ ID NO: 43802 - DNA, 20 bp, Human papillomavirus type 41
tattgagcaagacataggac

SEQ ID NO: 43803 - DNA, 20 bp, Human papillomavirus type 41
agcaagacataggactaacc

SEQ ID NO: 43804 - DNA, 20 bp, Human papillomavirus type 41
gggggacaacattgaaaatg

SEQ ID NO: 43805 - DNA, 20 bp, Human papillomavirus type 41
ggggacaacattgaaaatga

SEQ ID NO: 43806 - DNA, 20 bp, Human papillomavirus type 41
cctccatgctgccactgacc

SEQ ID NO: 43807 - DNA, 20 bp, Human papillomavirus type 41
ctccatgctgccactgaccg

SEQ ID NO: 43808 - DNA, 20 bp, Human papillomavirus type 41
gcttactgttggacatccat

SEQ ID NO: 43809 - DNA, 20 bp, Human papillomavirus type 41
cttactgttggacatccatt

SEQ ID NO: 43810 - DNA, 20 bp, Human papillomavirus type 41
ctgttggacatccattttac

SEQ ID NO: 43811 - DNA, 20 bp, Human papillomavirus type 41
ggtattggtgtaacagggaa

SEQ ID NO: 43812 - DNA, 20 bp, Human papillomavirus type 41
gtgtaacagggaaccctttt

SEQ ID NO: 43813 - DNA, 20 bp, Human papillomavirus type 41
ttttaataagtttgatgatg

SEQ ID NO: 43814 - DNA, 20 bp, Human papillomavirus type 41
tttaataagtttgatgatgc

SEQ ID NO: 43815 - DNA, 20 bp, Human papillomavirus type 41
ttaataagtttgatgatgct

SEQ ID NO: 43816 - DNA, 20 bp, Human papillomavirus type 41
agtcctcatacattgaggat

SEQ ID NO: 43817 - DNA, 20 bp, Human papillomavirus type 41
aggatgcagacatgagtgac

SEQ ID NO: 43818 - DNA, 20 bp, Human papillomavirus type 41
aatttttctacactgcagag

SEQ ID NO: 43819 - DNA, 20 bp, Human papillomavirus type 41
ttctacactgcagagaaaca

SEQ ID NO: 43820 - DNA, 20 bp, Human papillomavirus type 41
tctacactgcagagaaacaa

SEQ ID NO: 43821 - DNA, 20 bp, Human papillomavirus type 41
ctgagggggatgcttcttca

SEQ ID NO: 43822 - DNA, 20 bp, Human papillomavirus type 41
ttcatataacaattctaagt

SEQ ID NO: 43823 - DNA, 20 bp, Human papillomavirus type 41
atataacaattctaagtttt

SEQ ID NO: 43824 - DNA, 20 bp, Human papillomavirus type 41
taagttttttgagtttttaa

SEQ ID NO: 43825 - DNA, 20 bp, Human papillomavirus type 41
tttgagtttttaaggcacac

SEQ ID NO: 43826 - DNA, 20 bp, Human papillomavirus type 41
agttttgggaggttgatcta

SEQ ID NO: 43827 - DNA, 20 bp, Human papillomavirus type 41
tgggaggttgatctacggga

SEQ ID NO: 43828 - DNA, 20 bp, Human papillomavirus type 41
gggaggttgatctacgggat

SEQ ID NO: 43829 - DNA, 20 bp, Human papillomavirus type 41
ggaggttgatctacgggatc

SEQ ID NO: 43830 - DNA, 20 bp, Human papillomavirus type 41
atctacgggatcgtatgaca

SEQ ID NO: 43831 - DNA, 20 bp, Human papillomavirus type 41
ccaatagccccatctggcgg

SEQ ID NO: 43832 - DNA, 20 bp, Human papillomavirus type 41
aactgaaacggtgtgtactg

SEQ ID NO: 43833 - DNA, 20 bp, Human papillomavirus type 41
ttgttattggaacgcctccg

SEQ ID NO: 43834 - DNA, 20 bp, Human papillomavirus type 41
tgttattggaacgcctccgg

SEQ ID NO: 43835 - DNA, 20 bp, Human papillomavirus type 41
gttattggaacgcctccggt

SEQ ID NO: 43836 - DNA, 20 bp, Human papillomavirus type 167
agagtcactgtcatccgatt

SEQ ID NO: 43837 - DNA, 20 bp, Human papillomavirus type 167
tgaaggagaggaggagcaat

SEQ ID NO: 43838 - DNA, 20 bp, Human papillomavirus type 167
gaaccttatagaatagaatg

SEQ ID NO: 43839 - DNA, 20 bp, Human papillomavirus type 167
tagaatagaatgcacctgtt

SEQ ID NO: 43840 - DNA, 20 bp, Human papillomavirus type 167
taattgtggtataagaatta

SEQ ID NO: 43841 - DNA, 20 bp, Human papillomavirus type 167
tgtagcagatctgagtccaa

SEQ ID NO: 43842 - DNA, 20 bp, Human papillomavirus type 167
acatatcacctcgaaaaaac

SEQ ID NO: 43843 - DNA, 20 bp, Human papillomavirus type 167
tttcgggacagtggaataga

SEQ ID NO: 43844 - DNA, 20 bp, Human papillomavirus type 167
cactgtcccgaaataagcgt

SEQ ID NO: 43845 - DNA, 20 bp, Human papillomavirus type 167
tgatgttttttcgaggtgat

SEQ ID NO: 43846 - DNA, 20 bp, Human papillomavirus type 167
cgatgcactgcaagaagctc

SEQ ID NO: 43847 - DNA, 20 bp, Human papillomavirus type 167
gatgcactgcaagaagctct

SEQ ID NO: 43848 - DNA, 20 bp, Human papillomavirus type 167
gctttctcaaattgaacatt

SEQ ID NO: 43849 - DNA, 20 bp, Human papillomavirus type 167
ctttctcaaattgaacattg

SEQ ID NO: 43850 - DNA, 20 bp, Human papillomavirus type 167
ctcaaattgaacattggaat

SEQ ID NO: 43851 - DNA, 20 bp, Human papillomavirus type 167
aaaataaaatagaaggtgaa

SEQ ID NO: 43852 - DNA, 20 bp, Human papillomavirus type 167
ctgatcgtttgttaaaatgg

SEQ ID NO: 43853 - DNA, 20 bp, Human papillomavirus type 167
gttaaaatggttcggaagtt

SEQ ID NO: 43854 - DNA, 20 bp, Human papillomavirus type 167
ttaaaatggttcggaagttt

SEQ ID NO: 43855 - DNA, 20 bp, Human papillomavirus type 167
aaatggttcggaagttttat

SEQ ID NO: 43856 - DNA, 20 bp, Human papillomavirus type 167
ttaggtcaagtttcccgcgc

SEQ ID NO: 43857 - DNA, 20 bp, Human papillomavirus type 167
taggtcaagtttcccgcgca

SEQ ID NO: 43858 - DNA, 20 bp, Human papillomavirus type 167
aggtcaagtttcccgcgcag

SEQ ID NO: 43859 - DNA, 20 bp, Human papillomavirus type 167
ggtcaagtttcccgcgcagt

SEQ ID NO: 43860 - DNA, 20 bp, Human papillomavirus type 167
cccgcgcagttcaatttgaa

SEQ ID NO: 43861 - DNA, 20 bp, Human papillomavirus type 167
ttttatggatttatcagcaa

SEQ ID NO: 43862 - DNA, 20 bp, Human papillomavirus type 167
tttatggatttatcagcaat

SEQ ID NO: 43863 - DNA, 20 bp, Human papillomavirus type 167
ttatggatttatcagcaatt

SEQ ID NO: 43864 - DNA, 20 bp, Human papillomavirus type 167
tatggatttatcagcaattc

SEQ ID NO: 43865 - DNA, 20 bp, Human papillomavirus type 167
atggatttatcagcaattcc

SEQ ID NO: 43866 - DNA, 20 bp, Human papillomavirus type 167
agtacggatgaatatgtgaa

SEQ ID NO: 43867 - DNA, 20 bp, Human papillomavirus type 167
tttcatactggaactgacag

SEQ ID NO: 43868 - DNA, 20 bp, Human papillomavirus type 167
ttcatactggaactgacaga

SEQ ID NO: 43869 - DNA, 20 bp, Human papillomavirus type 167
tcatactggaactgacagat

SEQ ID NO: 43870 - DNA, 20 bp, Human papillomavirus type 167
catactggaactgacagatt

SEQ ID NO: 43871 - DNA, 20 bp, Human papillomavirus type 167
aaggcagtacaaatggatag

SEQ ID NO: 43872 - DNA, 20 bp, Human papillomavirus type 167
gagttggtgtttctgggcac

SEQ ID NO: 43873 - DNA, 20 bp, Human papillomavirus type 167
gtgtttctgggcacccatta

SEQ ID NO: 43874 - DNA, 20 bp, Human papillomavirus type 167
ctgggcacccattatttaat

SEQ ID NO: 43875 - DNA, 20 bp, Human papillomavirus type 167
tgggcacccattatttaata

SEQ ID NO: 43876 - DNA, 20 bp, Human papillomavirus type 187
atacttgacactcaacagct

SEQ ID NO: 43877 - DNA, 20 bp, Human papillomavirus type 187
tacttgacactcaacagctt

SEQ ID NO: 43878 - DNA, 20 bp, Human papillomavirus type 187
acactcaacagcttgctgat

SEQ ID NO: 43879 - DNA, 20 bp, Human papillomavirus type 187
ctgatttttacagaaagggt

SEQ ID NO: 43880 - DNA, 20 bp, Human papillomavirus type 187
ttacagaaagggtcttagcc

SEQ ID NO: 43881 - DNA, 20 bp, Human papillomavirus type 187
aaaagtatgacactgtttgc

SEQ ID NO: 43882 - DNA, 20 bp, Human papillomavirus type 187
gcagaaacgagcacttctat

SEQ ID NO: 43883 - DNA, 20 bp, Human papillomavirus type 187
cagaaacgagcacttctatt

SEQ ID NO: 43884 - DNA, 20 bp, Human papillomavirus type 187
tatttagtgcgcaacggctg

SEQ ID NO: 43885 - DNA, 20 bp, Human papillomavirus type 187
agtgcgcaacggctggaaag

SEQ ID NO: 43886 - DNA, 20 bp, Human papillomavirus type 187
taaagcaggtgtaagattat

SEQ ID NO: 43887 - DNA, 20 bp, Human papillomavirus type 187
tcaattgtagctacagctac

SEQ ID NO: 43888 - DNA, 20 bp, Human papillomavirus type 187
tagctacagctactgctgtt

SEQ ID NO: 43889 - DNA, 20 bp, Human papillomavirus type 187
gtactcttcaagtgttgctg

SEQ ID NO: 43890 - DNA, 20 bp, Human papillomavirus type 187
aagtgttgctgtttgcagaa

SEQ ID NO: 43891 - DNA, 20 bp, Human papillomavirus type 187
gaagacagtacagacggttc

SEQ ID NO: 43892 - DNA, 20 bp, Human papillomavirus type 187
aagacagtacagacggttca

SEQ ID NO: 43893 - DNA, 20 bp, Human papillomavirus type 187
atgtatctctcagctgattg

SEQ ID NO: 43894 - DNA, 20 bp, Human papillomavirus type 187
atgatgccgatgaactggac

SEQ ID NO: 43895 - DNA, 20 bp, Human papillomavirus type 187
aacagtgccagggaatttcc

SEQ ID NO: 43896 - DNA, 20 bp, Human papillomavirus type 187
tcaggtagtcgctatagaaa

SEQ ID NO: 43897 - DNA, 20 bp, Human papillomavirus type 187
tatcggcgccattaggcttt

SEQ ID NO: 43898 - DNA, 20 bp, Human papillomavirus type 187
ggcttttccaccacagatgt

SEQ ID NO: 43899 - DNA, 20 bp, Human papillomavirus type 187
tccaccacagatgtttctat

SEQ ID NO: 43900 - DNA, 20 bp, Human papillomavirus type 187
ccaccacagatgtttctata

SEQ ID NO: 43901 - DNA, 20 bp, Human papillomavirus type 187
gctaacctaatactgttaga

SEQ ID NO: 43902 - DNA, 20 bp, Human papillomavirus type 187
gatcatcgaacagcttcagc

SEQ ID NO: 43903 - DNA, 20 bp, Human papillomavirus type 187
agcagataattttgatttat

SEQ ID NO: 43904 - DNA, 20 bp, Human papillomavirus type 187
tgatttatcaaaaatgatac

SEQ ID NO: 43905 - DNA, 20 bp, Human papillomavirus type 187
gatttatcaaaaatgataca

SEQ ID NO: 43906 - DNA, 20 bp, Human papillomavirus type 187
gacatttgaaataaccaatg

SEQ ID NO: 43907 - DNA, 20 bp, Human papillomavirus type 187
acatttgaaataaccaatga

SEQ ID NO: 43908 - DNA, 20 bp, Human papillomavirus type 187
gaaataaccaatgatacttg

SEQ ID NO: 43909 - DNA, 20 bp, Human papillomavirus type 187
aaataaccaatgatacttgg

SEQ ID NO: 43910 - DNA, 20 bp, Human papillomavirus type 187
ggcatgtttttttagaaaat

SEQ ID NO: 43911 - DNA, 20 bp, Human papillomavirus type 187
ctggaggttgtagaggagtc

SEQ ID NO: 43912 - DNA, 20 bp, Human papillomavirus type 187
tagaggagtcgtcccgtttc

SEQ ID NO: 43913 - DNA, 20 bp, Human papillomavirus type 187
acaagttggagcacgacatc

SEQ ID NO: 43914 - DNA, 20 bp, Human papillomavirus type 187
gagcacgacatcgatcaact

SEQ ID NO: 43915 - DNA, 20 bp, Human papillomavirus type 187
cgcgacttcaacgacttcaa

SEQ ID NO: 43916 - DNA, 20 bp, Human papillomavirus type 187
aacgacttcaagctgaggct

SEQ ID NO: 43917 - DNA, 20 bp, Human papillomavirus type 187
aagctgaggcttgggatccc

SEQ ID NO: 43918 - DNA, 20 bp, Human papillomavirus type 187
ttctttaggctccttcgata

SEQ ID NO: 43919 - DNA, 20 bp, Human papillomavirus type 187
tctttaggctccttcgatag

SEQ ID NO: 43920 - DNA, 20 bp, Human papillomavirus type 187
ctttaggctccttcgatagt

SEQ ID NO: 43921 - DNA, 20 bp, Human papillomavirus type 187
tttaggctccttcgatagtt

SEQ ID NO: 43922 - DNA, 20 bp, Human papillomavirus type 187
aggctccttcgatagtttat

SEQ ID NO: 43923 - DNA, 20 bp, Human papillomavirus type 187
ccactggtattcgtccatta

SEQ ID NO: 43924 - DNA, 20 bp, Human papillomavirus type 187
gtccattacctgaaaatata

SEQ ID NO: 43925 - DNA, 20 bp, Human papillomavirus type 187
cctgaaaatatacctttacc

SEQ ID NO: 43926 - DNA, 20 bp, Human papillomavirus type 187
accggagactgtaccagaac

SEQ ID NO: 43927 - DNA, 20 bp, Human papillomavirus type 187
ccggagactgtaccagaacc

SEQ ID NO: 43928 - DNA, 20 bp, Human papillomavirus type 187
tggatgttaatgctggtaca

SEQ ID NO: 43929 - DNA, 20 bp, Human papillomavirus type 187
atgctggtacaggggaggga

SEQ ID NO: 43930 - DNA, 20 bp, Human papillomavirus type 187
ggtatgaaatatatacagat

SEQ ID NO: 43931 - DNA, 20 bp, Human papillomavirus type 187
tctgtttcaccactggttac

SEQ ID NO: 43932 - DNA, 20 bp, Human papillomavirus type 187
ctgtttcaccactggttact

SEQ ID NO: 43933 - DNA, 20 bp, Human papillomavirus type 187
caacccttgaataggatcag

SEQ ID NO: 43934 - DNA, 20 bp, Human papillomavirus type 187
aataggatcagtgatataga

SEQ ID NO: 43935 - DNA, 20 bp, Human papillomavirus type 187
gattctttgcaaagaactag

SEQ ID NO: 43936 - DNA, 20 bp, Human papillomavirus type 187
tttgcaaagaactagcacac

SEQ ID NO: 43937 - DNA, 20 bp, Human papillomavirus type 187
gcaaagaactagcacaccat

SEQ ID NO: 43938 - DNA, 20 bp, Human papillomavirus type 187
caggatgatataagtctaga

SEQ ID NO: 43939 - DNA, 20 bp, Human papillomavirus type 187
aggatgatataagtctagag

SEQ ID NO: 43940 - DNA, 20 bp, Human papillomavirus type 187
gagcgggatcttagagagtt

SEQ ID NO: 43941 - DNA, 20 bp, Human papillomavirus type 187
agcgggatcttagagagttg

SEQ ID NO: 43942 - DNA, 20 bp, Human papillomavirus type 187
gagagttggcagctgctcca

SEQ ID NO: 43943 - DNA, 20 bp, Human papillomavirus type 187
cgttggaaacattgggagaa

SEQ ID NO: 43944 - DNA, 20 bp, Human papillomavirus type 187
gaaacattgggagaatctcc

SEQ ID NO: 43945 - DNA, 20 bp, Human papillomavirus type 187
ggagaatctccagatcaatt

SEQ ID NO: 43946 - DNA, 20 bp, Human papillomavirus type 187
actatagtagatggattagg

SEQ ID NO: 43947 - DNA, 20 bp, Human papillomavirus type 187
gggggaggtacattaattga

SEQ ID NO: 43948 - DNA, 20 bp, Human papillomavirus type 187
gaaggggaggacctttggga

SEQ ID NO: 43949 - DNA, 20 bp, Human papillomavirus type 187
gggattgggaacatcgggtc

SEQ ID NO: 43950 - DNA, 20 bp, Human papillomavirus type 187
ggattgggaacatcgggtca

SEQ ID NO: 43951 - DNA, 20 bp, Human papillomavirus type 187
ggaacatcgggtcatccttt

SEQ ID NO: 43952 - DNA, 20 bp, Human papillomavirus type 187
atttaacaaattaggtgaca

SEQ ID NO: 43953 - DNA, 20 bp, Human papillomavirus type 187
aattcagtaatacaggatgg

SEQ ID NO: 43954 - DNA, 20 bp, Human papillomavirus type 187
agtaatacaggatggggata

SEQ ID NO: 43955 - DNA, 20 bp, Human papillomavirus type 187
gctttggggctgcaaacttc

SEQ ID NO: 43956 - DNA, 20 bp, Human papillomavirus type 187
ggggctgcaaacttcaaaac

SEQ ID NO: 43957 - DNA, 20 bp, Human papillomavirus type 187
gggctgcaaacttcaaaacg

SEQ ID NO: 43958 - DNA, 20 bp, Human papillomavirus type 187
tcctttacttgattaatgta

SEQ ID NO: 43959 - DNA, 20 bp, Human papillomavirus type 187
cctttacttgattaatgtac

SEQ ID NO: 43960 - DNA, 20 bp, Human papillomavirus type 187
ctttacttgattaatgtact

SEQ ID NO: 43961 - DNA, 20 bp, Human papillomavirus type 187
acttgattaatgtactgtga

SEQ ID NO: 43962 - DNA, 20 bp, Human papillomavirus type 187
cttgattaatgtactgtgaa

SEQ ID NO: 43963 - DNA, 20 bp, Human papillomavirus type 187
gtaaaggtaagtgcaagttc

SEQ ID NO: 43964 - DNA, 20 bp, Human papillomavirus type 187
taaaggtaagtgcaagttca

SEQ ID NO: 43965 - DNA, 20 bp, Human papillomavirus type 187
agacgaatatagactgactc

SEQ ID NO: 43966 - DNA, 20 bp, Human papillomavirus type 187
ggtcgctgccagatttgagt

SEQ ID NO: 43967 - DNA, 20 bp, Human papillomavirus type 187
gagtcagtctatattcgtct

SEQ ID NO: 43968 - DNA, 20 bp, Influenza C virus
aagaaatggactacatcaag

SEQ ID NO: 43969 - DNA, 20 bp, Influenza C virus
ttagtgaaggattcttttcc

SEQ ID NO: 43970 - DNA, 20 bp, Influenza C virus
gtgaaggattcttttccttc

SEQ ID NO: 43971 - DNA, 20 bp, Influenza C virus
ttttccttccttgatgtagt

SEQ ID NO: 43972 - DNA, 20 bp, Influenza C virus
tccttccttgatgtagtcca

SEQ ID NO: 43973 - DNA, 20 bp, Influenza C virus
ctggttccggagtaaaagtt

SEQ ID NO: 43974 - DNA, 20 bp, Influenza C virus
tggttccggagtaaaagtta

SEQ ID NO: 43975 - DNA, 20 bp, Influenza C virus
cggagtaaaagttaaagata

SEQ ID NO: 43976 - DNA, 20 bp, Influenza C virus
aagatacagtatatatccaa

SEQ ID NO: 43977 - DNA, 20 bp, Influenza C virus
gaatactggagtgagcaaga

SEQ ID NO: 43978 - DNA, 20 bp, Influenza C virus
gattcatcaggaagaattgt

SEQ ID NO: 43979 - DNA, 20 bp, Influenza C virus
attcatcaggaagaattgtt

SEQ ID NO: 43980 - DNA, 20 bp, Influenza C virus
atcaggaagaattgttgcaa

SEQ ID NO: 43981 - DNA, 20 bp, Influenza C virus
ttgcaacaattttagacctt

SEQ ID NO: 43982 - DNA, 20 bp, Influenza C virus
caacaattttagaccttcct

SEQ ID NO: 43983 - DNA, 20 bp, Influenza C virus
agttgttggagatgaacaca

SEQ ID NO: 43984 - DNA, 20 bp, Influenza C virus
gttgttggagatgaacacat

SEQ ID NO: 43985 - DNA, 20 bp, Influenza C virus
ttggagatgaacacatggac

SEQ ID NO: 43986 - DNA, 20 bp, Influenza C virus
gagatgaacacatggacact

SEQ ID NO: 43987 - DNA, 20 bp, Influenza C virus
gttagcactattagaagggt

SEQ ID NO: 43988 - DNA, 20 bp, Human papillomavirus type 88
taccgctgctctgtaaaggg

SEQ ID NO: 43989 - DNA, 20 bp, Human papillomavirus type 88
accgctgctctgtaaaggga

SEQ ID NO: 43990 - DNA, 20 bp, Human papillomavirus type 88
ccgctgctctgtaaagggaa

SEQ ID NO: 43991 - DNA, 20 bp, Human papillomavirus type 88
attttgaggatttcctaaga

SEQ ID NO: 43992 - DNA, 20 bp, Human papillomavirus type 88
tgaggatttcctaagaaaga

SEQ ID NO: 43993 - DNA, 20 bp, Human papillomavirus type 88
cctgctaaccttttaagcaa

SEQ ID NO: 43994 - DNA, 20 bp, Human papillomavirus type 88
taagcaacgaggttttgtca

SEQ ID NO: 43995 - DNA, 20 bp, Human papillomavirus type 88
aagcaacgaggttttgtcat

SEQ ID NO: 43996 - DNA, 20 bp, Human papillomavirus type 88
agcaacgaggttttgtcatc

SEQ ID NO: 43997 - DNA, 20 bp, Human papillomavirus type 88
tgtcatctgatgaggagacc

SEQ ID NO: 43998 - DNA, 20 bp, Human papillomavirus type 88
atcaaaagtccgcagctgca

SEQ ID NO: 43999 - DNA, 20 bp, Human papillomavirus type 88
ctgagttgagtccaaggctt

SEQ ID NO: 44000 - DNA, 20 bp, Human papillomavirus type 88
agtccaaggcttcaagcagt

SEQ ID NO: 44001 - DNA, 20 bp, Human papillomavirus type 88
aagcagtttcaatttcaccc

SEQ ID NO: 44002 - DNA, 20 bp, Human papillomavirus type 88
caatttcacccaaaaaacaa

SEQ ID NO: 44003 - DNA, 20 bp, Human papillomavirus type 88
tctggtgtttgttgggcccc

SEQ ID NO: 44004 - DNA, 20 bp, Human papillomavirus type 88
gttgggccccctgacactgg

SEQ ID NO: 44005 - DNA, 20 bp, Human papillomavirus type 88
ttgggccccctgacactggg

SEQ ID NO: 44006 - DNA, 20 bp, Human papillomavirus type 88
ggccccctgacactgggaaa

SEQ ID NO: 44007 - DNA, 20 bp, Human papillomavirus type 88
ctgcttctcattaatacgtt

SEQ ID NO: 44008 - DNA, 20 bp, Human papillomavirus type 88
cgttgcactgcaagatgcca

SEQ ID NO: 44009 - DNA, 20 bp, Human papillomavirus type 88
gttgcactgcaagatgccat

SEQ ID NO: 44010 - DNA, 20 bp, Human papillomavirus type 88
cactgcaagatgccatattg

SEQ ID NO: 44011 - DNA, 20 bp, Human papillomavirus type 88
aatctaattgaaaggggaga

SEQ ID NO: 44012 - DNA, 20 bp, Human papillomavirus type 88
aaaggggagaaactgattta

SEQ ID NO: 44013 - DNA, 20 bp, Human papillomavirus type 88
tccgagagtgtttccgtcgg

SEQ ID NO: 44014 - DNA, 20 bp, Human papillomavirus type 88
ccgtcggtggctgttcttct

SEQ ID NO: 44015 - DNA, 20 bp, Human papillomavirus type 88
cgtcggtggctgttcttctt

SEQ ID NO: 44016 - DNA, 20 bp, Human papillomavirus type 88
ttcttctctttgctccggag

SEQ ID NO: 44017 - DNA, 20 bp, Human papillomavirus type 88
ttctctttgctccggaggtt

SEQ ID NO: 44018 - DNA, 20 bp, Human papillomavirus type 88
gcagatcgattgctgcgcat

SEQ ID NO: 44019 - DNA, 20 bp, Human papillomavirus type 88
ctgcgcatttttggtagtgt

SEQ ID NO: 44020 - DNA, 20 bp, Human papillomavirus type 88
ttggtagtgttatatacctg

SEQ ID NO: 44021 - DNA, 20 bp, Human papillomavirus type 88
tggtagtgttatatacctgg

SEQ ID NO: 44022 - DNA, 20 bp, Human papillomavirus type 88
ggtagtgttatatacctggg

SEQ ID NO: 44023 - DNA, 20 bp, Human papillomavirus type 88
tgcacttgccccaagtgtgc

SEQ ID NO: 44024 - DNA, 20 bp, Human papillomavirus type 88
gcacttgccccaagtgtgca

SEQ ID NO: 44025 - DNA, 20 bp, Human papillomavirus type 88
cacttgccccaagtgtgcat

SEQ ID NO: 44026 - DNA, 20 bp, Human papillomavirus type 88
ccccaagtgtgcatgcagaa

SEQ ID NO: 44027 - DNA, 20 bp, Human papillomavirus type 88
ctattatagagagctcacta

SEQ ID NO: 44028 - DNA, 20 bp, Human papillomavirus type 88
actttttaacccggccttca

SEQ ID NO: 44029 - DNA, 20 bp, Human papillomavirus type 88
ttaacccggccttcacgcgc

SEQ ID NO: 44030 - DNA, 20 bp, Human papillomavirus type 88
taacccggccttcacgcgcg

SEQ ID NO: 44031 - DNA, 20 bp, Human papillomavirus type 88
aacccggccttcacgcgcgg

SEQ ID NO: 44032 - DNA, 20 bp, Human papillomavirus type 88
acccggccttcacgcgcggt

SEQ ID NO: 44033 - DNA, 20 bp, Human papillomavirus type 88
gatcttagtgcaattgaacc

SEQ ID NO: 44034 - DNA, 20 bp, Human papillomavirus type 88
atcttagtgcaattgaacct

SEQ ID NO: 44035 - DNA, 20 bp, Human papillomavirus type 88
gtgcaattgaacctatagag

SEQ ID NO: 44036 - DNA, 20 bp, Human papillomavirus type 88
aacctatagagcctgatgtt

SEQ ID NO: 44037 - DNA, 20 bp, Human papillomavirus type 88
ttgagctttctaatttaggg

SEQ ID NO: 44038 - DNA, 20 bp, Human papillomavirus type 88
tggcaacaacaaactgggaa

SEQ ID NO: 44039 - DNA, 20 bp, Human papillomavirus type 88
cttccgccggctaaacctgt

SEQ ID NO: 44040 - DNA, 20 bp, Human papillomavirus type 88
cgccggctaaacctgtggca

SEQ ID NO: 44041 - DNA, 20 bp, Human papillomavirus type 88
tctacagatgattatgttat

SEQ ID NO: 44042 - DNA, 20 bp, Human papillomavirus type 88
tgttattggaactcagttac

SEQ ID NO: 44043 - DNA, 20 bp, Human papillomavirus type 88
cctgatccaaataaatttgc

SEQ ID NO: 44044 - DNA, 20 bp, Human papillomavirus type 88
gccttaatagatcagtcaat

SEQ ID NO: 44045 - DNA, 20 bp, Human papillomavirus type 88
ccttaatagatcagtcaatt

SEQ ID NO: 44046 - DNA, 20 bp, Human papillomavirus type 88
atagatcagtcaattttcaa

SEQ ID NO: 44047 - DNA, 20 bp, Human papillomavirus type 88
tcaatcctgaacgtgaacgt

SEQ ID NO: 44048 - DNA, 20 bp, Human papillomavirus type 88
gagatcaggcgaatgcagga

SEQ ID NO: 44049 - DNA, 20 bp, Human papillomavirus type 88
gttaatgctgttattcagga

SEQ ID NO: 44050 - DNA, 20 bp, Human papillomavirus type 88
atgctgttattcaggacgga

SEQ ID NO: 44051 - DNA, 20 bp, Human papillomavirus type 88
ttcaggacggaacaatgggt

SEQ ID NO: 44052 - DNA, 20 bp, Human papillomavirus type 88
aggacggaacaatgggtgac

SEQ ID NO: 44053 - DNA, 20 bp, Human papillomavirus type 88
cttttttggaaaacgtgagc

SEQ ID NO: 44054 - DNA, 20 bp, Human papillomavirus type 88
ttttttggaaaacgtgagca

SEQ ID NO: 44055 - DNA, 20 bp, Human papillomavirus type 88
tttggaaaacgtgagcagtc

SEQ ID NO: 44056 - DNA, 20 bp, Human papillomavirus type 88
ttggaaaacgtgagcagtcg

SEQ ID NO: 44057 - DNA, 20 bp, Human papillomavirus type 88
tggaaaacgtgagcagtcgt

SEQ ID NO: 44058 - DNA, 20 bp, Human papillomavirus type 88
tagatatataacatctttgg

SEQ ID NO: 44059 - DNA, 20 bp, Human papillomavirus type 88
ggcaacaagatgtcctactg

SEQ ID NO: 44060 - DNA, 20 bp, Human papillomavirus type 88
gcaacaagatgtcctactga

SEQ ID NO: 44061 - DNA, 20 bp, Human papillomavirus type 88
taatctttataagggtcagg

SEQ ID NO: 44062 - DNA, 20 bp, Human papillomavirus type 88
ataagggtcaggtatttctg

SEQ ID NO: 44063 - DNA, 20 bp, Human papillomavirus type 88
aaggtaagttgtttggaaca

SEQ ID NO: 44064 - DNA, 20 bp, Human papillomavirus type 88
tttggaacatagccgtctct

SEQ ID NO: 44065 - DNA, 20 bp, Human papillomavirus type 88
ggaacatagccgtctctcga

SEQ ID NO: 44066 - DNA, 20 bp, Human papillomavirus type 88
gaacatagccgtctctcgaa

SEQ ID NO: 44067 - DNA, 20 bp, Human papillomavirus type 88
ttaaaaggcctttagggcac

SEQ ID NO: 44068 - DNA, 20 bp, Human papillomavirus type 179
tgttgataaggggtaattgg

SEQ ID NO: 44069 - DNA, 20 bp, Human papillomavirus type 179
gttgataaggggtaattggc

SEQ ID NO: 44070 - DNA, 20 bp, Human papillomavirus type 179
ttgataaggggtaattggcg

SEQ ID NO: 44071 - DNA, 20 bp, Human papillomavirus type 179
ataaggggtaattggcgtac

SEQ ID NO: 44072 - DNA, 20 bp, Human papillomavirus type 179
gcgtacagagtgcagaaatt

SEQ ID NO: 44073 - DNA, 20 bp, Human papillomavirus type 179
tagagttgacacctcgtgtg

SEQ ID NO: 44074 - DNA, 20 bp, Human papillomavirus type 179
acacctcgtgtggcaattgt

SEQ ID NO: 44075 - DNA, 20 bp, Human papillomavirus type 179
taagagaggtgtaaggcttt

SEQ ID NO: 44076 - DNA, 20 bp, Human papillomavirus type 179
tttttgttgcaacttctgct

SEQ ID NO: 44077 - DNA, 20 bp, Human papillomavirus type 179
ttttgttgcaacttctgctt

SEQ ID NO: 44078 - DNA, 20 bp, Human papillomavirus type 179
tttgaagaaagcacaaacgg

SEQ ID NO: 44079 - DNA, 20 bp, Human papillomavirus type 179
gaagaaagcacaaacgggtc

SEQ ID NO: 44080 - DNA, 20 bp, Human papillomavirus type 179
aagaaagcacaaacgggtca

SEQ ID NO: 44081 - DNA, 20 bp, Human papillomavirus type 179
caaatttactagacgatgaa

SEQ ID NO: 44082 - DNA, 20 bp, Human papillomavirus type 179
aaatttactagacgatgaac

SEQ ID NO: 44083 - DNA, 20 bp, Human papillomavirus type 179
aaattctaatgaacttttgc

SEQ ID NO: 44084 - DNA, 20 bp, Human papillomavirus type 179
taatgaacttttgcaggtag

SEQ ID NO: 44085 - DNA, 20 bp, Human papillomavirus type 179
tgcaggtagaggcggagcat

SEQ ID NO: 44086 - DNA, 20 bp, Human papillomavirus type 179
gcaggtagaggcggagcatg

SEQ ID NO: 44087 - DNA, 20 bp, Human papillomavirus type 179
caggtagaggcggagcatgg

SEQ ID NO: 44088 - DNA, 20 bp, Human papillomavirus type 179
cgaaacaccatcttggaaga

SEQ ID NO: 44089 - DNA, 20 bp, Human papillomavirus type 179
gaagacttagaagacttcaa

SEQ ID NO: 44090 - DNA, 20 bp, Human papillomavirus type 179
gaagacttcaagaggaagct

SEQ ID NO: 44091 - DNA, 20 bp, Human papillomavirus type 179
aagaggaagctagggatcca

SEQ ID NO: 44092 - DNA, 20 bp, Human papillomavirus type 179
tgtgtataaaaggtccagca

SEQ ID NO: 44093 - DNA, 20 bp, Human papillomavirus type 179
ggtggttataaaccaattgg

SEQ ID NO: 44094 - DNA, 20 bp, Human papillomavirus type 179
gtggttataaaccaattggt

SEQ ID NO: 44095 - DNA, 20 bp, Human papillomavirus type 179
taaaccaattggtggaacag

SEQ ID NO: 44096 - DNA, 20 bp, Human papillomavirus type 179
gtggaacagcaagcaaaggt

SEQ ID NO: 44097 - DNA, 20 bp, Human papillomavirus type 179
ggtctgctcacagttatttc

SEQ ID NO: 44098 - DNA, 20 bp, Human papillomavirus type 179
aaatgaagttgctgaatttg

SEQ ID NO: 44099 - DNA, 20 bp, Human papillomavirus type 179
aatgaagttgctgaatttgc

SEQ ID NO: 44100 - DNA, 20 bp, Human papillomavirus type 179
ctgaatttgcaattgaggag

SEQ ID NO: 44101 - DNA, 20 bp, Human papillomavirus type 179
gcaattgaggagggggcggg

SEQ ID NO: 44102 - DNA, 20 bp, Human papillomavirus type 179
caattgaggagggggcgggt

SEQ ID NO: 44103 - DNA, 20 bp, Human papillomavirus type 179
cctattcacaattctgcaga

SEQ ID NO: 44104 - DNA, 20 bp, Human papillomavirus type 179
ctattcacaattctgcagat

SEQ ID NO: 44105 - DNA, 20 bp, Human papillomavirus type 179
acaattctgcagatccttct

SEQ ID NO: 44106 - DNA, 20 bp, Human papillomavirus type 179
tgcagatccttctaaagtag

SEQ ID NO: 44107 - DNA, 20 bp, Human papillomavirus type 179
taaagtagaagtaccaaaag

SEQ ID NO: 44108 - DNA, 20 bp, Human papillomavirus type 179
aatatccagcggcacaagca

SEQ ID NO: 44109 - DNA, 20 bp, Human papillomavirus type 179
gatatggccatggagcctaa

SEQ ID NO: 44110 - DNA, 20 bp, Human papillomavirus type 179
attattgtgggttgtgtacc

SEQ ID NO: 44111 - DNA, 20 bp, Human papillomavirus type 179
ttgtgggttgtgtacccaca

SEQ ID NO: 44112 - DNA, 20 bp, Human papillomavirus type 179
attttgcttaggctccatgg

SEQ ID NO: 44113 - DNA, 20 bp, Human papillomavirus type 179
ggatgttgatatgtcagaaa

SEQ ID NO: 44114 - DNA, 20 bp, Human papillomavirus type 179
atatgtcagaaaagttttcc

SEQ ID NO: 44115 - DNA, 20 bp, Human papillomavirus type 179
tcctcagatttaagtcagtc

SEQ ID NO: 44116 - DNA, 20 bp, Human papillomavirus type 179
cctcagatttaagtcagtct

SEQ ID NO: 44117 - DNA, 20 bp, Human papillomavirus type 179
ctcagatttaagtcagtctt

SEQ ID NO: 44118 - DNA, 20 bp, Human papillomavirus type 179
ccttaccgcacccaacaatt

SEQ ID NO: 44119 - DNA, 20 bp, Human papillomavirus type 179
cttaccgcacccaacaatta

SEQ ID NO: 44120 - DNA, 20 bp, Human papillomavirus type 179
ccgcacccaacaattatttg

SEQ ID NO: 44121 - DNA, 20 bp, Human papillomavirus type 179
tttggccagtattaataccc

SEQ ID NO: 44122 - DNA, 20 bp, Human papillomavirus type 179
ggccagtattaatacccaca

SEQ ID NO: 44123 - DNA, 20 bp, Influenza C virus
aatggcatttgtagccacaa

SEQ ID NO: 44124 - DNA, 20 bp, Influenza C virus
atggcatttgtagccacaaa

SEQ ID NO: 44125 - DNA, 20 bp, Influenza C virus
gtagccacaaaaatgttaga

SEQ ID NO: 44126 - DNA, 20 bp, Influenza C virus
tagccacaaaaatgttagag

SEQ ID NO: 44127 - DNA, 20 bp, Influenza C virus
gagagacaagaagatttaga

SEQ ID NO: 44128 - DNA, 20 bp, Influenza C virus
cctattgattttgctccaag

SEQ ID NO: 44129 - DNA, 20 bp, Influenza C virus
ctattgattttgctccaaga

SEQ ID NO: 44130 - DNA, 20 bp, Influenza C virus
attttgctccaagaaacata

SEQ ID NO: 44131 - DNA, 20 bp, Influenza C virus
tgctccaagaaacatagcac

SEQ ID NO: 44132 - DNA, 20 bp, Influenza C virus
gctccaagaaacatagcacc

SEQ ID NO: 44133 - DNA, 20 bp, Influenza C virus
aaacaggaattagaaaatgt

SEQ ID NO: 44134 - DNA, 20 bp, Influenza C virus
gaaaatgtttcagatgcatt

SEQ ID NO: 44135 - DNA, 20 bp, Influenza C virus
cagatgcattaaaagcggat

SEQ ID NO: 44136 - DNA, 20 bp, Influenza C virus
agatgcattaaaagcggatt

SEQ ID NO: 44137 - DNA, 20 bp, Influenza C virus
aaagcggattcgttatggct

SEQ ID NO: 44138 - DNA, 20 bp, Human rhinovirus 3
cccacgggtgaccgtgtcct

SEQ ID NO: 44139 - DNA, 20 bp, Human rhinovirus 3
tgctgggacgcctttttata

SEQ ID NO: 44140 - DNA, 20 bp, Human rhinovirus 3
gccgccacgcaggctaggac

SEQ ID NO: 44141 - DNA, 20 bp, Human rhinovirus 3
aatgttgaagggggcaccag

SEQ ID NO: 44142 - DNA, 20 bp, Human rhinovirus 3
atgttgaagggggcaccagc

SEQ ID NO: 44143 - DNA, 20 bp, Human rhinovirus 3
aagggggcaccagcactgaa

SEQ ID NO: 44144 - DNA, 20 bp, Human rhinovirus 3
accgaatgttgaagcatgtg

SEQ ID NO: 44145 - DNA, 20 bp, Human rhinovirus 3
aagcatgtggttacagtgat

SEQ ID NO: 44146 - DNA, 20 bp, Human rhinovirus 3
gaagttgcccgatgctctta

SEQ ID NO: 44147 - DNA, 20 bp, Human rhinovirus 3
cccgatgctcttaaggacat

SEQ ID NO: 44148 - DNA, 20 bp, Human rhinovirus 3
aggacatgggagtatttggc

SEQ ID NO: 44149 - DNA, 20 bp, Human rhinovirus 3
ggccagaatatgttttacca

SEQ ID NO: 44150 - DNA, 20 bp, Human rhinovirus 3
gccagaatatgttttaccat

SEQ ID NO: 44151 - DNA, 20 bp, Human rhinovirus 3
atctagacactgttgaagtt

SEQ ID NO: 44152 - DNA, 20 bp, Human rhinovirus 3
aagttgcaggtggccctacc

SEQ ID NO: 44153 - DNA, 20 bp, Human rhinovirus 3
caggtggccctaccagcgac

SEQ ID NO: 44154 - DNA, 20 bp, Human rhinovirus 3
taggcaatcttttgattttc

SEQ ID NO: 44155 - DNA, 20 bp, Human rhinovirus 3
cctagaagagttccgtccat

SEQ ID NO: 44156 - DNA, 20 bp, Human rhinovirus 3
cctgtgactgttacaattgc

SEQ ID NO: 44157 - DNA, 20 bp, Human rhinovirus 3
caattgcaccaatgtgcaca

SEQ ID NO: 44158 - DNA, 20 bp, Human rhinovirus 3
caccaatgtgcacagaattt

SEQ ID NO: 44159 - DNA, 20 bp, Human rhinovirus 3
actggtattagatctagatc

SEQ ID NO: 44160 - DNA, 20 bp, Human rhinovirus 3
ctggtattagatctagatcc

SEQ ID NO: 44161 - DNA, 20 bp, Human rhinovirus 3
ggcacaaaactctacattgg

SEQ ID NO: 44162 - DNA, 20 bp, Human rhinovirus 3
gcacaaaactctacattggt

SEQ ID NO: 44163 - DNA, 20 bp, Human rhinovirus 3
gtgatggtgttttcaagact

SEQ ID NO: 44164 - DNA, 20 bp, Human rhinovirus 3
tcaagactactttattgggt

SEQ ID NO: 44165 - DNA, 20 bp, Human rhinovirus 3
caagactactttattgggtg

SEQ ID NO: 44166 - DNA, 20 bp, Human rhinovirus 3
ggaacacatgttgtatggga

SEQ ID NO: 44167 - DNA, 20 bp, Human rhinovirus 3
tatgggatattggcttacaa

SEQ ID NO: 44168 - DNA, 20 bp, Human rhinovirus 3
gcttacaatccaccatagtt

SEQ ID NO: 44169 - DNA, 20 bp, Human rhinovirus 3
caatccaccatagttatgac

SEQ ID NO: 44170 - DNA, 20 bp, Human rhinovirus 3
tgaccattccatggacatca

SEQ ID NO: 44171 - DNA, 20 bp, Human rhinovirus 3
tgtgcatgtgacagaaatca

SEQ ID NO: 44172 - DNA, 20 bp, Human rhinovirus 3
gataatcacaggaaggaggg

SEQ ID NO: 44173 - DNA, 20 bp, Human rhinovirus 3
aacaacccctccttcctgtg

SEQ ID NO: 44174 - DNA, 20 bp, Human rhinovirus 3
ctgtgattatccaagccagc

SEQ ID NO: 44175 - DNA, 20 bp, Human rhinovirus 3
tccaagccagctgcgttctt

SEQ ID NO: 44176 - DNA, 20 bp, Human rhinovirus 3
cacatggcaaagtgcttcta

SEQ ID NO: 44177 - DNA, 20 bp, Human rhinovirus 3
taaccccagtgtgtttttca

SEQ ID NO: 44178 - DNA, 20 bp, Human rhinovirus 3
ttcaaagttggtgagacatc

SEQ ID NO: 44179 - DNA, 20 bp, Human rhinovirus 3
tcaaagttggtgagacatcc

SEQ ID NO: 44180 - DNA, 20 bp, Human rhinovirus 3
caaagttggtgagacatcca

SEQ ID NO: 44181 - DNA, 20 bp, Human rhinovirus 3
tgaaaattagagtttaccac

SEQ ID NO: 44182 - DNA, 20 bp, Human rhinovirus 3
gagtttaccacagagccaaa

SEQ ID NO: 44183 - DNA, 20 bp, Human rhinovirus 3
accacagagccaaacatgtg

SEQ ID NO: 44184 - DNA, 20 bp, Human rhinovirus 3
ccacagagccaaacatgtgg

SEQ ID NO: 44185 - DNA, 20 bp, Human rhinovirus 3
caagagcacctagagccttg

SEQ ID NO: 44186 - DNA, 20 bp, Human rhinovirus 3
actactccagatattacagg

SEQ ID NO: 44187 - DNA, 20 bp, Human rhinovirus 3
ctactccagatattacagga

SEQ ID NO: 44188 - DNA, 20 bp, Human rhinovirus 3
caggaagttctatcccatca

SEQ ID NO: 44189 - DNA, 20 bp, Human rhinovirus 3
tatcccatcatttgtgagag

SEQ ID NO: 44190 - DNA, 20 bp, Human rhinovirus 3
gtgagagacccactaacatc

SEQ ID NO: 44191 - DNA, 20 bp, Human rhinovirus 3
ttaacagctggtggaggcgg

SEQ ID NO: 44192 - DNA, 20 bp, Human rhinovirus 3
acagctggtggaggcggtta

SEQ ID NO: 44193 - DNA, 20 bp, Human rhinovirus 3
tgtctgttttgcagacataa

SEQ ID NO: 44194 - DNA, 20 bp, Human rhinovirus 3
tgcagacataagacaattgg

SEQ ID NO: 44195 - DNA, 20 bp, Human rhinovirus 3
gcagacataagacaattgga

SEQ ID NO: 44196 - DNA, 20 bp, Human rhinovirus 3
agttttgtagcaaactaaag

SEQ ID NO: 44197 - DNA, 20 bp, Human rhinovirus 3
tgtagcaaactaaagcaact

SEQ ID NO: 44198 - DNA, 20 bp, Human rhinovirus 3
gtagcaaactaaagcaacta

SEQ ID NO: 44199 - DNA, 20 bp, Human rhinovirus 3
tagcaaactaaagcaactag

SEQ ID NO: 44200 - DNA, 20 bp, Human rhinovirus 3
gagagacaaatagcatccat

SEQ ID NO: 44201 - DNA, 20 bp, Human rhinovirus 3
taatacacggcacaccaggt

SEQ ID NO: 44202 - DNA, 20 bp, Human rhinovirus 3
aatacacggcacaccaggtt

SEQ ID NO: 44203 - DNA, 20 bp, Human rhinovirus 3
atacacggcacaccaggttc

SEQ ID NO: 44204 - DNA, 20 bp, Human rhinovirus 3
tggcaaatcactaactacat

SEQ ID NO: 44205 - DNA, 20 bp, Human rhinovirus 3
tgggccgcgcattggcagaa

SEQ ID NO: 44206 - DNA, 20 bp, Human rhinovirus 3
gcctcaaccaattcaaacac

SEQ ID NO: 44207 - DNA, 20 bp, Human rhinovirus 3
aaacactctaagtcccccca

SEQ ID NO: 44208 - DNA, 20 bp, Human rhinovirus 3
aacccagaagctctgattag

SEQ ID NO: 44209 - DNA, 20 bp, Human rhinovirus 3
gacggtttggatttgatttg

SEQ ID NO: 44210 - DNA, 20 bp, Human rhinovirus 3
tgggttcaagatagtggggg

SEQ ID NO: 44211 - DNA, 20 bp, Human rhinovirus 3
actagtttgggtattcatga

SEQ ID NO: 44212 - DNA, 20 bp, Human rhinovirus 3
gggtattcatgatcgtatct

SEQ ID NO: 44213 - DNA, 20 bp, Human rhinovirus 3
ggtattcatgatcgtatctg

SEQ ID NO: 44214 - DNA, 20 bp, Human rhinovirus 3
atgatcgtatctgtgtctta

SEQ ID NO: 44215 - DNA, 20 bp, Human rhinovirus 3
ccaacacatgcccaaccagg

SEQ ID NO: 44216 - DNA, 20 bp, Human rhinovirus 3
actaatactatattagatgt

SEQ ID NO: 44217 - DNA, 20 bp, Human rhinovirus 3
ctaatactatattagatgta

SEQ ID NO: 44218 - DNA, 20 bp, Human rhinovirus 3
gatgtaggaccaataaccat

SEQ ID NO: 44219 - DNA, 20 bp, Human rhinovirus 3
taaatttaagtaatacacca

SEQ ID NO: 44220 - DNA, 20 bp, Human rhinovirus 3
aagtaatacaccaacaacca

SEQ ID NO: 44221 - DNA, 20 bp, Human rhinovirus 3
gtctaaacccaataaacaca

SEQ ID NO: 44222 - DNA, 20 bp, Human rhinovirus 3
atcctagtgtgttttacaat

SEQ ID NO: 44223 - DNA, 20 bp, Human rhinovirus 3
tacaatgtgttccctggaag

SEQ ID NO: 44224 - DNA, 20 bp, Human rhinovirus 3
acaatgtgttccctggaagc

SEQ ID NO: 44225 - DNA, 20 bp, Human rhinovirus 3
caatgtgttccctggaagca

SEQ ID NO: 44226 - DNA, 20 bp, Influenza A virus
aatccgatgattgtcgagct

SEQ ID NO: 44227 - DNA, 20 bp, Influenza A virus
tcgagcttgcggaaaaaaca

SEQ ID NO: 44228 - DNA, 20 bp, Influenza A virus
cggaaaaaacaatgaaagag

SEQ ID NO: 44229 - DNA, 20 bp, Influenza A virus
gcagcaatatgcactcactt

SEQ ID NO: 44230 - DNA, 20 bp, Influenza A virus
cagcaatatgcactcacttg

SEQ ID NO: 44231 - DNA, 20 bp, Influenza A virus
tttgaaaacaacaccacgac

SEQ ID NO: 44232 - DNA, 20 bp, Influenza A virus
ttgaaaacaacaccacgacc

SEQ ID NO: 44233 - DNA, 20 bp, Influenza A virus
tgaaaacaacaccacgacca

SEQ ID NO: 44234 - DNA, 20 bp, Influenza A virus
gaaaacaacaccacgaccac

SEQ ID NO: 44235 - DNA, 20 bp, Influenza A virus
aaaacaacaccacgaccact

SEQ ID NO: 44236 - DNA, 20 bp, Influenza A virus
gagaagatgtggctccaatt

SEQ ID NO: 44237 - DNA, 20 bp, Influenza A virus
aacacattgcaagcatgaga

SEQ ID NO: 44238 - DNA, 20 bp, Influenza A virus
caagcatgagaaggaattat

SEQ ID NO: 44239 - DNA, 20 bp, Influenza A virus
tttcacatcagaggtgtctc

SEQ ID NO: 44240 - DNA, 20 bp, Influenza A virus
cacatcagaggtgtctcact

SEQ ID NO: 44241 - DNA, 20 bp, Influenza A virus
gtgagcatggagttttctct

SEQ ID NO: 44242 - DNA, 20 bp, Influenza A virus
tgagcatggagttttctctc

SEQ ID NO: 44243 - DNA, 20 bp, Influenza A virus
tctctcactgacccaagact

SEQ ID NO: 44244 - DNA, 20 bp, Influenza A virus
ctctcactgacccaagactt

SEQ ID NO: 44245 - DNA, 20 bp, Influenza A virus
tctcactgacccaagacttg

SEQ ID NO: 44246 - DNA, 20 bp, Influenza A virus
aacaaattgagagtatgatt

SEQ ID NO: 44247 - DNA, 20 bp, Influenza A virus
agagtatgattgaagctgag

SEQ ID NO: 44248 - DNA, 20 bp, Influenza A virus
aagctgagtcctctgtcaaa

SEQ ID NO: 44249 - DNA, 20 bp, Influenza A virus
tttgagaacaaatcagaaac

SEQ ID NO: 44250 - DNA, 20 bp, Influenza A virus
gagaacaaatcagaaacatg

SEQ ID NO: 44251 - DNA, 20 bp, Influenza A virus
ggatgaagtggatgatggca

SEQ ID NO: 44252 - DNA, 20 bp, Influenza A virus
gatatttcattgccatcatc

SEQ ID NO: 44253 - DNA, 20 bp, Influenza A virus
cattgccatcatccacttca

SEQ ID NO: 44254 - DNA, 20 bp, Influenza A virus
attgccatcatccacttcat

SEQ ID NO: 44255 - DNA, 20 bp, Influenza A virus
ccatcatccacttcatccta

SEQ ID NO: 44256 - DNA, 20 bp, Influenza A virus
tgaaaaggtcgaaaggctaa

SEQ ID NO: 44257 - DNA, 20 bp, Influenza A virus
gaaaaggtcgaaaggctaaa

SEQ ID NO: 44258 - DNA, 20 bp, Influenza A virus
aaaaggtcgaaaggctaaaa

SEQ ID NO: 44259 - DNA, 20 bp, Influenza A virus
ggccccgttcacttcagaaa

SEQ ID NO: 44260 - DNA, 20 bp, Influenza A virus
acttcagaaaccaggttaaa

SEQ ID NO: 44261 - DNA, 20 bp, Influenza A virus
ccaaggaaaagaagaaggag

SEQ ID NO: 44262 - DNA, 20 bp, Influenza A virus
aggactgcaaaattgcccct

SEQ ID NO: 44263 - DNA, 20 bp, Influenza A virus
cccctttaatggtggcttac

SEQ ID NO: 44264 - DNA, 20 bp, Influenza A virus
aatggtggcttacatgttgg

SEQ ID NO: 44265 - DNA, 20 bp, Influenza A virus
atggtggcttacatgttgga

SEQ ID NO: 44266 - DNA, 20 bp, Influenza A virus
gcttcgcttttggagatgtg

SEQ ID NO: 44267 - DNA, 20 bp, Influenza A virus
gcttttggagatgtgccata

SEQ ID NO: 44268 - DNA, 20 bp, Influenza A virus
tggagatgtgccatagtaca

SEQ ID NO: 44269 - DNA, 20 bp, Influenza A virus
ggagatgtgccatagtacac

SEQ ID NO: 44270 - DNA, 20 bp, Influenza A virus
gagatgtgccatagtacaca

SEQ ID NO: 44271 - DNA, 20 bp, Influenza A virus
aaaataagagtacatgaagg

SEQ ID NO: 44272 - DNA, 20 bp, Influenza A virus
acaatggtcgggcgaagagc

SEQ ID NO: 44273 - DNA, 20 bp, Influenza A virus
taaggaaagcaaccagaaga

SEQ ID NO: 44274 - DNA, 20 bp, Influenza A virus
gatcagtcttctggttgctt

SEQ ID NO: 44275 - DNA, 20 bp, Influenza A virus
tggttgctttccttagaatg

SEQ ID NO: 44276 - DNA, 20 bp, Influenza A virus
ccaaaaggatgcaaaggtcc

SEQ ID NO: 44277 - DNA, 20 bp, Influenza A virus
caaaaggatgcaaaggtcct

SEQ ID NO: 44278 - DNA, 20 bp, Influenza A virus
caaaactggggaattgaacc

SEQ ID NO: 44279 - DNA, 20 bp, Influenza A virus
aaaactggggaattgaaccc

SEQ ID NO: 44280 - DNA, 20 bp, Influenza A virus
aacccattgacaatgtaatg

SEQ ID NO: 44281 - DNA, 20 bp, Influenza A virus
gtgaaacacagggaacagaa

SEQ ID NO: 44282 - DNA, 20 bp, Influenza A virus
atcgtccatgatgtgggaga

SEQ ID NO: 44283 - DNA, 20 bp, Influenza A virus
cggaccattgatctcccaca

SEQ ID NO: 44284 - DNA, 20 bp, Influenza A virus
atctcccacatcatggacga

SEQ ID NO: 44285 - DNA, 20 bp, Influenza A virus
tagtcagcttttctgttccc

SEQ ID NO: 44286 - DNA, 20 bp, Influenza A virus
ccatttgcagcagccccgcc

SEQ ID NO: 44287 - DNA, 20 bp, Influenza A virus
gcagcagccccgccgaagca

SEQ ID NO: 44288 - DNA, 20 bp, Influenza A virus
cagcagccccgccgaagcag

SEQ ID NO: 44289 - DNA, 20 bp, Influenza A virus
tcttctctaactgtgaatgt

SEQ ID NO: 44290 - DNA, 20 bp, Influenza A virus
tctaactgtgaatgtgaggg

SEQ ID NO: 44291 - DNA, 20 bp, Human papillomavirus type 116
tttaagtgggttagatttgc

SEQ ID NO: 44292 - DNA, 20 bp, Human papillomavirus type 116
aagtgggttagatttgcaag

SEQ ID NO: 44293 - DNA, 20 bp, Human papillomavirus type 116
agtgggttagatttgcaaga

SEQ ID NO: 44294 - DNA, 20 bp, Human papillomavirus type 116
gatttgcaagagaaatttga

SEQ ID NO: 44295 - DNA, 20 bp, Human papillomavirus type 116
gcaagagaaatttgatttgg

SEQ ID NO: 44296 - DNA, 20 bp, Human papillomavirus type 116
agatacattgtttgatgaaa

SEQ ID NO: 44297 - DNA, 20 bp, Human papillomavirus type 116
gatacattgtttgatgaaag

SEQ ID NO: 44298 - DNA, 20 bp, Human papillomavirus type 116
tttgatgaaagtgattgtga

SEQ ID NO: 44299 - DNA, 20 bp, Human papillomavirus type 116
gatgaaagtgattgtgattc

SEQ ID NO: 44300 - DNA, 20 bp, Human papillomavirus type 116
atgaaagtgattgtgattct

SEQ ID NO: 44301 - DNA, 20 bp, Human papillomavirus type 116
tttcaggacagtggattagg

SEQ ID NO: 44302 - DNA, 20 bp, Human papillomavirus type 116
caggacagtggattaggcga

SEQ ID NO: 44303 - DNA, 20 bp, Human papillomavirus type 116
aggacagtggattaggcgaa

SEQ ID NO: 44304 - DNA, 20 bp, Human papillomavirus type 116
ggcgaagatgaagctgaact

SEQ ID NO: 44305 - DNA, 20 bp, Human papillomavirus type 116
tttctgaacaggtagaagtg

SEQ ID NO: 44306 - DNA, 20 bp, Human papillomavirus type 116
gtctgggaccccaactcact

SEQ ID NO: 44307 - DNA, 20 bp, Human papillomavirus type 116
tggcgttcttcgtccgtcgg

SEQ ID NO: 44308 - DNA, 20 bp, Human papillomavirus type 116
ttcgtccgtcggcctcctcg

SEQ ID NO: 44309 - DNA, 20 bp, Human papillomavirus type 116
gtccgtcggcctcctcggtg

SEQ ID NO: 44310 - DNA, 20 bp, Human papillomavirus type 116
gtggtagagtgagttggggt

SEQ ID NO: 44311 - DNA, 20 bp, Human papillomavirus type 116
cacgatcaggtctatcgaga

SEQ ID NO: 44312 - DNA, 20 bp, Human papillomavirus type 116
aacgacttcaaaaggaggct

SEQ ID NO: 44313 - DNA, 20 bp, Human papillomavirus type 116
aaaaggaggctcgggatccg

SEQ ID NO: 44314 - DNA, 20 bp, Human papillomavirus type 116
tatacggatcccgagcctcc

SEQ ID NO: 44315 - DNA, 20 bp, Human papillomavirus type 116
tgaagtcgttcaagtctcga

SEQ ID NO: 44316 - DNA, 20 bp, Human papillomavirus type 116
ggcattggaactggtaaggg

SEQ ID NO: 44317 - DNA, 20 bp, Human papillomavirus type 116
gaactggtaagggtggtgga

SEQ ID NO: 44318 - DNA, 20 bp, Human papillomavirus type 116
tggaggcacaaggcctagca

SEQ ID NO: 44319 - DNA, 20 bp, Human papillomavirus type 116
ggaggcacaaggcctagcat

SEQ ID NO: 44320 - DNA, 20 bp, Human papillomavirus type 116
gaggcacaaggcctagcata

SEQ ID NO: 44321 - DNA, 20 bp, Human papillomavirus type 116
gatcttgtttctgaagtaac

SEQ ID NO: 44322 - DNA, 20 bp, Human papillomavirus type 116
tttctgaagtaactggtgtt

SEQ ID NO: 44323 - DNA, 20 bp, Human papillomavirus type 116
ctgaagtaactggtgttggt

SEQ ID NO: 44324 - DNA, 20 bp, Human papillomavirus type 116
tgaagtaactggtgttggtg

SEQ ID NO: 44325 - DNA, 20 bp, Human papillomavirus type 116
gtgaacatccttccgttaca

SEQ ID NO: 44326 - DNA, 20 bp, Human papillomavirus type 116
agtattgatgttaattactc

SEQ ID NO: 44327 - DNA, 20 bp, Human papillomavirus type 116
gtattgatgttaattactcc

SEQ ID NO: 44328 - DNA, 20 bp, Human papillomavirus type 116
atgttaattactccgattat

SEQ ID NO: 44329 - DNA, 20 bp, Human papillomavirus type 116
attactccgattataatata

SEQ ID NO: 44330 - DNA, 20 bp, Human papillomavirus type 116
ctccgattataatatacatc

SEQ ID NO: 44331 - DNA, 20 bp, Human papillomavirus type 116
ggacagactgttgactgttg

SEQ ID NO: 44332 - DNA, 20 bp, Human papillomavirus type 116
actgttggccatccttactt

SEQ ID NO: 44333 - DNA, 20 bp, Human papillomavirus type 116
gccatccttactttgacgtt

SEQ ID NO: 44334 - DNA, 20 bp, Human papillomavirus type 116
ctttgacgttttgaatgacg

SEQ ID NO: 44335 - DNA, 20 bp, Human papillomavirus type 116
gacgttttgaatgacgctac

SEQ ID NO: 44336 - DNA, 20 bp, Human papillomavirus type 116
tttgacagattggcagatac

SEQ ID NO: 44337 - DNA, 20 bp, Human papillomavirus type 116
gacagattggcagatacgga

SEQ ID NO: 44338 - DNA, 20 bp, Human papillomavirus type 116
acagattggcagatacggaa

SEQ ID NO: 44339 - DNA, 20 bp, Human papillomavirus type 116
gcagatacggaaaatcctaa

SEQ ID NO: 44340 - DNA, 20 bp, Human papillomavirus type 116
atgcccctgcagaggtagat

SEQ ID NO: 44341 - DNA, 20 bp, Hepatitis C virus
acgcagaaagcgtctagcca

SEQ ID NO: 44342 - DNA, 20 bp, Hepatitis C virus
gtatgagtgtcgtgcagcct

SEQ ID NO: 44343 - DNA, 20 bp, Hepatitis C virus
cgcagactactatggctctc

SEQ ID NO: 44344 - DNA, 20 bp, Hepatitis C virus
ctgcgtgaagacagtagttc

SEQ ID NO: 44345 - DNA, 20 bp, Hepatitis C virus
ccgggcggcggccagatcgt

SEQ ID NO: 44346 - DNA, 20 bp, Hepatitis C virus
gtggagtttacttgctgccg

SEQ ID NO: 44347 - DNA, 20 bp, Hepatitis C virus
acttgctgccgcgcaggggc

SEQ ID NO: 44348 - DNA, 20 bp, Hepatitis C virus
cttgctgccgcgcaggggcc

SEQ ID NO: 44349 - DNA, 20 bp, Hepatitis C virus
ctgccgcgcaggggcccacg

SEQ ID NO: 44350 - DNA, 20 bp, Hepatitis C virus
tgtgccttgcgtgagagccg

SEQ ID NO: 44351 - DNA, 20 bp, Hepatitis C virus
cgtgagagccggaaacattt

SEQ ID NO: 44352 - DNA, 20 bp, Hepatitis C virus
cacgctgctggcatcctgtt

SEQ ID NO: 44353 - DNA, 20 bp, Hepatitis C virus
acgctgctggcatcctgttt

SEQ ID NO: 44354 - DNA, 20 bp, Hepatitis C virus
cacccaccctggctgtaccg

SEQ ID NO: 44355 - DNA, 20 bp, Hepatitis C virus
tgagagtgcccgaaatagtg

SEQ ID NO: 44356 - DNA, 20 bp, Hepatitis C virus
gccggcggtcactggggtgt

SEQ ID NO: 44357 - DNA, 20 bp, Hepatitis C virus
cgggcactctcagaatgctc

SEQ ID NO: 44358 - DNA, 20 bp, Hepatitis C virus
gggcactctcagaatgctcg

SEQ ID NO: 44359 - DNA, 20 bp, Hepatitis C virus
ctcagaacggcttggcgcat

SEQ ID NO: 44360 - DNA, 20 bp, Hepatitis C virus
gcgcatgcaagcccttggaa

SEQ ID NO: 44361 - DNA, 20 bp, Hepatitis C virus
gaacacttccagcagggatg

SEQ ID NO: 44362 - DNA, 20 bp, Hepatitis C virus
cagcagggatggggccctat

SEQ ID NO: 44363 - DNA, 20 bp, Hepatitis C virus
gacttgtgggttatagggcc

SEQ ID NO: 44364 - DNA, 20 bp, Hepatitis C virus
gttcgggtgcacgtggatga

SEQ ID NO: 44365 - DNA, 20 bp, Hepatitis C virus
gggtgcacgtggatgaactc

SEQ ID NO: 44366 - DNA, 20 bp, Hepatitis C virus
accaagacctgcggagcccc

SEQ ID NO: 44367 - DNA, 20 bp, Hepatitis C virus
ccagttaatcccaggagact

SEQ ID NO: 44368 - DNA, 20 bp, Hepatitis C virus
atcccaggagactataatag

SEQ ID NO: 44369 - DNA, 20 bp, Hepatitis C virus
ctatcttgccttgcagcttt

SEQ ID NO: 44370 - DNA, 20 bp, Hepatitis C virus
ccttgcagctttaccaccat

SEQ ID NO: 44371 - DNA, 20 bp, Hepatitis C virus
cagctttaccaccatgcccg

SEQ ID NO: 44372 - DNA, 20 bp, Hepatitis C virus
accaccatgcccgccttgtc

SEQ ID NO: 44373 - DNA, 20 bp, Hepatitis C virus
ccaccatgcccgccttgtca

SEQ ID NO: 44374 - DNA, 20 bp, Hepatitis C virus
gagcggctcgtcgtcctcaa

SEQ ID NO: 44375 - DNA, 20 bp, Hepatitis C virus
gtgttggaccctcatcttcc

SEQ ID NO: 44376 - DNA, 20 bp, Hepatitis C virus
gaccctcatcttcctgtgct

SEQ ID NO: 44377 - DNA, 20 bp, Hepatitis C virus
ctgtgctgcgtgtggcacgt

SEQ ID NO: 44378 - DNA, 20 bp, Hepatitis C virus
acgtgccacacgcagcacag

SEQ ID NO: 44379 - DNA, 20 bp, Hepatitis C virus
tcccccatggagaaaaagat

SEQ ID NO: 44380 - DNA, 20 bp, Hepatitis C virus
cccccatggagaaaaagatc

SEQ ID NO: 44381 - DNA, 20 bp, Hepatitis C virus
ccccatggagaaaaagatca

SEQ ID NO: 44382 - DNA, 20 bp, Hepatitis C virus
cgtggggtgcagacaccgct

SEQ ID NO: 44383 - DNA, 20 bp, Hepatitis C virus
aggggtctccctgtgtccgc

SEQ ID NO: 44384 - DNA, 20 bp, Hepatitis C virus
ctggcgaccactatcaacgg

SEQ ID NO: 44385 - DNA, 20 bp, Hepatitis C virus
atcacggtgctggctcgaaa

SEQ ID NO: 44386 - DNA, 20 bp, Hepatitis C virus
tcacggtgctggctcgaaaa

SEQ ID NO: 44387 - DNA, 20 bp, Hepatitis C virus
ccggaccaaaagggcccgta

SEQ ID NO: 44388 - DNA, 20 bp, Hepatitis C virus
accaagacctggtgggctgg

SEQ ID NO: 44389 - DNA, 20 bp, Hepatitis C virus
agggcggccgtgtgtacgag

SEQ ID NO: 44390 - DNA, 20 bp, Hepatitis C virus
atccctgtggagaatatgga

SEQ ID NO: 44391 - DNA, 20 bp, Hepatitis C virus
tgtccatattctccacaggg

SEQ ID NO: 44392 - DNA, 20 bp, Hepatitis C virus
tccacagggatgaagtccag

SEQ ID NO: 44393 - DNA, 20 bp, Hepatitis C virus
gccacgcccctcgtacacac

SEQ ID NO: 44394 - DNA, 20 bp, Hepatitis C virus
aggaggagcatatgatatca

SEQ ID NO: 44395 - DNA, 20 bp, Hepatitis C virus
gcatcggcactgtcctagac

SEQ ID NO: 44396 - DNA, 20 bp, Hepatitis C virus
ctgcctggtctaggacagtg

SEQ ID NO: 44397 - DNA, 20 bp, Hepatitis C virus
tgcctggtctaggacagtgc

SEQ ID NO: 44398 - DNA, 20 bp, Hepatitis C virus
ggtctgtggagtggcactcg

SEQ ID NO: 44399 - DNA, 20 bp, Hepatitis C virus
tatagaggtgtcgatgtggc

SEQ ID NO: 44400 - DNA, 20 bp, Hepatitis C virus
tgaccggctacacgggcgac

SEQ ID NO: 44401 - DNA, 20 bp, Hepatitis C virus
gactctgtcattgattgtaa

SEQ ID NO: 44402 - DNA, 20 bp, Hepatitis C virus
actctgtcattgattgtaac

SEQ ID NO: 44403 - DNA, 20 bp, Hepatitis C virus
caatcaatgacagagtcaaa

SEQ ID NO: 44404 - DNA, 20 bp, Hepatitis C virus
gtctcgcagggggaaagacc

SEQ ID NO: 44405 - DNA, 20 bp, Hepatitis C virus
tctcgcagggggaaagacct

SEQ ID NO: 44406 - DNA, 20 bp, Hepatitis C virus
aggtatgtttgatagcgtcg

SEQ ID NO: 44407 - DNA, 20 bp, Hepatitis C virus
gatagcgtcgtgctctgtga

SEQ ID NO: 44408 - DNA, 20 bp, Hepatitis C virus
atagcgtcgtgctctgtgaa

SEQ ID NO: 44409 - DNA, 20 bp, Hepatitis C virus
agccgaccctcacaggtcct

SEQ ID NO: 44410 - DNA, 20 bp, Hepatitis C virus
gtgattggatgtgttgttac

SEQ ID NO: 44411 - DNA, 20 bp, Hepatitis C virus
tgattggatgtgttgttact

SEQ ID NO: 44412 - DNA, 20 bp, Hepatitis C virus
gatgtgttgttactatctca

SEQ ID NO: 44413 - DNA, 20 bp, Hepatitis C virus
ttactatctcattttggaca

SEQ ID NO: 44414 - DNA, 20 bp, Hepatitis C virus
agggtcagcagattgctgag

SEQ ID NO: 44415 - DNA, 20 bp, Hepatitis C virus
ctgagcagttcaagcaaaag

SEQ ID NO: 44416 - DNA, 20 bp, Hepatitis C virus
aagcaaaaggtccttgggct

SEQ ID NO: 44417 - DNA, 20 bp, Hepatitis C virus
ggctgctccaggccggcacc

SEQ ID NO: 44418 - DNA, 20 bp, Hepatitis C virus
cacgtggcccagggtggagg

SEQ ID NO: 44419 - DNA, 20 bp, Hepatitis C virus
ccaagtagctcccccctccg

SEQ ID NO: 44420 - DNA, 20 bp, Hepatitis C virus
cgtcgtgagcggcttagcag

SEQ ID NO: 44421 - DNA, 20 bp, Hepatitis C virus
gtcgtgagcggcttagcagg

SEQ ID NO: 44422 - DNA, 20 bp, Hepatitis C virus
gcaggcgccacggtggccag

SEQ ID NO: 44423 - DNA, 20 bp, Hepatitis C virus
acttaccatcactagcctgt

SEQ ID NO: 44424 - DNA, 20 bp, Hepatitis C virus
ccatcactagcctgttacgc

SEQ ID NO: 44425 - DNA, 20 bp, Hepatitis C virus
cgcaggctacaccagtggat

SEQ ID NO: 44426 - DNA, 20 bp, Hepatitis C virus
acgaggatacgtccacgcct

SEQ ID NO: 44427 - DNA, 20 bp, Hepatitis C virus
gggtgactttgtttgatgcg

SEQ ID NO: 44428 - DNA, 20 bp, Hepatitis C virus
ctggacacgtgaagaacggg

SEQ ID NO: 44429 - DNA, 20 bp, Hepatitis C virus
gcatggaacgtttccgatca

SEQ ID NO: 44430 - DNA, 20 bp, Hepatitis C virus
tggcgttgatcggaaacgtt

SEQ ID NO: 44431 - DNA, 20 bp, Hepatitis C virus
atcggaaacgttccatgcca

SEQ ID NO: 44432 - DNA, 20 bp, Hepatitis C virus
catgccaagtgttgctgcac

SEQ ID NO: 44433 - DNA, 20 bp, Hepatitis C virus
gagatgaggtgagcttctct

SEQ ID NO: 44434 - DNA, 20 bp, Hepatitis C virus
tctgtgggcctcctagagtt

SEQ ID NO: 44435 - DNA, 20 bp, Hepatitis C virus
gttgtggggtctcagctccc

SEQ ID NO: 44436 - DNA, 20 bp, Hepatitis C virus
ttgtggggtctcagctccct

SEQ ID NO: 44437 - DNA, 20 bp, Hepatitis C virus
tggggtctcagctcccttgt

SEQ ID NO: 44438 - DNA, 20 bp, Hepatitis C virus
cagagtatgacgacagggag

SEQ ID NO: 44439 - DNA, 20 bp, Hepatitis C virus
cctcctgctctcccgatttg

SEQ ID NO: 44440 - DNA, 20 bp, Hepatitis C virus
gggccagacctgactacaat

SEQ ID NO: 44441 - DNA, 20 bp, Hepatitis C virus
ggccagacctgactacaatc

SEQ ID NO: 44442 - DNA, 20 bp, Hepatitis C virus
ccatttctgtaggagaggtg

SEQ ID NO: 44443 - DNA, 20 bp, Hepatitis C virus
gtggaggacactagcacctc

SEQ ID NO: 44444 - DNA, 20 bp, Hepatitis C virus
tggaggacactagcacctca

SEQ ID NO: 44445 - DNA, 20 bp, Hepatitis C virus
tcgggtcaggagatgatggg

SEQ ID NO: 44446 - DNA, 20 bp, Hepatitis C virus
accctccgaggccggagctc

SEQ ID NO: 44447 - DNA, 20 bp, Hepatitis C virus
attgtttatccagacttatc

SEQ ID NO: 44448 - DNA, 20 bp, Hepatitis C virus
tttatccagacttatccgtg

SEQ ID NO: 44449 - DNA, 20 bp, Hepatitis C virus
atccagacttatccgtgcgg

SEQ ID NO: 44450 - DNA, 20 bp, Hepatitis C virus
tccagacttatccgtgcggg

SEQ ID NO: 44451 - DNA, 20 bp, Hepatitis C virus
tccgtgcgggtttgcgagaa

SEQ ID NO: 44452 - DNA, 20 bp, Hepatitis C virus
tggtggcccgatgtttaact

SEQ ID NO: 44453 - DNA, 20 bp, Hepatitis C virus
aactccaaaggggaatcatg

SEQ ID NO: 44454 - DNA, 20 bp, Hepatitis C virus
actccaaaggggaatcatgt

SEQ ID NO: 44455 - DNA, 20 bp, Hepatitis C virus
ggggaacaccctcacttgtt

SEQ ID NO: 44456 - DNA, 20 bp, Hepatitis C virus
gggaacaccctcacttgtta

SEQ ID NO: 44457 - DNA, 20 bp, Hepatitis C virus
ctacctcacccgtgactgta

SEQ ID NO: 44458 - DNA, 20 bp, Hepatitis C virus
cgcgagctgcttgggagaca

SEQ ID NO: 44459 - DNA, 20 bp, Hepatitis C virus
ggagacagctcgccataccc

SEQ ID NO: 44460 - DNA, 20 bp, Hepatitis C virus
acaggggtatggcgagctgt

SEQ ID NO: 44461 - DNA, 20 bp, Hepatitis C virus
gggcgccacccttaagagct

SEQ ID NO: 44462 - DNA, 20 bp, Hepatitis C virus
agagcttggagacatcgagc

SEQ ID NO: 44463 - DNA, 20 bp, Hepatitis C virus
gagacatcgagccagagctg

SEQ ID NO: 44464 - DNA, 20 bp, Hepatitis C virus
gctctgacagctctggctcg

SEQ ID NO: 44465 - DNA, 20 bp, Hepatitis C virus
agggtggcgccccaagcttc

SEQ ID NO: 44466 - DNA, 20 bp, Influenza C virus
aagcctacattgccatttgt

SEQ ID NO: 44467 - DNA, 20 bp, Influenza C virus
ccatttgtaaggaagtgggc

SEQ ID NO: 44468 - DNA, 20 bp, Influenza C virus
gtaaggaagtgggccttaat

SEQ ID NO: 44469 - DNA, 20 bp, Influenza C virus
taaggaagtgggccttaatg

SEQ ID NO: 44470 - DNA, 20 bp, Influenza C virus
atggcgatgaaatgttgatc

SEQ ID NO: 44471 - DNA, 20 bp, Influenza C virus
aaagagctggttcaggcacc

SEQ ID NO: 44472 - DNA, 20 bp, Influenza C virus
aggcaccaatataacctacc

SEQ ID NO: 44473 - DNA, 20 bp, Influenza C virus
ttgaattgacaagccgctca

SEQ ID NO: 44474 - DNA, 20 bp, Influenza C virus
aattgacaagccgctcaaga

SEQ ID NO: 44475 - DNA, 20 bp, Influenza C virus
acaagccgctcaagaattgt

SEQ ID NO: 44476 - DNA, 20 bp, Influenza C virus
gagttcttatagctgacgca

SEQ ID NO: 44477 - DNA, 20 bp, Influenza C virus
ttatagctgacgcaaaaggt

SEQ ID NO: 44478 - DNA, 20 bp, Influenza C virus
tagctgacgcaaaaggttta

SEQ ID NO: 44479 - DNA, 20 bp, Influenza C virus
ccatttattaaaccttttgc

SEQ ID NO: 44480 - DNA, 20 bp, Influenza C virus
catttattaaaccttttgcg

SEQ ID NO: 44481 - DNA, 20 bp, Influenza C virus
aagcctcagataaccaacaa

SEQ ID NO: 44482 - DNA, 20 bp, Influenza C virus
tcatcttgttggttatctga

SEQ ID NO: 44483 - DNA, 20 bp, Influenza C virus
ttggttatctgaggctttaa

SEQ ID NO: 44484 - DNA, 20 bp, Influenza C virus
gttatctgaggctttaacag

SEQ ID NO: 44485 - DNA, 20 bp, Influenza C virus
tctgaggctttaacaggagt

SEQ ID NO: 44486 - DNA, 20 bp, Influenza C virus
ggacttgcttatgaagactt

SEQ ID NO: 44487 - DNA, 20 bp, Influenza C virus
gacttgcttatgaagacttc

SEQ ID NO: 44488 - DNA, 20 bp, Influenza C virus
cttatgaagacttcagtttg

SEQ ID NO: 44489 - DNA, 20 bp, Influenza C virus
tgaagacttcagtttggtct

SEQ ID NO: 44490 - DNA, 20 bp, Influenza C virus
agtttggtctctgctatggt

SEQ ID NO: 44491 - DNA, 20 bp, Influenza C virus
gacccagactacaaccccat

SEQ ID NO: 44492 - DNA, 20 bp, Influenza C virus
aaatatcagcagattggaag

SEQ ID NO: 44493 - DNA, 20 bp, Influenza C virus
gaagaagaaggaatggatga

SEQ ID NO: 44494 - DNA, 20 bp, Influenza C virus
tcatccattccttcttcttc

SEQ ID NO: 44495 - DNA, 20 bp, Influenza C virus
catccattccttcttcttcc

SEQ ID NO: 44496 - DNA, 20 bp, Human papillomavirus type 201
tttgatttagaattgaattg

SEQ ID NO: 44497 - DNA, 20 bp, Human papillomavirus type 201
ttgatttagaattgaattgt

SEQ ID NO: 44498 - DNA, 20 bp, Human papillomavirus type 201
tgatttagaattgaattgta

SEQ ID NO: 44499 - DNA, 20 bp, Human papillomavirus type 201
gatttagaattgaattgtat

SEQ ID NO: 44500 - DNA, 20 bp, Human papillomavirus type 201
atttagaattgaattgtatc

SEQ ID NO: 44501 - DNA, 20 bp, Human papillomavirus type 201
taggattgacactcgttgtc

SEQ ID NO: 44502 - DNA, 20 bp, Human papillomavirus type 201
acactcgttgtcacacttgt

SEQ ID NO: 44503 - DNA, 20 bp, Human papillomavirus type 201
tcacacttgtggaacaggtg

SEQ ID NO: 44504 - DNA, 20 bp, Human papillomavirus type 201
tggaacaggtgtcagatgct

SEQ ID NO: 44505 - DNA, 20 bp, Human papillomavirus type 201
ggtattagacaattagagtt

SEQ ID NO: 44506 - DNA, 20 bp, Human papillomavirus type 201
tttgatgacagtggaatcct

SEQ ID NO: 44507 - DNA, 20 bp, Human papillomavirus type 201
gatgacagtggaatcctaga

SEQ ID NO: 44508 - DNA, 20 bp, Human papillomavirus type 201
atgacagtggaatcctagaa

SEQ ID NO: 44509 - DNA, 20 bp, Human papillomavirus type 201
agaaaatggcgcgaaaaaca

SEQ ID NO: 44510 - DNA, 20 bp, Human papillomavirus type 201
gacatctgcaaaactgacat

SEQ ID NO: 44511 - DNA, 20 bp, Human papillomavirus type 201
cattatttttttataaatca

SEQ ID NO: 44512 - DNA, 20 bp, Human papillomavirus type 201
tttttttataaatcatcttt

SEQ ID NO: 44513 - DNA, 20 bp, Human papillomavirus type 201
ttttataaatcatcttttgg

SEQ ID NO: 44514 - DNA, 20 bp, Human papillomavirus type 201
tttataaatcatcttttgga

SEQ ID NO: 44515 - DNA, 20 bp, Human papillomavirus type 201
ttataaatcatcttttggaa

SEQ ID NO: 44516 - DNA, 20 bp, Human papillomavirus type 201
tattactactaatatagatg

SEQ ID NO: 44517 - DNA, 20 bp, Human papillomavirus type 201
attactactaatatagatgt

SEQ ID NO: 44518 - DNA, 20 bp, Human papillomavirus type 201
ttactactaatatagatgtg

SEQ ID NO: 44519 - DNA, 20 bp, Human papillomavirus type 201
ctactaatatagatgtgcca

SEQ ID NO: 44520 - DNA, 20 bp, Human papillomavirus type 201
acttaaatatttatacagta

SEQ ID NO: 44521 - DNA, 20 bp, Human papillomavirus type 201
gtaaattgggactgcaacct

SEQ ID NO: 44522 - DNA, 20 bp, Human papillomavirus type 201
ggactgcaacctgttcctgc

SEQ ID NO: 44523 - DNA, 20 bp, Human papillomavirus type 201
ctgcactggtagtttctgaa

SEQ ID NO: 44524 - DNA, 20 bp, Human papillomavirus type 201
ctgaatacaatggaaaacaa

SEQ ID NO: 44525 - DNA, 20 bp, Human papillomavirus type 201
tgaatacaatggaaaacaag

SEQ ID NO: 44526 - DNA, 20 bp, Human papillomavirus type 201
taagatatttgctcaggatg

SEQ ID NO: 44527 - DNA, 20 bp, Human papillomavirus type 201
aagatatttgctcaggatgc

SEQ ID NO: 44528 - DNA, 20 bp, Human papillomavirus type 201
agatatttgctcaggatgct

SEQ ID NO: 44529 - DNA, 20 bp, Human papillomavirus type 201
gctcaggatgctgaaatgta

SEQ ID NO: 44530 - DNA, 20 bp, Human papillomavirus type 201
ctcaggatgctgaaatgtat

SEQ ID NO: 44531 - DNA, 20 bp, Human papillomavirus type 201
caagaagaagctagggatcc

SEQ ID NO: 44532 - DNA, 20 bp, Human papillomavirus type 201
taattagaggaggggcaaat

SEQ ID NO: 44533 - DNA, 20 bp, Human papillomavirus type 201
gaggaggggcaaatgcttta

SEQ ID NO: 44534 - DNA, 20 bp, Human papillomavirus type 201
aaaatgcttcagatatagaa

SEQ ID NO: 44535 - DNA, 20 bp, Human papillomavirus type 201
aaatgcttcagatatagaaa

SEQ ID NO: 44536 - DNA, 20 bp, Human papillomavirus type 201
gctacccctagcagagtaat

SEQ ID NO: 44537 - DNA, 20 bp, Human papillomavirus type 201
cagatggcacagttattagg

SEQ ID NO: 44538 - DNA, 20 bp, Human papillomavirus type 201
ttaggcctactgttcctgta

SEQ ID NO: 44539 - DNA, 20 bp, Human papillomavirus type 201
ggcctactgttcctgtagag

SEQ ID NO: 44540 - DNA, 20 bp, Human papillomavirus type 201
ctgtagagcctataggtcca

SEQ ID NO: 44541 - DNA, 20 bp, Human papillomavirus type 201
aaatagaggcgggaaggaaa

SEQ ID NO: 44542 - DNA, 20 bp, Human papillomavirus type 201
gaataggatacgtcacttgt

SEQ ID NO: 44543 - DNA, 20 bp, Human papillomavirus type 201
aataggatacgtcacttgta

SEQ ID NO: 44544 - DNA, 20 bp, Human papillomavirus type 201
tataatagaagaattttaca

SEQ ID NO: 44545 - DNA, 20 bp, Human papillomavirus type 201
tacaacaaccaaccagaaac

SEQ ID NO: 44546 - DNA, 20 bp, Human papillomavirus type 201
tgtagaccctatagctcagt

SEQ ID NO: 44547 - DNA, 20 bp, Human papillomavirus type 201
gtagaccctatagctcagtt

SEQ ID NO: 44548 - DNA, 20 bp, Human papillomavirus type 201
tagaccctatagctcagtta

SEQ ID NO: 44549 - DNA, 20 bp, Human papillomavirus type 201
cagaatacagcatttactga

SEQ ID NO: 44550 - DNA, 20 bp, Human papillomavirus type 201
actgaggctgatttggaaga

SEQ ID NO: 44551 - DNA, 20 bp, Human papillomavirus type 201
ccgttggtcatccttacttt

SEQ ID NO: 44552 - DNA, 20 bp, Human papillomavirus type 201
gtcatccttactttgaaatt

SEQ ID NO: 44553 - DNA, 20 bp, Human papillomavirus type 201
ctttgaaattcgtgacaatg

SEQ ID NO: 44554 - DNA, 20 bp, Human papillomavirus type 201
gaaattcgtgacaatgtaga

SEQ ID NO: 44555 - DNA, 20 bp, Human papillomavirus type 201
aaattcgtgacaatgtagat

SEQ ID NO: 44556 - DNA, 20 bp, Human papillomavirus type 201
ttggagacagtctattcttt

SEQ ID NO: 44557 - DNA, 20 bp, Human papillomavirus type 201
tggagacagtctattctttt

SEQ ID NO: 44558 - DNA, 20 bp, Human papillomavirus type 201
ggagacagtctattctttta

SEQ ID NO: 44559 - DNA, 20 bp, Human papillomavirus type 201
gagacagtctattcttttat

SEQ ID NO: 44560 - DNA, 20 bp, Human papillomavirus type 201
ttttatggaaagcgagaaca

SEQ ID NO: 44561 - DNA, 20 bp, Human papillomavirus type 201
atatttcagctttgtaaaat

SEQ ID NO: 44562 - DNA, 20 bp, Human papillomavirus type 201
cagctttgtaaaattccact

SEQ ID NO: 44563 - DNA, 20 bp, Human papillomavirus type 201
agctttgtaaaattccacta

SEQ ID NO: 44564 - DNA, 20 bp, Human papillomavirus type 201
gtaaaattccactacaggct

SEQ ID NO: 44565 - DNA, 20 bp, Human papillomavirus type 201
taaaattccactacaggctg

SEQ ID NO: 44566 - DNA, 20 bp, Human papillomavirus type 201
cattgctggcagagccatat

SEQ ID NO: 44567 - DNA, 20 bp, Human papillomavirus type 201
attgctggcagagccatatt

SEQ ID NO: 44568 - DNA, 20 bp, Human papillomavirus type 201
ctggcagagccatatttgca

SEQ ID NO: 44569 - DNA, 20 bp, Human papillomavirus type 201
gcaataaatttgcacacttc

SEQ ID NO: 44570 - DNA, 20 bp, Human papillomavirus type 201
caataaatttgcacacttca

SEQ ID NO: 44571 - DNA, 20 bp, Influenza A virus
aactgtataggaaacttaag

SEQ ID NO: 44572 - DNA, 20 bp, Influenza A virus
agagggagataacgttccat

SEQ ID NO: 44573 - DNA, 20 bp, Influenza A virus
catggggccaaagaaatagc

SEQ ID NO: 44574 - DNA, 20 bp, Influenza A virus
ttctgctggtgcacttgcca

SEQ ID NO: 44575 - DNA, 20 bp, Influenza A virus
tgctggtgcacttgccagtt

SEQ ID NO: 44576 - DNA, 20 bp, Influenza A virus
ggatcttgcacttgatattg

SEQ ID NO: 44577 - DNA, 20 bp, Influenza A virus
cacttgatattgtggattct

SEQ ID NO: 44578 - DNA, 20 bp, Influenza A virus
atattgtggattcttgatcg

SEQ ID NO: 44579 - DNA, 20 bp, Influenza A virus
tggattcttgatcgtctttt

SEQ ID NO: 44580 - DNA, 20 bp, Influenza A virus
ttgatcgtctttttttcaaa

SEQ ID NO: 44581 - DNA, 20 bp, Human papillomavirus type 16
tatgtagaggctgtagtgga

SEQ ID NO: 44582 - DNA, 20 bp, Human papillomavirus type 16
atgtagaggctgtagtggaa

SEQ ID NO: 44583 - DNA, 20 bp, Human papillomavirus type 16
tgtagaggctgtagtggaaa

SEQ ID NO: 44584 - DNA, 20 bp, Human papillomavirus type 16
ggtagattttatagtaaatg

SEQ ID NO: 44585 - DNA, 20 bp, Human papillomavirus type 16
gtagattttatagtaaatga

SEQ ID NO: 44586 - DNA, 20 bp, Human papillomavirus type 16
caggtagaagggcgccatga

SEQ ID NO: 44587 - DNA, 20 bp, Human papillomavirus type 16
cagtctcatggcgcccttct

SEQ ID NO: 44588 - DNA, 20 bp, Human papillomavirus type 16
agtctcatggcgcccttcta

SEQ ID NO: 44589 - DNA, 20 bp, Human papillomavirus type 16
tacctgtaacatctgctgag

SEQ ID NO: 44590 - DNA, 20 bp, Human papillomavirus type 16
ccacttcagtattgccatac

SEQ ID NO: 44591 - DNA, 20 bp, Human papillomavirus type 16
gccaacgtttaaatgtgtgt

SEQ ID NO: 44592 - DNA, 20 bp, Human papillomavirus type 16
ccaacgtttaaatgtgtgtc

SEQ ID NO: 44593 - DNA, 20 bp, Human papillomavirus type 16
aaatgtgtgtcaggacaaaa

SEQ ID NO: 44594 - DNA, 20 bp, Human papillomavirus type 16
aatgtgtgtcaggacaaaat

SEQ ID NO: 44595 - DNA, 20 bp, Human papillomavirus type 16
tgaaaatgatagtacagacc

SEQ ID NO: 44596 - DNA, 20 bp, Human papillomavirus type 16
aagtgtatttaactgcacca

SEQ ID NO: 44597 - DNA, 20 bp, Human papillomavirus type 16
aactgcaccaacaggatgta

SEQ ID NO: 44598 - DNA, 20 bp, Human papillomavirus type 16
actgcaccaacaggatgtat

SEQ ID NO: 44599 - DNA, 20 bp, Human papillomavirus type 16
gatggagacatatgcaatac

SEQ ID NO: 44600 - DNA, 20 bp, Human papillomavirus type 16
atggagacatatgcaataca

SEQ ID NO: 44601 - DNA, 20 bp, Human papillomavirus type 16
ccccagatgtatcaggattt

SEQ ID NO: 44602 - DNA, 20 bp, Human papillomavirus type 16
agtattactacttcaactga

SEQ ID NO: 44603 - DNA, 20 bp, Human papillomavirus type 16
gtattactacttcaactgat

SEQ ID NO: 44604 - DNA, 20 bp, Human papillomavirus type 16
ctacttcaactgataccaca

SEQ ID NO: 44605 - DNA, 20 bp, Human papillomavirus type 16
aactgataccacacctgcta

SEQ ID NO: 44606 - DNA, 20 bp, Human papillomavirus type 16
cctcctgtcccagtatctaa

SEQ ID NO: 44607 - DNA, 20 bp, Human papillomavirus type 16
taagcacggatgaatatgtt

SEQ ID NO: 44608 - DNA, 20 bp, Human papillomavirus type 16
cacgcacaaacatatattat

SEQ ID NO: 44609 - DNA, 20 bp, Human papillomavirus type 16
ctgcatgataatatatgttt

SEQ ID NO: 44610 - DNA, 20 bp, Human papillomavirus type 16
gtgcgtgcaacatattcatc

SEQ ID NO: 44611 - DNA, 20 bp, Human papillomavirus type 16
tataatccagatacacagcg

SEQ ID NO: 44612 - DNA, 20 bp, Human papillomavirus type 16
ataatccagatacacagcgg

SEQ ID NO: 44613 - DNA, 20 bp, Human papillomavirus type 16
taatccagatacacagcggc

SEQ ID NO: 44614 - DNA, 20 bp, Human papillomavirus type 16
gggcctgtgtaggtgttgag

SEQ ID NO: 44615 - DNA, 20 bp, Human papillomavirus type 16
ggcctgtgtaggtgttgagg

SEQ ID NO: 44616 - DNA, 20 bp, Human papillomavirus type 16
cagtaaatccaggtgattgt

SEQ ID NO: 44617 - DNA, 20 bp, Human papillomavirus type 16
tccaccattagagttaataa

SEQ ID NO: 44618 - DNA, 20 bp, Human papillomavirus type 16
gagttaataaacacagttat

SEQ ID NO: 44619 - DNA, 20 bp, Human papillomavirus type 16
ataaacacagttattcagga

SEQ ID NO: 44620 - DNA, 20 bp, Human papillomavirus type 16
ttcaggatggtgatatggtt

SEQ ID NO: 44621 - DNA, 20 bp, Human papillomavirus type 16
gtgaaaatgtaccagacgat

SEQ ID NO: 44622 - DNA, 20 bp, Human papillomavirus type 16
atacattaaaggctctgggt

SEQ ID NO: 44623 - DNA, 20 bp, Human papillomavirus type 16
tacattaaaggctctgggtc

SEQ ID NO: 44624 - DNA, 20 bp, Human papillomavirus type 16
aaggctctgggtctactgca

SEQ ID NO: 44625 - DNA, 20 bp, Human papillomavirus type 16
agccagttcaaattattttc

SEQ ID NO: 44626 - DNA, 20 bp, Human papillomavirus type 16
ggaagtaaatttaaaggaaa

SEQ ID NO: 44627 - DNA, 20 bp, Human papillomavirus type 16
aaaggaaaagttttctgcag

SEQ ID NO: 44628 - DNA, 20 bp, Human papillomavirus type 16
aaggaaaagttttctgcaga

SEQ ID NO: 44629 - DNA, 20 bp, Human papillomavirus type 16
tctgcagacctagatcagtt

SEQ ID NO: 44630 - DNA, 20 bp, Human papillomavirus type 16
ctgcagacctagatcagttt

SEQ ID NO: 44631 - DNA, 20 bp, Human papillomavirus type 16
gcacaaaatgtgttttttta

SEQ ID NO: 44632 - DNA, 20 bp, Human papillomavirus type 16
ttttaaatagttctatgtca

SEQ ID NO: 44633 - DNA, 20 bp, Human papillomavirus type 16
tttaaatagttctatgtcag

SEQ ID NO: 44634 - DNA, 20 bp, Human papillomavirus type 16
ttaaatagttctatgtcagc

SEQ ID NO: 44635 - DNA, 20 bp, Human papillomavirus type 16
taaatagttctatgtcagca

SEQ ID NO: 44636 - DNA, 20 bp, Human papillomavirus type 16
caggacccacaggagcgacc

SEQ ID NO: 44637 - DNA, 20 bp, Human papillomavirus type 16
aggacccacaggagcgaccc

SEQ ID NO: 44638 - DNA, 20 bp, Human papillomavirus type 16
ccacagttatgcacagagct

SEQ ID NO: 44639 - DNA, 20 bp, Human papillomavirus type 16
tgcacagagctgcaaacaac

SEQ ID NO: 44640 - DNA, 20 bp, Human papillomavirus type 16
gaatgtgtgtactgcaagca

SEQ ID NO: 44641 - DNA, 20 bp, Human papillomavirus type 16
cataatataaggggtcggtg

SEQ ID NO: 44642 - DNA, 20 bp, Human papillomavirus type 16
tattatggaatctttgcttt

SEQ ID NO: 44643 - DNA, 20 bp, Human papillomavirus type 16
tggaatctttgctttttgtc

SEQ ID NO: 44644 - DNA, 20 bp, Human papillomavirus type 16
gctttttgtccagatgtctt

SEQ ID NO: 44645 - DNA, 20 bp, Human papillomavirus type 16
ctttttgtccagatgtcttt

SEQ ID NO: 44646 - DNA, 20 bp, Human papillomavirus type 16
caatattgtaaccttttgtt

SEQ ID NO: 44647 - DNA, 20 bp, Human papillomavirus type 16
taaccttttgttgcaagtgt

SEQ ID NO: 44648 - DNA, 20 bp, Human papillomavirus type 16
tgttgcaagtgtgactctac

SEQ ID NO: 44649 - DNA, 20 bp, Human papillomavirus type 16
gttgcaagtgtgactctacg

SEQ ID NO: 44650 - DNA, 20 bp, Human papillomavirus type 16
ttgcaagtgtgactctacgc

SEQ ID NO: 44651 - DNA, 20 bp, Influenza A virus
cggaaaaggcaatgaaagaa

SEQ ID NO: 44652 - DNA, 20 bp, Influenza A virus
gcatcaatatgcacacactt

SEQ ID NO: 44653 - DNA, 20 bp, Influenza A virus
gaagtctgcttcatgtactc

SEQ ID NO: 44654 - DNA, 20 bp, Influenza A virus
atgtactctgatttccactt

SEQ ID NO: 44655 - DNA, 20 bp, Influenza A virus
gtcgatgaagtggaaatcag

SEQ ID NO: 44656 - DNA, 20 bp, Influenza A virus
ctcccggatctgtatgacta

SEQ ID NO: 44657 - DNA, 20 bp, Influenza A virus
tcccggatctgtatgactac

SEQ ID NO: 44658 - DNA, 20 bp, Influenza A virus
cattgaaattggagtgacga

SEQ ID NO: 44659 - DNA, 20 bp, Influenza A virus
attgaaattggagtgacgag

SEQ ID NO: 44660 - DNA, 20 bp, Influenza A virus
aaattggagtgacgaggagg

SEQ ID NO: 44661 - DNA, 20 bp, Influenza A virus
aggacattgaaaatgaagag

SEQ ID NO: 44662 - DNA, 20 bp, Influenza A virus
aaaatgaagagaagattcca

SEQ ID NO: 44663 - DNA, 20 bp, Influenza A virus
caaggacaaagaacatgaag

SEQ ID NO: 44664 - DNA, 20 bp, Influenza A virus
aagtgggcactcggtgagaa

SEQ ID NO: 44665 - DNA, 20 bp, Influenza A virus
tccggtgccatgttctcacc

SEQ ID NO: 44666 - DNA, 20 bp, Influenza A virus
ccccaatcgaacacattgca

SEQ ID NO: 44667 - DNA, 20 bp, Influenza A virus
caagcatgagacggaactat

SEQ ID NO: 44668 - DNA, 20 bp, Influenza A virus
tacagcagaggtgtcccact

SEQ ID NO: 44669 - DNA, 20 bp, Influenza A virus
acagcagaggtgtcccactg

SEQ ID NO: 44670 - DNA, 20 bp, Influenza A virus
cagcagaggtgtcccactgc

SEQ ID NO: 44671 - DNA, 20 bp, Influenza A virus
gtaagtatggaattttccct

SEQ ID NO: 44672 - DNA, 20 bp, Influenza A virus
taagtatggaattttccctt

SEQ ID NO: 44673 - DNA, 20 bp, Influenza A virus
tcccttaccgacccaaggtt

SEQ ID NO: 44674 - DNA, 20 bp, Influenza A virus
cccttaccgacccaaggttg

SEQ ID NO: 44675 - DNA, 20 bp, Influenza A virus
ccttaccgacccaaggttgg

SEQ ID NO: 44676 - DNA, 20 bp, Influenza A virus
tttgaaaacaaatcagaaac

SEQ ID NO: 44677 - DNA, 20 bp, Influenza A virus
gaaaacaaatcagaaacatg

SEQ ID NO: 44678 - DNA, 20 bp, Influenza A virus
aaaacaaatcagaaacatgg

SEQ ID NO: 44679 - DNA, 20 bp, Influenza A virus
gagagtcacctaaaggagtg

SEQ ID NO: 44680 - DNA, 20 bp, Influenza A virus
ccgatggaaccttcctccac

SEQ ID NO: 44681 - DNA, 20 bp, Influenza A virus
aatgtaagtgctcttattag

SEQ ID NO: 44682 - DNA, 20 bp, Influenza A virus
ttaggtagctccttttgttc

SEQ ID NO: 44683 - DNA, 20 bp, Influenza A virus
ggtagctccttttgttcagt

SEQ ID NO: 44684 - DNA, 20 bp, Influenza A virus
tgttcagtctttgttttttc

SEQ ID NO: 44685 - DNA, 20 bp, Influenza A virus
gttcagtctttgttttttct

SEQ ID NO: 44686 - DNA, 20 bp, Influenza A virus
agcaatctggcctccctgtc

SEQ ID NO: 44687 - DNA, 20 bp, Influenza A virus
gcaaatgttgtgaggaagat

SEQ ID NO: 44688 - DNA, 20 bp, Influenza A virus
tgaggaagatgatgactaat

SEQ ID NO: 44689 - DNA, 20 bp, Influenza A virus
tgaattagtcatcatcttcc

SEQ ID NO: 44690 - DNA, 20 bp, Influenza A virus
gtcatcatcttcctcacaac

SEQ ID NO: 44691 - DNA, 20 bp, Influenza A virus
ggaaaagggtacatgttcga

SEQ ID NO: 44692 - DNA, 20 bp, Influenza A virus
gaaagtaagagtatgaagtt

SEQ ID NO: 44693 - DNA, 20 bp, Influenza A virus
cggacacaagtaccagcgga

SEQ ID NO: 44694 - DNA, 20 bp, Influenza A virus
caggtcaatatttgcgagca

SEQ ID NO: 44695 - DNA, 20 bp, Influenza A virus
aggtcaatatttgcgagcat

SEQ ID NO: 44696 - DNA, 20 bp, Influenza A virus
gtgggacggactccaatcct

SEQ ID NO: 44697 - DNA, 20 bp, Influenza A virus
gccctcatagtgaatgcacc

SEQ ID NO: 44698 - DNA, 20 bp, Influenza A virus
cctcatgattcggtgcattc

SEQ ID NO: 44699 - DNA, 20 bp, Influenza A virus
ggtgcattcactatgagggc

SEQ ID NO: 44700 - DNA, 20 bp, Influenza A virus
actatgagggcgaagtcatc

SEQ ID NO: 44701 - DNA, 20 bp, Influenza A virus
gtgttacagtaataaagaac

SEQ ID NO: 44702 - DNA, 20 bp, Influenza A virus
cagtaataaagaacaatatg

SEQ ID NO: 44703 - DNA, 20 bp, Influenza A virus
gaccagcaacagcccaaatg

SEQ ID NO: 44704 - DNA, 20 bp, Influenza A virus
agctatttatcaaagactac

SEQ ID NO: 44705 - DNA, 20 bp, Influenza A virus
atcaaagactacagatacac

SEQ ID NO: 44706 - DNA, 20 bp, Influenza A virus
cagaggtctgcttgaaatgg

SEQ ID NO: 44707 - DNA, 20 bp, Influenza A virus
aaatgggaattgatggatga

SEQ ID NO: 44708 - DNA, 20 bp, Influenza A virus
atggatgaagactaccaagg

SEQ ID NO: 44709 - DNA, 20 bp, Influenza A virus
tgtaatcctatgaacccgtt

SEQ ID NO: 44710 - DNA, 20 bp, Influenza A virus
ataggattacacaacctgcc

SEQ ID NO: 44711 - DNA, 20 bp, Human papillomavirus type 63
ccagctttttccttataaaa

SEQ ID NO: 44712 - DNA, 20 bp, Human papillomavirus type 63
ttccttataaaactctggtg

SEQ ID NO: 44713 - DNA, 20 bp, Human papillomavirus type 63
tccttataaaactctggtgg

SEQ ID NO: 44714 - DNA, 20 bp, Human papillomavirus type 63
ccttataaaactctggtggg

SEQ ID NO: 44715 - DNA, 20 bp, Human papillomavirus type 63
cttataaaactctggtggga

SEQ ID NO: 44716 - DNA, 20 bp, Human papillomavirus type 63
gtctgcttgagtttatgctt

SEQ ID NO: 44717 - DNA, 20 bp, Human papillomavirus type 63
agtttatgctttattatcag

SEQ ID NO: 44718 - DNA, 20 bp, Human papillomavirus type 63
atgctttattatcaggagtc

SEQ ID NO: 44719 - DNA, 20 bp, Human papillomavirus type 63
tgctttattatcaggagtct

SEQ ID NO: 44720 - DNA, 20 bp, Human papillomavirus type 63
attatcaggagtctttcgag

SEQ ID NO: 44721 - DNA, 20 bp, Human papillomavirus type 63
ggtgagtcaagaagaaccaa

SEQ ID NO: 44722 - DNA, 20 bp, Human papillomavirus type 63
gtgagtcaagaagaaccaag

SEQ ID NO: 44723 - DNA, 20 bp, Human papillomavirus type 63
ttatgaggatatacctgctg

SEQ ID NO: 44724 - DNA, 20 bp, Human papillomavirus type 63
tgaggatatacctgctgagg

SEQ ID NO: 44725 - DNA, 20 bp, Human papillomavirus type 63
tgcttccttgtggtttgtgc

SEQ ID NO: 44726 - DNA, 20 bp, Human papillomavirus type 63
gtatattgtggatgaggcag

SEQ ID NO: 44727 - DNA, 20 bp, Human papillomavirus type 63
tggatgaggcagaatgtcgg

SEQ ID NO: 44728 - DNA, 20 bp, Human papillomavirus type 63
gaggatttggaggacaccta

SEQ ID NO: 44729 - DNA, 20 bp, Human papillomavirus type 63
ggaggacacctataattcat

SEQ ID NO: 44730 - DNA, 20 bp, Human papillomavirus type 63
gaggacacctataattcatt

SEQ ID NO: 44731 - DNA, 20 bp, Human papillomavirus type 63
aacagtcctccgcaggcaag

SEQ ID NO: 44732 - DNA, 20 bp, Human papillomavirus type 63
gaatctataacaatttcgca

SEQ ID NO: 44733 - DNA, 20 bp, Human papillomavirus type 63
ttatagattccaatctggga

SEQ ID NO: 44734 - DNA, 20 bp, Human papillomavirus type 63
tagattccaatctgggactg

SEQ ID NO: 44735 - DNA, 20 bp, Human papillomavirus type 63
caatctgggactgaggctat

SEQ ID NO: 44736 - DNA, 20 bp, Human papillomavirus type 63
tgaaatgcagtaatacaaga

SEQ ID NO: 44737 - DNA, 20 bp, Human papillomavirus type 63
gaaatgcagtaatacaagat

SEQ ID NO: 44738 - DNA, 20 bp, Human papillomavirus type 63
aaatgcagtaatacaagatc

SEQ ID NO: 44739 - DNA, 20 bp, Human papillomavirus type 63
ccaaatttaaagacacagta

SEQ ID NO: 44740 - DNA, 20 bp, Human papillomavirus type 63
aaagacacagtaggtgtcag

SEQ ID NO: 44741 - DNA, 20 bp, Human papillomavirus type 63
gaaatctttttttgaaaggt

SEQ ID NO: 44742 - DNA, 20 bp, Human papillomavirus type 63
ttttgaaaggttttggagcc

SEQ ID NO: 44743 - DNA, 20 bp, Human papillomavirus type 63
tttgaaaggttttggagcca

SEQ ID NO: 44744 - DNA, 20 bp, Human papillomavirus type 63
ttgaaaggttttggagccag

SEQ ID NO: 44745 - DNA, 20 bp, Human papillomavirus type 63
tgaaaggttttggagccagt

SEQ ID NO: 44746 - DNA, 20 bp, Human papillomavirus type 63
cagcttcccaggataaagca

SEQ ID NO: 44747 - DNA, 20 bp, Human papillomavirus type 63
ccaggataaagcaaaaacag

SEQ ID NO: 44748 - DNA, 20 bp, Human papillomavirus type 63
atcttagtggcctcagagac

SEQ ID NO: 44749 - DNA, 20 bp, Human papillomavirus type 63
tcttagtggcctcagagact

SEQ ID NO: 44750 - DNA, 20 bp, Human papillomavirus type 63
gtggcctcagagactcacaa

SEQ ID NO: 44751 - DNA, 20 bp, Human papillomavirus type 63
gcaagcgacggccctacgga

SEQ ID NO: 44752 - DNA, 20 bp, Human papillomavirus type 63
tggaccttcttcgtccgtag

SEQ ID NO: 44753 - DNA, 20 bp, Human papillomavirus type 63
ttcgtccgtagggccgtcgc

SEQ ID NO: 44754 - DNA, 20 bp, Human papillomavirus type 63
gtccgtagggccgtcgcttg

SEQ ID NO: 44755 - DNA, 20 bp, Human papillomavirus type 63
cgaacagccggcgatttcgg

SEQ ID NO: 44756 - DNA, 20 bp, Human papillomavirus type 63
gacggttcctaagggtgggt

SEQ ID NO: 44757 - DNA, 20 bp, Human papillomavirus type 63
acggttcctaagggtgggtg

SEQ ID NO: 44758 - DNA, 20 bp, Human papillomavirus type 63
ctaagggtgggtgttggggt

SEQ ID NO: 44759 - DNA, 20 bp, Human papillomavirus type 63
gggtatattttgtaatcatg

SEQ ID NO: 44760 - DNA, 20 bp, Human papillomavirus type 63
tgtaatcatgttaagagtac

SEQ ID NO: 44761 - DNA, 20 bp, Human papillomavirus type 63
atattccacaagaaagtcct

SEQ ID NO: 44762 - DNA, 20 bp, Human papillomavirus type 63
cacaagaaagtcctgctgca

SEQ ID NO: 44763 - DNA, 20 bp, Human papillomavirus type 63
ccaatacaataatcctttat

SEQ ID NO: 44764 - DNA, 20 bp, Human papillomavirus type 63
attcaggatcacagctagtg

SEQ ID NO: 44765 - DNA, 20 bp, Human papillomavirus type 63
ttcaggatcacagctagtgc

SEQ ID NO: 44766 - DNA, 20 bp, Human papillomavirus type 63
ctataatagacgctattatg

SEQ ID NO: 44767 - DNA, 20 bp, Human papillomavirus type 63
tataatagacgctattatga

SEQ ID NO: 44768 - DNA, 20 bp, Human papillomavirus type 63
tgaacaagtgccagttactg

SEQ ID NO: 44769 - DNA, 20 bp, Human papillomavirus type 63
ctgcacctgaatttatcaca

SEQ ID NO: 44770 - DNA, 20 bp, Human papillomavirus type 63
tgataaattcaggtgcagta

SEQ ID NO: 44771 - DNA, 20 bp, Human papillomavirus type 63
tatatggatattagctctat

SEQ ID NO: 44772 - DNA, 20 bp, Human papillomavirus type 63
atatggatattagctctatc

SEQ ID NO: 44773 - DNA, 20 bp, Human papillomavirus type 63
tatggatattagctctatct

SEQ ID NO: 44774 - DNA, 20 bp, Human papillomavirus type 63
gctctatctcctcaaatgat

SEQ ID NO: 44775 - DNA, 20 bp, Human papillomavirus type 63
agttacaaacactgggtgaa

SEQ ID NO: 44776 - DNA, 20 bp, Human papillomavirus type 63
tgatttacatccaagtttgc

SEQ ID NO: 44777 - DNA, 20 bp, Human papillomavirus type 63
acatccaagtttgcgtaaac

SEQ ID NO: 44778 - DNA, 20 bp, Human papillomavirus type 63
catccaagtttgcgtaaacg

SEQ ID NO: 44779 - DNA, 20 bp, Human papillomavirus type 63
gcgtaaacgtcgcaaattag

SEQ ID NO: 44780 - DNA, 20 bp, Human papillomavirus type 63
cgtaaacgtcgcaaattagt

SEQ ID NO: 44781 - DNA, 20 bp, Human papillomavirus type 63
ctccaaatcagtatagagtc

SEQ ID NO: 44782 - DNA, 20 bp, Human papillomavirus type 63
tccaaatcagtatagagtct

SEQ ID NO: 44783 - DNA, 20 bp, Human papillomavirus type 63
cgtgttagatttccagatcc

SEQ ID NO: 44784 - DNA, 20 bp, Human papillomavirus type 63
gtgttagatttccagatcct

SEQ ID NO: 44785 - DNA, 20 bp, Human papillomavirus type 63
gatttccagatcctaaccga

SEQ ID NO: 44786 - DNA, 20 bp, Human papillomavirus type 63
ctaattggctgtacaccagc

SEQ ID NO: 44787 - DNA, 20 bp, Human papillomavirus type 63
taattggctgtacaccagcc

SEQ ID NO: 44788 - DNA, 20 bp, Human papillomavirus type 63
gctgtacaccagccactggg

SEQ ID NO: 44789 - DNA, 20 bp, Human papillomavirus type 63
cagcttggagattgtcctcc

SEQ ID NO: 44790 - DNA, 20 bp, Human papillomavirus type 63
agcttggagattgtcctcct

SEQ ID NO: 44791 - DNA, 20 bp, Human papillomavirus type 63
ttgtatcaaagtggtcttgc

SEQ ID NO: 44792 - DNA, 20 bp, Human papillomavirus type 63
tgtatcaaagtggtcttgca

SEQ ID NO: 44793 - DNA, 20 bp, Human papillomavirus type 63
gtatcaaagtggtcttgcac

SEQ ID NO: 44794 - DNA, 20 bp, Human papillomavirus type 63
tatcaaagtggtcttgcaca

SEQ ID NO: 44795 - DNA, 20 bp, Human papillomavirus type 63
cacagcgttctgttccaaaa

SEQ ID NO: 44796 - DNA, 20 bp, Human papillomavirus type 63
acctgtcttcgagtcattat

SEQ ID NO: 44797 - DNA, 20 bp, Human papillomavirus type 63
cctgtcttcgagtcattatt

SEQ ID NO: 44798 - DNA, 20 bp, Human papillomavirus type 63
gagtcattattgcctagtca

SEQ ID NO: 44799 - DNA, 20 bp, Human papillomavirus type 63
ttgcctagtcatatagcctc

SEQ ID NO: 44800 - DNA, 20 bp, Human papillomavirus type 63
cctagtcatatagcctcatg

SEQ ID NO: 44801 - DNA, 20 bp, Influenza A virus
gtggaatcgggagattctac

SEQ ID NO: 44802 - DNA, 20 bp, Influenza A virus
tacatccaaatgtgcactga

SEQ ID NO: 44803 - DNA, 20 bp, Influenza A virus
ggatgtagaatctcccgatt

SEQ ID NO: 44804 - DNA, 20 bp, Influenza A virus
gatgtagaatctcccgattc

SEQ ID NO: 44805 - DNA, 20 bp, Influenza A virus
caccaatcattcttccgaca

SEQ ID NO: 44806 - DNA, 20 bp, Influenza A virus
ctggaggggtgaaaatggac

SEQ ID NO: 44807 - DNA, 20 bp, Influenza A virus
tggaggggtgaaaatggacg

SEQ ID NO: 44808 - DNA, 20 bp, Influenza A virus
cttatgaaagaatgtgcaat

SEQ ID NO: 44809 - DNA, 20 bp, Influenza A virus
tgaaagaatgtgcaatatcc

SEQ ID NO: 44810 - DNA, 20 bp, Influenza A virus
cacattctttcataagcaac

SEQ ID NO: 44811 - DNA, 20 bp, Influenza A virus
tgtgtatgggcttgcagtag

SEQ ID NO: 44812 - DNA, 20 bp, Influenza A virus
cagtagcaagtgggcatgac

SEQ ID NO: 44813 - DNA, 20 bp, Influenza A virus
gaaagggaagggtactcact

SEQ ID NO: 44814 - DNA, 20 bp, Influenza A virus
aaagggaagggtactcactg

SEQ ID NO: 44815 - DNA, 20 bp, Influenza A virus
gaatgggtctatcccgacca

SEQ ID NO: 44816 - DNA, 20 bp, Influenza A virus
caagaggaaagctttccaca

SEQ ID NO: 44817 - DNA, 20 bp, Influenza A virus
ccacaagaggggtccagatt

SEQ ID NO: 44818 - DNA, 20 bp, Influenza A virus
cacaagaggggtccagattg

SEQ ID NO: 44819 - DNA, 20 bp, Influenza A virus
cttcaaatgagaatgtggaa

SEQ ID NO: 44820 - DNA, 20 bp, Influenza A virus
aaatgagaatgtggaaacca

SEQ ID NO: 44821 - DNA, 20 bp, Influenza A virus
caaaggagacgtttttgtca

SEQ ID NO: 44822 - DNA, 20 bp, Influenza A virus
ttgtcataagagagcccttt

SEQ ID NO: 44823 - DNA, 20 bp, Influenza A virus
tgtcataagagagcccttta

SEQ ID NO: 44824 - DNA, 20 bp, Influenza A virus
gtcataagagagccctttat

SEQ ID NO: 44825 - DNA, 20 bp, Influenza A virus
tcataagagagccctttatt

SEQ ID NO: 44826 - DNA, 20 bp, Influenza A virus
caggtccagataatggagca

SEQ ID NO: 44827 - DNA, 20 bp, Influenza A virus
aggtccagataatggagcag

SEQ ID NO: 44828 - DNA, 20 bp, Influenza A virus
aaatacaacggcataataac

SEQ ID NO: 44829 - DNA, 20 bp, Influenza A virus
gaggaagaaaatattgagga

SEQ ID NO: 44830 - DNA, 20 bp, Influenza A virus
aggacacaagagtctgaatg

SEQ ID NO: 44831 - DNA, 20 bp, Influenza A virus
ctgttaccctgataccggca

SEQ ID NO: 44832 - DNA, 20 bp, Influenza A virus
ccctgataccggcaaagtga

SEQ ID NO: 44833 - DNA, 20 bp, Influenza A virus
gcatggttcgaaccggccat

SEQ ID NO: 44834 - DNA, 20 bp, Influenza A virus
gaaccggccatgggtgtctt

SEQ ID NO: 44835 - DNA, 20 bp, Influenza A virus
tgatcgaaagacacccatgg

SEQ ID NO: 44836 - DNA, 20 bp, Influenza A virus
cagacatgggtttgagatga

SEQ ID NO: 44837 - DNA, 20 bp, Influenza A virus
gagatgatttgggatcctaa

SEQ ID NO: 44838 - DNA, 20 bp, Influenza A virus
agatgatttgggatcctaat

SEQ ID NO: 44839 - DNA, 20 bp, Influenza A virus
gggatcctaatggatggaca

SEQ ID NO: 44840 - DNA, 20 bp, Influenza A virus
ggatcctaatggatggacag

SEQ ID NO: 44841 - DNA, 20 bp, Influenza A virus
ccttgaagaatcccacccag

SEQ ID NO: 44842 - DNA, 20 bp, Influenza A virus
cttgaagaatcccacccagg

SEQ ID NO: 44843 - DNA, 20 bp, Influenza A virus
aagaatcccacccagggatc

SEQ ID NO: 44844 - DNA, 20 bp, Influenza A virus
gaaaactcgtgtcttgaaac

SEQ ID NO: 44845 - DNA, 20 bp, Influenza A virus
aaaactcgtgtcttgaaacg

SEQ ID NO: 44846 - DNA, 20 bp, Influenza A virus
agcaatctggactccccgtc

SEQ ID NO: 44847 - DNA, 20 bp, Influenza A virus
gcaaatgtcgtgaggaagat

SEQ ID NO: 44848 - DNA, 20 bp, Influenza A virus
tgagttagtcatcatcttcc

SEQ ID NO: 44849 - DNA, 20 bp, Influenza A virus
gtcatcatcttcctcacgac

SEQ ID NO: 44850 - DNA, 20 bp, Influenza A virus
ctcacgacatttgccaattt

SEQ ID NO: 44851 - DNA, 20 bp, Influenza A virus
ctcctataatgttctcaaac

SEQ ID NO: 44852 - DNA, 20 bp, Influenza A virus
tcaaacaagatggcaagatt

SEQ ID NO: 44853 - DNA, 20 bp, Influenza A virus
gggaaaggatacatgttcga

SEQ ID NO: 44854 - DNA, 20 bp, Influenza A virus
gaaagtaagagcatgaagct

SEQ ID NO: 44855 - DNA, 20 bp, Influenza A virus
ctgctggtatttgtgtccgt

SEQ ID NO: 44856 - DNA, 20 bp, Influenza A virus
ggcagaagaggtacaccaaa

SEQ ID NO: 44857 - DNA, 20 bp, Influenza A virus
cgctctcatagtgaatgcac

SEQ ID NO: 44858 - DNA, 20 bp, Influenza A virus
gctctcatagtgaatgcacc

SEQ ID NO: 44859 - DNA, 20 bp, Influenza A virus
ggtgcattcactatgagagc

SEQ ID NO: 44860 - DNA, 20 bp, Influenza A virus
gtgcattcactatgagagcg

SEQ ID NO: 44861 - DNA, 20 bp, Influenza A virus
ggagtgtctgggattaatga

SEQ ID NO: 44862 - DNA, 20 bp, Influenza A virus
gagtgtctgggattaatgaa

SEQ ID NO: 44863 - DNA, 20 bp, Influenza A virus
atgaatcggctgacatgagc

SEQ ID NO: 44864 - DNA, 20 bp, Influenza A virus
gtgttacagtgataaagaac

SEQ ID NO: 44865 - DNA, 20 bp, Influenza A virus
cagtgataaagaacaatatg

SEQ ID NO: 44866 - DNA, 20 bp, Human papillomavirus 18
gaggatccaacacggcgacc

SEQ ID NO: 44867 - DNA, 20 bp, Human papillomavirus 18
aggatccaacacggcgaccc

SEQ ID NO: 44868 - DNA, 20 bp, Human papillomavirus 18
cgtgcacagatcaggtagct

SEQ ID NO: 44869 - DNA, 20 bp, Human papillomavirus 18
tagggtcgccgtgttggatc

SEQ ID NO: 44870 - DNA, 20 bp, Human papillomavirus 18
gatcctcaaagcgcgccata

SEQ ID NO: 44871 - DNA, 20 bp, Human papillomavirus 18
ttattctagaattagagaat

SEQ ID NO: 44872 - DNA, 20 bp, Human papillomavirus 18
tattctagaattagagaatt

SEQ ID NO: 44873 - DNA, 20 bp, Human papillomavirus 18
attctagaattagagaatta

SEQ ID NO: 44874 - DNA, 20 bp, Human papillomavirus 18
ttctagaattagagaattaa

SEQ ID NO: 44875 - DNA, 20 bp, Human papillomavirus 18
tagaattagagaattaagac

SEQ ID NO: 44876 - DNA, 20 bp, Human papillomavirus 18
caagacattgtattgcattt

SEQ ID NO: 44877 - DNA, 20 bp, Human papillomavirus 18
tattgcatttagagccccaa

SEQ ID NO: 44878 - DNA, 20 bp, Human papillomavirus 18
catttagagccccaaaatga

SEQ ID NO: 44879 - DNA, 20 bp, Human papillomavirus 18
agagccccaaaatgaaattc

SEQ ID NO: 44880 - DNA, 20 bp, Human papillomavirus 18
gagccccaaaatgaaattcc

SEQ ID NO: 44881 - DNA, 20 bp, Human papillomavirus 18
ttccatgcgcaggaggtcca

SEQ ID NO: 44882 - DNA, 20 bp, Human papillomavirus 18
catgcgcaggaggtccacaa

SEQ ID NO: 44883 - DNA, 20 bp, Human papillomavirus 18
catgttttaaaacgaaagtt

SEQ ID NO: 44884 - DNA, 20 bp, Human papillomavirus 18
taaaacgaaagtttgcagga

SEQ ID NO: 44885 - DNA, 20 bp, Human papillomavirus 18
aaaacgaaagtttgcaggag

SEQ ID NO: 44886 - DNA, 20 bp, Human papillomavirus 18
aggtaactacaaatggcgaa

SEQ ID NO: 44887 - DNA, 20 bp, Human papillomavirus 18
ttgccctctgtgcccccgtt

SEQ ID NO: 44888 - DNA, 20 bp, Human papillomavirus 18
ccctctgtgcccccgttgtc

SEQ ID NO: 44889 - DNA, 20 bp, Human papillomavirus 18
tctatagcctccgtactgcc

SEQ ID NO: 44890 - DNA, 20 bp, Human papillomavirus 18
ccgccatgttcgccatttgt

SEQ ID NO: 44891 - DNA, 20 bp, Human papillomavirus 18
taggcgagcccaaaaacgac

SEQ ID NO: 44892 - DNA, 20 bp, Human papillomavirus 18
agatgttcaaaaatagatga

SEQ ID NO: 44893 - DNA, 20 bp, Human papillomavirus 18
gatgttcaaaaatagatgaa

SEQ ID NO: 44894 - DNA, 20 bp, Human papillomavirus 18
aaaaatagatgaagggggag

SEQ ID NO: 44895 - DNA, 20 bp, Human papillomavirus 18
gagaccaatagtgcaattcc

SEQ ID NO: 44896 - DNA, 20 bp, Human papillomavirus 18
gcaactaatacgttgggaaa

SEQ ID NO: 44897 - DNA, 20 bp, Human papillomavirus 18
ggaaaatgcaatattctttg

SEQ ID NO: 44898 - DNA, 20 bp, Human papillomavirus 18
tttgcagcaagggaacatgg

SEQ ID NO: 44899 - DNA, 20 bp, Human papillomavirus 18
gcagcaagggaacatggcat

SEQ ID NO: 44900 - DNA, 20 bp, Human papillomavirus 18
cagcaagggaacatggcata

SEQ ID NO: 44901 - DNA, 20 bp, Human papillomavirus 18
tatgactgatgcaggaacat

SEQ ID NO: 44902 - DNA, 20 bp, Human papillomavirus 18
acataatacaatcccctgtg

SEQ ID NO: 44903 - DNA, 20 bp, Human papillomavirus 18
cataatacaatcccctgtga

SEQ ID NO: 44904 - DNA, 20 bp, Human papillomavirus 18
cacaggtagcggttttgtcc

SEQ ID NO: 44905 - DNA, 20 bp, Human papillomavirus 18
tgtcccatgttcctgcatca

SEQ ID NO: 44906 - DNA, 20 bp, Human papillomavirus 18
ttaaacagctacagcacacc

SEQ ID NO: 44907 - DNA, 20 bp, Human papillomavirus 18
aacagctacagcacaccccc

SEQ ID NO: 44908 - DNA, 20 bp, Human papillomavirus 18
cagcaccgtgtccgtgggca

SEQ ID NO: 44909 - DNA, 20 bp, Human papillomavirus 18
gcggtgcccacggacacggt

SEQ ID NO: 44910 - DNA, 20 bp, Human papillomavirus 18
cggtgcccacggacacggtg

SEQ ID NO: 44911 - DNA, 20 bp, Human papillomavirus 18
cgaaaacatagcgaccacta

SEQ ID NO: 44912 - DNA, 20 bp, Human papillomavirus 18
gacaggtgcaggcaatgaaa

SEQ ID NO: 44913 - DNA, 20 bp, Human papillomavirus 18
cagtcagtattcctgttttt

SEQ ID NO: 44914 - DNA, 20 bp, Human papillomavirus 18
ctgttttttcattgcctgca

SEQ ID NO: 44915 - DNA, 20 bp, Human papillomavirus 18
tttcattgcctgcacctgtc

SEQ ID NO: 44916 - DNA, 20 bp, Human papillomavirus 18
tgccatctgtctgtatgtgt

SEQ ID NO: 44917 - DNA, 20 bp, Human papillomavirus 18
gccatctgtctgtatgtgtg

SEQ ID NO: 44918 - DNA, 20 bp, Human papillomavirus 18
ccatctgtctgtatgtgtgc

SEQ ID NO: 44919 - DNA, 20 bp, Human papillomavirus 18
gtatttgtgtatattgtggt

SEQ ID NO: 44920 - DNA, 20 bp, Human papillomavirus 18
gtgtatattgtggtaataac

SEQ ID NO: 44921 - DNA, 20 bp, Human papillomavirus 18
gagcctgtggacactacatt

SEQ ID NO: 44922 - DNA, 20 bp, Human papillomavirus 18
agcctgtggacactacatta

SEQ ID NO: 44923 - DNA, 20 bp, Human papillomavirus 18
acatttgatcctcgtagtga

SEQ ID NO: 44924 - DNA, 20 bp, Human papillomavirus 18
gatcctcgtagtgatgttcc

SEQ ID NO: 44925 - DNA, 20 bp, Human papillomavirus 18
atcctcgtagtgatgttcct

SEQ ID NO: 44926 - DNA, 20 bp, Human papillomavirus 18
tttgatatatatgcagatga

SEQ ID NO: 44927 - DNA, 20 bp, Human papillomavirus 18
gatatatatgcagatgacat

SEQ ID NO: 44928 - DNA, 20 bp, Human papillomavirus 18
atatatatgcagatgacatg

SEQ ID NO: 44929 - DNA, 20 bp, Human papillomavirus 18
tactacctcctttgcatttt

SEQ ID NO: 44930 - DNA, 20 bp, Human papillomavirus 18
aaaaaatgcaaaggaggtag

SEQ ID NO: 44931 - DNA, 20 bp, Human papillomavirus 18
taagcagacacagttatgta

SEQ ID NO: 44932 - DNA, 20 bp, Human papillomavirus 18
tgtattttgggctgtgcccc

SEQ ID NO: 44933 - DNA, 20 bp, Human papillomavirus 18
tgggctgtgcccctgctatt

SEQ ID NO: 44934 - DNA, 20 bp, Human papillomavirus 18
gggctgtgcccctgctattg

SEQ ID NO: 44935 - DNA, 20 bp, Human papillomavirus 18
ggctgtgcccctgctattgg

SEQ ID NO: 44936 - DNA, 20 bp, Human papillomavirus 18
cttacggcgtgagcagcttt

SEQ ID NO: 44937 - DNA, 20 bp, Human papillomavirus 18
cggcgtgagcagctttttgc

SEQ ID NO: 44938 - DNA, 20 bp, Human papillomavirus 18
ttgctaggcatttttggaat

SEQ ID NO: 44939 - DNA, 20 bp, Human papillomavirus 18
tgctaggcatttttggaata

SEQ ID NO: 44940 - DNA, 20 bp, Human papillomavirus 18
gctaggcatttttggaatag

SEQ ID NO: 44941 - DNA, 20 bp, Human papillomavirus 18
tttgttactgtggtagatac

SEQ ID NO: 44942 - DNA, 20 bp, Human papillomavirus 18
gttactgtggtagataccac

SEQ ID NO: 44943 - DNA, 20 bp, Human papillomavirus 18
ttactgtggtagataccact

SEQ ID NO: 44944 - DNA, 20 bp, Human papillomavirus 18
ctgtggtagataccactccc

SEQ ID NO: 44945 - DNA, 20 bp, Human papillomavirus 18
aacaatatgtgcttctacac

SEQ ID NO: 44946 - DNA, 20 bp, Human papillomavirus 18
cttgttgggctatatattgt

SEQ ID NO: 44947 - DNA, 20 bp, Human papillomavirus 18
ttgggctatatattgtcctg

SEQ ID NO: 44948 - DNA, 20 bp, Human papillomavirus 18
ggctatatattgtcctgtat

SEQ ID NO: 44949 - DNA, 20 bp, Human papillomavirus 18
tcctgtatttcaagttataa

SEQ ID NO: 44950 - DNA, 20 bp, Human papillomavirus 18
caagttataaaactgcacac

SEQ ID NO: 44951 - DNA, 20 bp, Influenza A virus
cttttcttaaaagtgccagc

SEQ ID NO: 44952 - DNA, 20 bp, Influenza A virus
tcttaaaagtgccagcacaa

SEQ ID NO: 44953 - DNA, 20 bp, Influenza A virus
cttaaaagtgccagcacaaa

SEQ ID NO: 44954 - DNA, 20 bp, Influenza A virus
ttaaaagtgccagcacaaaa

SEQ ID NO: 44955 - DNA, 20 bp, Influenza A virus
aaagtgccagcacaaaatgc

SEQ ID NO: 44956 - DNA, 20 bp, Influenza A virus
ccttgaggaatcccatcctg

SEQ ID NO: 44957 - DNA, 20 bp, Influenza A virus
cttgaggaatcccatcctgg

SEQ ID NO: 44958 - DNA, 20 bp, Influenza A virus
aggaatcccatcctggtatt

SEQ ID NO: 44959 - DNA, 20 bp, Influenza A virus
ttgaaaactcgtgtattgaa

SEQ ID NO: 44960 - DNA, 20 bp, Influenza A virus
tgaaaactcgtgtattgaaa

SEQ ID NO: 44961 - DNA, 20 bp, Influenza A virus
aacaatcagggttgccagtt

SEQ ID NO: 44962 - DNA, 20 bp, Influenza A virus
ccagttggaggcaatgagaa

SEQ ID NO: 44963 - DNA, 20 bp, Influenza A virus
gaggcaatgagaagaaagca

SEQ ID NO: 44964 - DNA, 20 bp, Influenza A virus
gcaaatgttgtaaggaagat

SEQ ID NO: 44965 - DNA, 20 bp, Influenza A virus
taaggaagatgatgaccaat

SEQ ID NO: 44966 - DNA, 20 bp, Influenza A virus
gacaaaagagatacaccaag

SEQ ID NO: 44967 - DNA, 20 bp, Influenza A virus
ctggtgggatggtcttcaat

SEQ ID NO: 44968 - DNA, 20 bp, Influenza A virus
aatcctctgacgattttgct

SEQ ID NO: 44969 - DNA, 20 bp, Influenza A virus
tgctctgattgtgaatgcac

SEQ ID NO: 44970 - DNA, 20 bp, Influenza A virus
gctctgattgtgaatgcacc

SEQ ID NO: 44971 - DNA, 20 bp, Influenza A virus
ccagttttggtgtgtctggg

SEQ ID NO: 44972 - DNA, 20 bp, Influenza A virus
tggtgtgtctgggagcaacg

SEQ ID NO: 44973 - DNA, 20 bp, Influenza A virus
ggtgtgtctgggagcaacga

SEQ ID NO: 44974 - DNA, 20 bp, Influenza A virus
gtgtgtctgggagcaacgag

SEQ ID NO: 44975 - DNA, 20 bp, Influenza A virus
gagttactgtcatcaaaaac

SEQ ID NO: 44976 - DNA, 20 bp, Influenza A virus
aagatgaacaaatgtaccaa

SEQ ID NO: 44977 - DNA, 20 bp, Influenza A virus
atttgaaaaattcttcccca

SEQ ID NO: 44978 - DNA, 20 bp, Influenza A virus
tttgaaaaattcttccccag

SEQ ID NO: 44979 - DNA, 20 bp, Influenza A virus
gaaaaattcttccccagcag

SEQ ID NO: 44980 - DNA, 20 bp, Influenza A virus
aaaaattcttccccagcagt

SEQ ID NO: 44981 - DNA, 20 bp, Hepatitis GB virus A
gggttcgtaggtggtaaatc

SEQ ID NO: 44982 - DNA, 20 bp, Hepatitis GB virus A
gtaggtggtaaatcccagca

SEQ ID NO: 44983 - DNA, 20 bp, Hepatitis GB virus A
ccacctgtgctgggatttac

SEQ ID NO: 44984 - DNA, 20 bp, Hepatitis GB virus A
accacctacgaaccctaaca

SEQ ID NO: 44985 - DNA, 20 bp, Hepatitis GB virus A
ccacctacgaaccctaacac

SEQ ID NO: 44986 - DNA, 20 bp, Hepatitis GB virus A
acaatgccagtggggggccg

SEQ ID NO: 44987 - DNA, 20 bp, Hepatitis GB virus A
ttgtgggctccgagttcctc

SEQ ID NO: 44988 - DNA, 20 bp, Hepatitis GB virus A
tgggctccgagttcctctag

SEQ ID NO: 44989 - DNA, 20 bp, Hepatitis GB virus A
ctctagggatggccgaaagg

SEQ ID NO: 44990 - DNA, 20 bp, Hepatitis GB virus A
cggccatccctagaggaact

SEQ ID NO: 44991 - DNA, 20 bp, Hepatitis GB virus A
ttgggaagtttggcggagcc

SEQ ID NO: 44992 - DNA, 20 bp, Hepatitis GB virus A
ggaagtttggcggagcctta

SEQ ID NO: 44993 - DNA, 20 bp, Hepatitis GB virus A
ggcggagccttaggcccggt

SEQ ID NO: 44994 - DNA, 20 bp, Hepatitis GB virus A
gcggagccttaggcccggtg

SEQ ID NO: 44995 - DNA, 20 bp, Hepatitis GB virus A
ggcccggtggcctcagctgc

SEQ ID NO: 44996 - DNA, 20 bp, Hepatitis GB virus A
cctactacttttagtggtgg

SEQ ID NO: 44997 - DNA, 20 bp, Hepatitis GB virus A
ctactacttttagtggtggg

SEQ ID NO: 44998 - DNA, 20 bp, Hepatitis GB virus A
tagtggtgggcgaggcacag

SEQ ID NO: 44999 - DNA, 20 bp, Hepatitis GB virus A
agtggtgggcgaggcacagg

SEQ ID NO: 45000 - DNA, 20 bp, Hepatitis GB virus A
gtggtgggcgaggcacaggg

SEQ ID NO: 45001 - DNA, 20 bp, Hepatitis GB virus A
ttggcacagtgtcggccgtt

SEQ ID NO: 45002 - DNA, 20 bp, Hepatitis GB virus A
gcacagtgtcggccgtttgc

SEQ ID NO: 45003 - DNA, 20 bp, Hepatitis GB virus A
gccagtggggctccgcgtac

SEQ ID NO: 45004 - DNA, 20 bp, Hepatitis GB virus A
ccagtggggctccgcgtact

SEQ ID NO: 45005 - DNA, 20 bp, Hepatitis GB virus A
ggcgactgggtgccattgta

SEQ ID NO: 45006 - DNA, 20 bp, Hepatitis GB virus A
tatggtgcagttaagaagct

SEQ ID NO: 45007 - DNA, 20 bp, Hepatitis GB virus A
atggtgcagttaagaagctt

SEQ ID NO: 45008 - DNA, 20 bp, Hepatitis GB virus A
tggtgcagttaagaagcttg

SEQ ID NO: 45009 - DNA, 20 bp, Hepatitis GB virus A
agaagcttggggtcaacatg

SEQ ID NO: 45010 - DNA, 20 bp, Hepatitis GB virus A
gggtcaacatgactgtgagc

SEQ ID NO: 45011 - DNA, 20 bp, Hepatitis GB virus A
gcttttgacttcccgggaga

SEQ ID NO: 45012 - DNA, 20 bp, Hepatitis GB virus A
tgacttcccgggagatcaca

SEQ ID NO: 45013 - DNA, 20 bp, Hepatitis GB virus A
gacttcccgggagatcacaa

SEQ ID NO: 45014 - DNA, 20 bp, Hepatitis GB virus A
acttcccgggagatcacaat

SEQ ID NO: 45015 - DNA, 20 bp, Hepatitis GB virus A
ccgggagatcacaatggatt

SEQ ID NO: 45016 - DNA, 20 bp, Hepatitis GB virus A
gccctgcccgaactcgacca

SEQ ID NO: 45017 - DNA, 20 bp, Hepatitis GB virus A
ccctgcccgaactcgaccac

SEQ ID NO: 45018 - DNA, 20 bp, Hepatitis GB virus A
ggtgattcagtcagtaacgc

SEQ ID NO: 45019 - DNA, 20 bp, Hepatitis GB virus A
agtcagtaacgccgcctgct

SEQ ID NO: 45020 - DNA, 20 bp, Hepatitis GB virus A
gctggttccgacttgtggct

SEQ ID NO: 45021 - DNA, 20 bp, Hepatitis GB virus A
tgtggtcgcttaccttgggg

SEQ ID NO: 45022 - DNA, 20 bp, Hepatitis GB virus A
ccttggggttctcggcactg

SEQ ID NO: 45023 - DNA, 20 bp, Hepatitis GB virus A
gggttctcggcactgccaga

SEQ ID NO: 45024 - DNA, 20 bp, Hepatitis GB virus A
tcggcactgccagatgctgc

SEQ ID NO: 45025 - DNA, 20 bp, Hepatitis GB virus A
gcaagaggtgcgctgcccct

SEQ ID NO: 45026 - DNA, 20 bp, Hepatitis GB virus A
gcctgcgcctgttggacact

SEQ ID NO: 45027 - DNA, 20 bp, Hepatitis GB virus A
gacactcccataggcaaccg

SEQ ID NO: 45028 - DNA, 20 bp, Hepatitis GB virus A
gtgcaaactgtggctggtgg

SEQ ID NO: 45029 - DNA, 20 bp, Hepatitis GB virus A
tgcaaactgtggctggtggc

SEQ ID NO: 45030 - DNA, 20 bp, Hepatitis GB virus A
gcacaaaggccggcgggggc

SEQ ID NO: 45031 - DNA, 20 bp, Hepatitis GB virus A
cgggaatggggttttgccct

SEQ ID NO: 45032 - DNA, 20 bp, Hepatitis GB virus A
tgccctagagcccgtcgctg

SEQ ID NO: 45033 - DNA, 20 bp, Hepatitis GB virus A
gccctagagcccgtcgctgt

SEQ ID NO: 45034 - DNA, 20 bp, Hepatitis GB virus A
ccctagagcccgtcgctgtg

SEQ ID NO: 45035 - DNA, 20 bp, Hepatitis GB virus A
gggatgccgcacgagtgttg

SEQ ID NO: 45036 - DNA, 20 bp, Hepatitis GB virus A
ccaatgggggctacctgctt

SEQ ID NO: 45037 - DNA, 20 bp, Hepatitis GB virus A
gaaccttgcaaatgctcacc

SEQ ID NO: 45038 - DNA, 20 bp, Hepatitis GB virus A
caaatgctcaccgcagggcg

SEQ ID NO: 45039 - DNA, 20 bp, Hepatitis GB virus A
gcaaggttccaagcaggtag

SEQ ID NO: 45040 - DNA, 20 bp, Hepatitis GB virus A
caaggttccaagcaggtagc

SEQ ID NO: 45041 - DNA, 20 bp, Hepatitis GB virus A
gcgtattgcatcgtggcaat

SEQ ID NO: 45042 - DNA, 20 bp, Hepatitis GB virus A
catcgtggcaatcgggtcac

SEQ ID NO: 45043 - DNA, 20 bp, Hepatitis GB virus A
ggagaccctccctagggagg

SEQ ID NO: 45044 - DNA, 20 bp, Hepatitis GB virus A
gtctgagcctccctagggag

SEQ ID NO: 45045 - DNA, 20 bp, Hepatitis GB virus A
gtatagcgtatcccagtgac

SEQ ID NO: 45046 - DNA, 20 bp, Hepatitis GB virus A
gtgttctgggcatgggacgt

SEQ ID NO: 45047 - DNA, 20 bp, Hepatitis GB virus A
tgggcatgggacgtgcccgg

SEQ ID NO: 45048 - DNA, 20 bp, Hepatitis GB virus A
ctggcgaaagaatgtcgggt

SEQ ID NO: 45049 - DNA, 20 bp, Hepatitis GB virus A
tttcgccagcaaccgggcac

SEQ ID NO: 45050 - DNA, 20 bp, Hepatitis GB virus A
cgccagcaaccgggcacgtc

SEQ ID NO: 45051 - DNA, 20 bp, Hepatitis GB virus A
tctgccactcaaaggttgag

SEQ ID NO: 45052 - DNA, 20 bp, Hepatitis GB virus A
ctgccactcaaaggttgagt

SEQ ID NO: 45053 - DNA, 20 bp, Hepatitis GB virus A
tgccactcaaaggttgagtg

SEQ ID NO: 45054 - DNA, 20 bp, Hepatitis GB virus A
agtgcgagaggacgtgcgca

SEQ ID NO: 45055 - DNA, 20 bp, Hepatitis GB virus A
ctacaggggcagggaaacag

SEQ ID NO: 45056 - DNA, 20 bp, Hepatitis GB virus A
ttactcaggtgggggggcca

SEQ ID NO: 45057 - DNA, 20 bp, Hepatitis GB virus A
ctcaggtgggggggccaact

SEQ ID NO: 45058 - DNA, 20 bp, Hepatitis GB virus A
gtgtgrccgagggttayacc

SEQ ID NO: 45059 - DNA, 20 bp, Hepatitis GB virus A
cggtagttggcccccccacc

SEQ ID NO: 45060 - DNA, 20 bp, Hepatitis GB virus A
gcccccccacctgagtaata

SEQ ID NO: 45061 - DNA, 20 bp, Hepatitis GB virus A
tccagttgtagtggtycccc

SEQ ID NO: 45062 - DNA, 20 bp, Hepatitis GB virus A
tagtggtycccccctgtgag

SEQ ID NO: 45063 - DNA, 20 bp, Hepatitis GB virus A
cgccaccggcttcacatcac

SEQ ID NO: 45064 - DNA, 20 bp, Hepatitis GB virus A
acatcacaggggtagcgctc

SEQ ID NO: 45065 - DNA, 20 bp, Hepatitis GB virus A
cctgctgggaatgtcagccg

SEQ ID NO: 45066 - DNA, 20 bp, Hepatitis GB virus A
ctgctgggaatgtcagccgg

SEQ ID NO: 45067 - DNA, 20 bp, Hepatitis GB virus A
ccagcaggaaagaggccgcc

SEQ ID NO: 45068 - DNA, 20 bp, Hepatitis GB virus A
ctcttagccccataggcagc

SEQ ID NO: 45069 - DNA, 20 bp, Hepatitis GB virus A
gccccataggcagctgtgya

SEQ ID NO: 45070 - DNA, 20 bp, Hepatitis GB virus A
tactctggagtgtcaagaag

SEQ ID NO: 45071 - DNA, 20 bp, Hepatitis GB virus A
ttgacactccagagtagaac

SEQ ID NO: 45072 - DNA, 20 bp, Hepatitis GB virus A
acactccagagtagaacgcc

SEQ ID NO: 45073 - DNA, 20 bp, Hepatitis GB virus A
aggaagatcaaaacaacctt

SEQ ID NO: 45074 - DNA, 20 bp, Hepatitis GB virus A
ccgcgcctcaaaatccctct

SEQ ID NO: 45075 - DNA, 20 bp, Hepatitis GB virus A
ccttcccagggtccggccca

SEQ ID NO: 45076 - DNA, 20 bp, Hepatitis GB virus A
ccagggtccggcccatcctt

SEQ ID NO: 45077 - DNA, 20 bp, Hepatitis GB virus A
gctgcaccccatcagaggga

SEQ ID NO: 45078 - DNA, 20 bp, Hepatitis GB virus A
aggcgttggtggtctctggc

SEQ ID NO: 45079 - DNA, 20 bp, Hepatitis GB virus A
gtggtctctggcacggttac

SEQ ID NO: 45080 - DNA, 20 bp, Hepatitis GB virus A
cggtgacggcgtctagcgcc

SEQ ID NO: 45081 - DNA, 20 bp, Hepatitis GB virus A
aacagcccgcctcacctcgg

SEQ ID NO: 45082 - DNA, 20 bp, Hepatitis GB virus A
acagcccgcctcacctcggc

SEQ ID NO: 45083 - DNA, 20 bp, Hepatitis GB virus A
caggctctggaggatgctgc

SEQ ID NO: 45084 - DNA, 20 bp, Hepatitis GB virus A
tgacaggcacatggggcagt

SEQ ID NO: 45085 - DNA, 20 bp, Hepatitis GB virus A
cgcagcctcttggctaggga

SEQ ID NO: 45086 - DNA, 20 bp, Hepatitis GB virus A
ccacccccctgacagacaca

SEQ ID NO: 45087 - DNA, 20 bp, Hepatitis GB virus A
agctggtgtgcaggagagaa

SEQ ID NO: 45088 - DNA, 20 bp, Hepatitis GB virus A
ccccgaccagacgtatgagt

SEQ ID NO: 45089 - DNA, 20 bp, Hepatitis GB virus A
tctcctgcacaccagctcaa

SEQ ID NO: 45090 - DNA, 20 bp, Hepatitis GB virus A
ctttgattcgtcaatcgacg

SEQ ID NO: 45091 - DNA, 20 bp, Hepatitis GB virus A
gattcgtcaatcgacgaaca

SEQ ID NO: 45092 - DNA, 20 bp, Hepatitis GB virus A
attcgtcaatcgacgaacat

SEQ ID NO: 45093 - DNA, 20 bp, Hepatitis GB virus A
gtcaatcgacgaacatgaca

SEQ ID NO: 45094 - DNA, 20 bp, Hepatitis GB virus A
gcggccgctagtgacgaccc

SEQ ID NO: 45095 - DNA, 20 bp, Hepatitis GB virus A
caggtgtgaccctgtcaagc

SEQ ID NO: 45096 - DNA, 20 bp, Hepatitis GB virus A
ggatacagctgagtgttgct

SEQ ID NO: 45097 - DNA, 20 bp, Hepatitis GB virus A
gatacagctgagtgttgctc

SEQ ID NO: 45098 - DNA, 20 bp, Hepatitis GB virus A
ctcggcctacttggctgaat

SEQ ID NO: 45099 - DNA, 20 bp, Hepatitis GB virus A
gctgaatgtgttgctggggg

SEQ ID NO: 45100 - DNA, 20 bp, Hepatitis GB virus A
cgcacgtgttgatcatggca

SEQ ID NO: 45101 - DNA, 20 bp, Hepatitis GB virus A
atcatggcataccgaagtgg

SEQ ID NO: 45102 - DNA, 20 bp, Hepatitis GB virus A
atcaccggatgagttggtga

SEQ ID NO: 45103 - DNA, 20 bp, Hepatitis GB virus A
gtgatgtgccaggtccaagg

SEQ ID NO: 45104 - DNA, 20 bp, Hepatitis GB virus A
ccttggacctggcacatcac

SEQ ID NO: 45105 - DNA, 20 bp, Human papillomavirus type 5
ggcatccctgtgattgattg

SEQ ID NO: 45106 - DNA, 20 bp, Human papillomavirus type 5
attgtttaataccttgcaat

SEQ ID NO: 45107 - DNA, 20 bp, Human papillomavirus type 5
tttaataccttgcaatttct

SEQ ID NO: 45108 - DNA, 20 bp, Human papillomavirus type 5
aataccttgcaatttctgtg

SEQ ID NO: 45109 - DNA, 20 bp, Human papillomavirus type 5
ataccttgcaatttctgtgg

SEQ ID NO: 45110 - DNA, 20 bp, Human papillomavirus type 5
cctttcataaggtgaggaac

SEQ ID NO: 45111 - DNA, 20 bp, Human papillomavirus type 5
cataaggtgaggaacgcctg

SEQ ID NO: 45112 - DNA, 20 bp, Human papillomavirus type 5
ataaggtgaggaacgcctgg

SEQ ID NO: 45113 - DNA, 20 bp, Human papillomavirus type 5
ttatcatgattggtaaagag

SEQ ID NO: 45114 - DNA, 20 bp, Human papillomavirus type 5
tatcatgattggtaaagagg

SEQ ID NO: 45115 - DNA, 20 bp, Human papillomavirus type 5
gttagatgatactgaactgg

SEQ ID NO: 45116 - DNA, 20 bp, Human papillomavirus type 5
ttagatgatactgaactgga

SEQ ID NO: 45117 - DNA, 20 bp, Human papillomavirus type 5
gatgatactgaactggagca

SEQ ID NO: 45118 - DNA, 20 bp, Human papillomavirus type 5
cctggaactatttcatcaac

SEQ ID NO: 45119 - DNA, 20 bp, Human papillomavirus type 5
catcaacaggagtgtgagca

SEQ ID NO: 45120 - DNA, 20 bp, Human papillomavirus type 5
actctcggccggatgacgag

SEQ ID NO: 45121 - DNA, 20 bp, Human papillomavirus type 5
aggggacgtagatatacatt

SEQ ID NO: 45122 - DNA, 20 bp, Human papillomavirus type 5
cactgcattgttgcgttcta

SEQ ID NO: 45123 - DNA, 20 bp, Human papillomavirus type 5
ttgcgttctagcaacaaaaa

SEQ ID NO: 45124 - DNA, 20 bp, Human papillomavirus type 5
cgttctagcaacaaaaaagc

SEQ ID NO: 45125 - DNA, 20 bp, Human papillomavirus type 5
caacagcattgtgactatat

SEQ ID NO: 45126 - DNA, 20 bp, Human papillomavirus type 5
tgactatatctgggtccgtg

SEQ ID NO: 45127 - DNA, 20 bp, Human papillomavirus type 5
tacctattgtgttttaaggc

SEQ ID NO: 45128 - DNA, 20 bp, Human papillomavirus type 5
tgttttaaggcgggaaaaaa

SEQ ID NO: 45129 - DNA, 20 bp, Human papillomavirus type 5
tttcccgccttaaaacacaa

SEQ ID NO: 45130 - DNA, 20 bp, Human papillomavirus type 5
cataatcacttattagacga

SEQ ID NO: 45131 - DNA, 20 bp, Human papillomavirus type 5
ataatcacttattagacgaa

SEQ ID NO: 45132 - DNA, 20 bp, Human papillomavirus type 5
ttagacgaagcagatatagc

SEQ ID NO: 45133 - DNA, 20 bp, Human papillomavirus type 5
gacgaagcagatatagcata

SEQ ID NO: 45134 - DNA, 20 bp, Human papillomavirus type 5
ctcccgaagacgcgaatgca

SEQ ID NO: 45135 - DNA, 20 bp, Human papillomavirus type 5
tggaaagtcatcatttgcaa

SEQ ID NO: 45136 - DNA, 20 bp, Human papillomavirus type 5
gcaatgtcattaataagagt

SEQ ID NO: 45137 - DNA, 20 bp, Human papillomavirus type 5
caatgtcattaataagagtg

SEQ ID NO: 45138 - DNA, 20 bp, Human papillomavirus type 5
ataagagtgttgaagggtag

SEQ ID NO: 45139 - DNA, 20 bp, Human papillomavirus type 5
aagggtagagtgttgtcatt

SEQ ID NO: 45140 - DNA, 20 bp, Human papillomavirus type 5
gaactaactgaccaaagctg

SEQ ID NO: 45141 - DNA, 20 bp, Human papillomavirus type 5
ttttacaaggctttggacac

SEQ ID NO: 45142 - DNA, 20 bp, Human papillomavirus type 5
tttacaaggctttggacaca

SEQ ID NO: 45143 - DNA, 20 bp, Human papillomavirus type 5
ttacaaggctttggacacaa

SEQ ID NO: 45144 - DNA, 20 bp, Human papillomavirus type 5
tacaaggctttggacacaat

SEQ ID NO: 45145 - DNA, 20 bp, Human papillomavirus type 5
actccacgtccagacagctc

SEQ ID NO: 45146 - DNA, 20 bp, Human papillomavirus type 5
tgatgtggtgagctgtctgg

SEQ ID NO: 45147 - DNA, 20 bp, Human papillomavirus type 5
gatgtggtgagctgtctgga

SEQ ID NO: 45148 - DNA, 20 bp, Human papillomavirus type 5
atgtggtgagctgtctggac

SEQ ID NO: 45149 - DNA, 20 bp, Human papillomavirus type 5
tggaggtggtgggggtcgcg

SEQ ID NO: 45150 - DNA, 20 bp, Human papillomavirus type 5
atcgccgcctgggtgacctt

SEQ ID NO: 45151 - DNA, 20 bp, Human papillomavirus type 5
cacctccccttctgcaggtg

SEQ ID NO: 45152 - DNA, 20 bp, Human papillomavirus type 5
tgcaggtggttggggacctt

SEQ ID NO: 45153 - DNA, 20 bp, Human papillomavirus type 5
gggaccttcctctggatcgc

SEQ ID NO: 45154 - DNA, 20 bp, Human papillomavirus type 5
gttcaaagcatacaggacga

SEQ ID NO: 45155 - DNA, 20 bp, Human papillomavirus type 5
aaagcatacaggacgacttg

SEQ ID NO: 45156 - DNA, 20 bp, Human papillomavirus type 5
gaagattactggaagaagct

SEQ ID NO: 45157 - DNA, 20 bp, Human papillomavirus type 5
ctggaagaagctcgcgaccc

SEQ ID NO: 45158 - DNA, 20 bp, Human papillomavirus type 5
tcaaaggggcggctaacaca

SEQ ID NO: 45159 - DNA, 20 bp, Human papillomavirus type 5
ataaggcctatggcaacctg

SEQ ID NO: 45160 - DNA, 20 bp, Human papillomavirus type 5
aacatttactaatgctgctt

SEQ ID NO: 45161 - DNA, 20 bp, Human papillomavirus type 5
acatttactaatgctgcttt

SEQ ID NO: 45162 - DNA, 20 bp, Human papillomavirus type 5
actaatgctgcttttgctac

SEQ ID NO: 45163 - DNA, 20 bp, Human papillomavirus type 5
ctaatgctgcttttgctact

SEQ ID NO: 45164 - DNA, 20 bp, Human papillomavirus type 5
acttccaggtgaagtagaaa

SEQ ID NO: 45165 - DNA, 20 bp, Human papillomavirus type 5
cttccaggtgaagtagaaac

SEQ ID NO: 45166 - DNA, 20 bp, Human papillomavirus type 5
caggtgaagtagaaacaatt

SEQ ID NO: 45167 - DNA, 20 bp, Human papillomavirus type 5
ctgaaatccatcctgtacct

SEQ ID NO: 45168 - DNA, 20 bp, Human papillomavirus type 5
ccactagcacaggttccagt

SEQ ID NO: 45169 - DNA, 20 bp, Human papillomavirus type 5
ttgaggaagaagtgactaat

SEQ ID NO: 45170 - DNA, 20 bp, Human papillomavirus type 5
tgaggaagaagtgactaata

SEQ ID NO: 45171 - DNA, 20 bp, Human papillomavirus type 5
gaggaagaagtgactaatat

SEQ ID NO: 45172 - DNA, 20 bp, Human papillomavirus type 5
aggaagaagtgactaatata

SEQ ID NO: 45173 - DNA, 20 bp, Human papillomavirus type 5
gaaaatgatctggatgtctt

SEQ ID NO: 45174 - DNA, 20 bp, Human papillomavirus type 5
tgttgcatatccagagtcac

SEQ ID NO: 45175 - DNA, 20 bp, Human papillomavirus type 5
catatccagagtcacgtaat

SEQ ID NO: 45176 - DNA, 20 bp, Human papillomavirus type 5
atcctacacctgatattcct

SEQ ID NO: 45177 - DNA, 20 bp, Human papillomavirus type 5
tcctacacctgatattcctg

SEQ ID NO: 45178 - DNA, 20 bp, Human papillomavirus type 5
ctgtagtcattatacaccct

SEQ ID NO: 45179 - DNA, 20 bp, Human papillomavirus type 5
tctaaagatgacagacagga

SEQ ID NO: 45180 - DNA, 20 bp, Human papillomavirus type 5
ctaaagatgacagacaggat

SEQ ID NO: 45181 - DNA, 20 bp, Human papillomavirus type 5
taaagatgacagacaggata

SEQ ID NO: 45182 - DNA, 20 bp, Human papillomavirus type 5
tgatcctaaacagatccaaa

SEQ ID NO: 45183 - DNA, 20 bp, Human papillomavirus type 5
gatcctaaacagatccaaat

SEQ ID NO: 45184 - DNA, 20 bp, Human papillomavirus type 5
catgtatttcccaactgtta

SEQ ID NO: 45185 - DNA, 20 bp, Human papillomavirus type 5
cccaactgttagtggctcat

SEQ ID NO: 45186 - DNA, 20 bp, Human papillomavirus type 5
ccaactgttagtggctcatt

SEQ ID NO: 45187 - DNA, 20 bp, Human papillomavirus type 5
gtggctcattagtatccagt

SEQ ID NO: 45188 - DNA, 20 bp, Human papillomavirus type 5
gtatccagtgatgctcaatt

SEQ ID NO: 45189 - DNA, 20 bp, Human papillomavirus type 5
acggtacaaaagcagtgtct

SEQ ID NO: 45190 - DNA, 20 bp, Human papillomavirus type 5
taaagggtctaatagaggaa

SEQ ID NO: 45191 - DNA, 20 bp, Human papillomavirus type 5
aggtctgaccgaaagtggta

SEQ ID NO: 45192 - DNA, 20 bp, Human papillomavirus type 5
ataaaaatgtaccactttcg

SEQ ID NO: 45193 - DNA, 20 bp, Human papillomavirus type 5
taaaaatgtaccactttcgg

SEQ ID NO: 45194 - DNA, 20 bp, Influenza A virus
ccatcttagcaacgactatg

SEQ ID NO: 45195 - DNA, 20 bp, Influenza A virus
gcaacgactatgacactaca

SEQ ID NO: 45196 - DNA, 20 bp, Influenza A virus
caatgaatgtaccaacccat

SEQ ID NO: 45197 - DNA, 20 bp, Influenza A virus
aatgaatgtaccaacccatc

SEQ ID NO: 45198 - DNA, 20 bp, Influenza A virus
ctattatgattggttcacat

SEQ ID NO: 45199 - DNA, 20 bp, Influenza A virus
ggctttctgcaggcggggat

SEQ ID NO: 45200 - DNA, 20 bp, Influenza A virus
ctgcaggcggggatatttgg

SEQ ID NO: 45201 - DNA, 20 bp, Influenza A virus
tgcaggcggggatatttggg

SEQ ID NO: 45202 - DNA, 20 bp, Influenza A virus
gggtgacaagagaaccttat

SEQ ID NO: 45203 - DNA, 20 bp, Influenza A virus
ggtgacaagagaaccttatg

SEQ ID NO: 45204 - DNA, 20 bp, Influenza A virus
catgtttgtgtcactgggga

SEQ ID NO: 45205 - DNA, 20 bp, Influenza A virus
gtgtcactggggatgataga

SEQ ID NO: 45206 - DNA, 20 bp, Influenza A virus
tgtcactggggatgatagaa

SEQ ID NO: 45207 - DNA, 20 bp, Influenza A virus
atgatgggatgcttaccgac

SEQ ID NO: 45208 - DNA, 20 bp, Influenza A virus
tgatgggatgcttaccgaca

SEQ ID NO: 45209 - DNA, 20 bp, Influenza A virus
cccccggtatccagaagtta

SEQ ID NO: 45210 - DNA, 20 bp, Influenza A virus
gatgtgtttgcagagacaat

SEQ ID NO: 45211 - DNA, 20 bp, Influenza A virus
gcagagacaattggaagggc

SEQ ID NO: 45212 - DNA, 20 bp, Influenza A virus
cagagacaattggaagggct

SEQ ID NO: 45213 - DNA, 20 bp, Influenza A virus
gagcccttccaattgtctct

SEQ ID NO: 45214 - DNA, 20 bp, Influenza A virus
ggatgggacgaacaatcaag

SEQ ID NO: 45215 - DNA, 20 bp, Influenza A virus
gatgggacgaacaatcaaga

SEQ ID NO: 45216 - DNA, 20 bp, Influenza A virus
gcgctctggttatgagactt

SEQ ID NO: 45217 - DNA, 20 bp, Influenza A virus
tgagactttcagggtcgttg

SEQ ID NO: 45218 - DNA, 20 bp, Influenza A virus
cagggtcgttggtggttgga

SEQ ID NO: 45219 - DNA, 20 bp, Influenza B virus
acagtataaataccggaaca

SEQ ID NO: 45220 - DNA, 20 bp, Influenza B virus
ctggcttgatgattggtctg

SEQ ID NO: 45221 - DNA, 20 bp, Influenza B virus
atgattggtctggttgcccc

SEQ ID NO: 45222 - DNA, 20 bp, Influenza B virus
gtctggttgccccactggtt

SEQ ID NO: 45223 - DNA, 20 bp, Influenza B virus
ccccactggttccgggagtc

SEQ ID NO: 45224 - DNA, 20 bp, Influenza B virus
tacaaccagatgatggtcaa

SEQ ID NO: 45225 - DNA, 20 bp, Influenza B virus
atgatgacatggaaaggaat

SEQ ID NO: 45226 - DNA, 20 bp, Influenza B virus
aaaatgcacaagctgtggag

SEQ ID NO: 45227 - DNA, 20 bp, Influenza B virus
cagccaataggattctctcc

SEQ ID NO: 45228 - DNA, 20 bp, Influenza B virus
tctccacagcttgtgcattt

SEQ ID NO: 45229 - DNA, 20 bp, Influenza B virus
cattgggaagaaaatgtttc

SEQ ID NO: 45230 - DNA, 20 bp, Influenza B virus
attgggaagaaaatgtttca

SEQ ID NO: 45231 - DNA, 20 bp, Influenza B virus
ggaagaaaatgtttcaaata

SEQ ID NO: 45232 - DNA, 20 bp, Influenza B virus
caaatatcagacaaaaacaa

SEQ ID NO: 45233 - DNA, 20 bp, Influenza B virus
aaatatcagacaaaaacaaa

SEQ ID NO: 45234 - DNA, 20 bp, Human papillomavirus type 172
caccctaagaaactatgcac

SEQ ID NO: 45235 - DNA, 20 bp, Human papillomavirus type 172
cggtcatggaatttatctct

SEQ ID NO: 45236 - DNA, 20 bp, Human papillomavirus type 172
ggtcatggaatttatctctc

SEQ ID NO: 45237 - DNA, 20 bp, Human papillomavirus type 172
atctctcctatcattgttgg

SEQ ID NO: 45238 - DNA, 20 bp, Human papillomavirus type 172
tctctcctatcattgttggc

SEQ ID NO: 45239 - DNA, 20 bp, Human papillomavirus type 172
ctgtttaattcgttgtcatt

SEQ ID NO: 45240 - DNA, 20 bp, Human papillomavirus type 172
tgtttaattcgttgtcattg

SEQ ID NO: 45241 - DNA, 20 bp, Human papillomavirus type 172
aattcgttgtcattggagaa

SEQ ID NO: 45242 - DNA, 20 bp, Human papillomavirus type 172
attcgttgtcattggagaaa

SEQ ID NO: 45243 - DNA, 20 bp, Human papillomavirus type 172
gttgtcattggagaaattgc

SEQ ID NO: 45244 - DNA, 20 bp, Human papillomavirus type 172
tagcatcaagattatcaatc

SEQ ID NO: 45245 - DNA, 20 bp, Human papillomavirus type 172
tcaatccttacatttgagca

SEQ ID NO: 45246 - DNA, 20 bp, Human papillomavirus type 172
catttgagcaattattgatt

SEQ ID NO: 45247 - DNA, 20 bp, Human papillomavirus type 172
gagcaattattgattggaga

SEQ ID NO: 45248 - DNA, 20 bp, Human papillomavirus type 172
agcaattattgattggagag

SEQ ID NO: 45249 - DNA, 20 bp, Human papillomavirus type 172
atagatgaggttgactgcag

SEQ ID NO: 45250 - DNA, 20 bp, Human papillomavirus type 172
actgcagccagggaaattcc

SEQ ID NO: 45251 - DNA, 20 bp, Human papillomavirus type 172
cctggcattgtttaatgaac

SEQ ID NO: 45252 - DNA, 20 bp, Human papillomavirus type 172
tttaatgaacatgaaacgga

SEQ ID NO: 45253 - DNA, 20 bp, Human papillomavirus type 172
aatgaacatgaaacggagga

SEQ ID NO: 45254 - DNA, 20 bp, Human papillomavirus type 172
gatttgagtcagatggttca

SEQ ID NO: 45255 - DNA, 20 bp, Human papillomavirus type 172
atttgagtcagatggttcag

SEQ ID NO: 45256 - DNA, 20 bp, Human papillomavirus type 172
gagtcagatggttcagtttt

SEQ ID NO: 45257 - DNA, 20 bp, Human papillomavirus type 172
agtcagatggttcagttttg

SEQ ID NO: 45258 - DNA, 20 bp, Human papillomavirus type 172
agttttgttatgataacaat

SEQ ID NO: 45259 - DNA, 20 bp, Human papillomavirus type 172
caaccattattggatggaaa

SEQ ID NO: 45260 - DNA, 20 bp, Human papillomavirus type 172
ttggatggaaaaatgggatt

SEQ ID NO: 45261 - DNA, 20 bp, Human papillomavirus type 172
gatggaaaaatgggatttat

SEQ ID NO: 45262 - DNA, 20 bp, Human papillomavirus type 172
atagatgatgtaacctatcc

SEQ ID NO: 45263 - DNA, 20 bp, Human papillomavirus type 172
tagatgatgtaacctatcct

SEQ ID NO: 45264 - DNA, 20 bp, Human papillomavirus type 172
ttttagaaaacttgggaatc

SEQ ID NO: 45265 - DNA, 20 bp, Human papillomavirus type 172
tttagaaaacttgggaatca

SEQ ID NO: 45266 - DNA, 20 bp, Human papillomavirus type 172
ttagaaaacttgggaatcaa

SEQ ID NO: 45267 - DNA, 20 bp, Human papillomavirus type 172
tagaaaacttgggaatcaaa

SEQ ID NO: 45268 - DNA, 20 bp, Human papillomavirus type 172
agaaaacttgggaatcaaat

SEQ ID NO: 45269 - DNA, 20 bp, Human papillomavirus type 172
ccgtaccgcaaaccccaaga

SEQ ID NO: 45270 - DNA, 20 bp, Human papillomavirus type 172
agctagctcctccctcttcg

SEQ ID NO: 45271 - DNA, 20 bp, Human papillomavirus type 172
gcctttttgtcgtcttgggg

SEQ ID NO: 45272 - DNA, 20 bp, Human papillomavirus type 172
ttgtcgtcttggggtttgcg

SEQ ID NO: 45273 - DNA, 20 bp, Human papillomavirus type 172
tgtcgtcttggggtttgcgg

SEQ ID NO: 45274 - DNA, 20 bp, Human papillomavirus type 172
taacagacaccacatcaata

SEQ ID NO: 45275 - DNA, 20 bp, Human papillomavirus type 172
caatctccagaaaatggggt

SEQ ID NO: 45276 - DNA, 20 bp, Human papillomavirus type 172
aatctccagaaaatggggtt

SEQ ID NO: 45277 - DNA, 20 bp, Human papillomavirus type 172
caattttaaatgttacacct

SEQ ID NO: 45278 - DNA, 20 bp, Human papillomavirus type 172
taaatgttacacctgcagat

SEQ ID NO: 45279 - DNA, 20 bp, Human papillomavirus type 172
gaaccaataaatccagtgca

SEQ ID NO: 45280 - DNA, 20 bp, Human papillomavirus type 172
caaattgaggacttaccaac

SEQ ID NO: 45281 - DNA, 20 bp, Human papillomavirus type 172
aaattgaggacttaccaact

SEQ ID NO: 45282 - DNA, 20 bp, Human papillomavirus type 172
aggacttaccaactactagc

SEQ ID NO: 45283 - DNA, 20 bp, Human papillomavirus type 172
ccaactactagcacccctat

SEQ ID NO: 45284 - DNA, 20 bp, Human papillomavirus type 172
taatgattttataatacatc

SEQ ID NO: 45285 - DNA, 20 bp, Human papillomavirus type 172
tataatacatcctagtgtac

SEQ ID NO: 45286 - DNA, 20 bp, Human papillomavirus type 172
ataatacatcctagtgtact

SEQ ID NO: 45287 - DNA, 20 bp, Human papillomavirus type 172
taatacatcctagtgtactg

SEQ ID NO: 45288 - DNA, 20 bp, Human papillomavirus type 172
tttctaatttttttcagatg

SEQ ID NO: 45289 - DNA, 20 bp, Human papillomavirus type 172
caaaggtttctgccaatcag

SEQ ID NO: 45290 - DNA, 20 bp, Human papillomavirus type 172
ctgccaatcagtacagggtt

SEQ ID NO: 45291 - DNA, 20 bp, Human papillomavirus type 172
tgccaatcagtacagggtta

SEQ ID NO: 45292 - DNA, 20 bp, Human papillomavirus type 172
ttagactacaatttccagat

SEQ ID NO: 45293 - DNA, 20 bp, Human papillomavirus type 172
gactacaatttccagatcca

SEQ ID NO: 45294 - DNA, 20 bp, Human papillomavirus type 172
tagacaggatatggcatttg

SEQ ID NO: 45295 - DNA, 20 bp, Human papillomavirus type 172
gaccctaaacaggttcaaat

SEQ ID NO: 45296 - DNA, 20 bp, Human papillomavirus type 172
accctaaacaggttcaaatg

SEQ ID NO: 45297 - DNA, 20 bp, Human papillomavirus type 172
aaatgtgtattgtgggctgc

SEQ ID NO: 45298 - DNA, 20 bp, Human papillomavirus type 172
gaacctgtttagggtcaaat

SEQ ID NO: 45299 - DNA, 20 bp, Human papillomavirus type 172
taatcaagacagagccagtg

SEQ ID NO: 45300 - DNA, 20 bp, Human papillomavirus type 172
aatcaagacagagccagtgt

SEQ ID NO: 45301 - DNA, 20 bp, Human papillomavirus type 172
atcaagacagagccagtgta

SEQ ID NO: 45302 - DNA, 20 bp, Human papillomavirus type 172
agagcttacgaatgaaatca

SEQ ID NO: 45303 - DNA, 20 bp, Human papillomavirus type 172
gagcttacgaatgaaatcag

SEQ ID NO: 45304 - DNA, 20 bp, Human papillomavirus type 172
aatcgcccatattttttaca

SEQ ID NO: 45305 - DNA, 20 bp, Human papillomavirus type 172
tttacatagggcattaggag

SEQ ID NO: 45306 - DNA, 20 bp, Human papillomavirus type 172
ttacatagggcattaggagc

SEQ ID NO: 45307 - DNA, 20 bp, Human papillomavirus type 172
tacatagggcattaggagcc

SEQ ID NO: 45308 - DNA, 20 bp, Human papillomavirus type 172
acatagggcattaggagcca

SEQ ID NO: 45309 - DNA, 20 bp, Human papillomavirus type 172
tctcagacaccattgggtaa

SEQ ID NO: 45310 - DNA, 20 bp, Human papillomavirus type 172
ggtaaacgatttttgtatca

SEQ ID NO: 45311 - DNA, 20 bp, Human papillomavirus type 172
ttgtatcaaagaggacagct

SEQ ID NO: 45312 - DNA, 20 bp, Human papillomavirus type 172
tgtatcaaagaggacagcta

SEQ ID NO: 45313 - DNA, 20 bp, Human papillomavirus type 172
gtatcaaagaggacagctag

SEQ ID NO: 45314 - DNA, 20 bp, Influenza A virus
ctaaaggttccagcgcaaaa

SEQ ID NO: 45315 - DNA, 20 bp, Influenza A virus
cagcgcaaaatgccataagc

SEQ ID NO: 45316 - DNA, 20 bp, Influenza A virus
ccttatactggagatcctcc

SEQ ID NO: 45317 - DNA, 20 bp, Influenza A virus
tactggagatcctccataca

SEQ ID NO: 45318 - DNA, 20 bp, Influenza A virus
ctgttccatggctgtatgga

SEQ ID NO: 45319 - DNA, 20 bp, Influenza A virus
cttgaagaatcccacccagg

SEQ ID NO: 45320 - DNA, 20 bp, Influenza A virus
aagaatcccacccaggtatc

SEQ ID NO: 45321 - DNA, 20 bp, Influenza A virus
gagaactcatgccttgaaac

SEQ ID NO: 45322 - DNA, 20 bp, Influenza A virus
agaactcatgccttgaaaca

SEQ ID NO: 45323 - DNA, 20 bp, Influenza A virus
aaacaatggaagtcgttcaa

SEQ ID NO: 45324 - DNA, 20 bp, Influenza A virus
caaagaaaaaggagagtaag

SEQ ID NO: 45325 - DNA, 20 bp, Influenza A virus
aaagaaaaaggagagtaaga

SEQ ID NO: 45326 - DNA, 20 bp, Influenza A virus
ttcactctttgttttttctt

SEQ ID NO: 45327 - DNA, 20 bp, Influenza A virus
actctttgttttttcttccc

SEQ ID NO: 45328 - DNA, 20 bp, Influenza A virus
gttttttcttccctattgtt

SEQ ID NO: 45329 - DNA, 20 bp, Influenza A virus
gcgaaaagcttgaacagtct

SEQ ID NO: 45330 - DNA, 20 bp, Influenza A virus
cgaaaagcttgaacagtctg

SEQ ID NO: 45331 - DNA, 20 bp, Influenza A virus
aacagtctggacttccggtt

SEQ ID NO: 45332 - DNA, 20 bp, Influenza A virus
cggttgggggtaatgaaaag

SEQ ID NO: 45333 - DNA, 20 bp, Influenza A virus
ggggtaatgaaaagaaggcc

SEQ ID NO: 45334 - DNA, 20 bp, Influenza A virus
tcaaacaaaatggcaagact

SEQ ID NO: 45335 - DNA, 20 bp, Influenza A virus
gagagtaagagaatgaagct

SEQ ID NO: 45336 - DNA, 20 bp, Influenza A virus
ctagcatttctgcgggtatt

SEQ ID NO: 45337 - DNA, 20 bp, Influenza A virus
ctgcgggtatttgtgttcgg

SEQ ID NO: 45338 - DNA, 20 bp, Influenza A virus
tgcgggtatttgtgttcgga

SEQ ID NO: 45339 - DNA, 20 bp, Influenza A virus
ggcaaaagaaatacaccaag

SEQ ID NO: 45340 - DNA, 20 bp, Influenza A virus
tgccctcatagtgaatgcac

SEQ ID NO: 45341 - DNA, 20 bp, Influenza A virus
gccctcatagtgaatgcacc

SEQ ID NO: 45342 - DNA, 20 bp, Influenza A virus
ccctcatagtgaatgcacca

SEQ ID NO: 45343 - DNA, 20 bp, Influenza A virus
tattccctcatgatttggtg

SEQ ID NO: 45344 - DNA, 20 bp, Influenza A virus
gagtaacagtgataaagaac

SEQ ID NO: 45345 - DNA, 20 bp, Influenza A virus
ggccagcaacagcccagatg

SEQ ID NO: 45346 - DNA, 20 bp, Influenza A virus
ttcatcaaagactacagata

SEQ ID NO: 45347 - DNA, 20 bp, Influenza A virus
atcaaagactacagatatac

SEQ ID NO: 45348 - DNA, 20 bp, Influenza A virus
gatgaacaattggagagcca

SEQ ID NO: 45349 - DNA, 20 bp, Influenza A virus
gtatcagatgggggaccaaa

SEQ ID NO: 45350 - DNA, 20 bp, Influenza A virus
tacaatatccggaaccttca

SEQ ID NO: 45351 - DNA, 20 bp, Influenza A virus
acatccctgaagtctgctta

SEQ ID NO: 45352 - DNA, 20 bp, Influenza A virus
aagtgggagctaatggatga

SEQ ID NO: 45353 - DNA, 20 bp, Influenza A virus
cccgataattctcatccatt

SEQ ID NO: 45354 - DNA, 20 bp, Influenza A virus
aggatgaacagatgtaccaa

SEQ ID NO: 45355 - DNA, 20 bp, Influenza A virus
ttcgagaaatttttccctag

SEQ ID NO: 45356 - DNA, 20 bp, Influenza A virus
gagaaatttttccctagtag

SEQ ID NO: 45357 - DNA, 20 bp, Influenza A virus
ttccctagtagttcatatag

SEQ ID NO: 45358 - DNA, 20 bp, Influenza A virus
tccctagtagttcatatagg

SEQ ID NO: 45359 - DNA, 20 bp, Human papillomavirus type 50
gaaggagactgatggagcct

SEQ ID NO: 45360 - DNA, 20 bp, Human papillomavirus type 50
aaggagactgatggagcctc

SEQ ID NO: 45361 - DNA, 20 bp, Human papillomavirus type 50
ggtggactattgcaagcaac

SEQ ID NO: 45362 - DNA, 20 bp, Human papillomavirus type 50
gtggactattgcaagcaaca

SEQ ID NO: 45363 - DNA, 20 bp, Human papillomavirus type 50
caagcaacaacagattagtt

SEQ ID NO: 45364 - DNA, 20 bp, Human papillomavirus type 50
ttttgcctgtgaatttgctt

SEQ ID NO: 45365 - DNA, 20 bp, Human papillomavirus type 50
tgcctgtgaatttgcttagt

SEQ ID NO: 45366 - DNA, 20 bp, Human papillomavirus type 50
gcctgtgaatttgcttagtg

SEQ ID NO: 45367 - DNA, 20 bp, Human papillomavirus type 50
cctgtgaatttgcttagtga

SEQ ID NO: 45368 - DNA, 20 bp, Human papillomavirus type 50
gcttagtgacgaatctattg

SEQ ID NO: 45369 - DNA, 20 bp, Human papillomavirus type 50
gagtccgagactttcagcgg

SEQ ID NO: 45370 - DNA, 20 bp, Human papillomavirus type 50
agtccgagactttcagcggt

SEQ ID NO: 45371 - DNA, 20 bp, Human papillomavirus type 50
cagcggtgcatataacacca

SEQ ID NO: 45372 - DNA, 20 bp, Human papillomavirus type 50
agcggtgcatataacaccag

SEQ ID NO: 45373 - DNA, 20 bp, Human papillomavirus type 50
tggattgtctttctggtgtt

SEQ ID NO: 45374 - DNA, 20 bp, Human papillomavirus type 50
tatttaaaaacaaaactatt

SEQ ID NO: 45375 - DNA, 20 bp, Human papillomavirus type 50
aaaaacaaaactattcattc

SEQ ID NO: 45376 - DNA, 20 bp, Human papillomavirus type 50
aaaacaaaactattcattcc

SEQ ID NO: 45377 - DNA, 20 bp, Human papillomavirus type 50
attcctctgtcactagctcc

SEQ ID NO: 45378 - DNA, 20 bp, Human papillomavirus type 50
ctctgtcactagctcctcaa

SEQ ID NO: 45379 - DNA, 20 bp, Human papillomavirus type 50
ggcccaaaatcagagggata

SEQ ID NO: 45380 - DNA, 20 bp, Human papillomavirus type 50
cttattgcttttaaaaatcc

SEQ ID NO: 45381 - DNA, 20 bp, Human papillomavirus type 50
ttgcttttaaaaatcctgaa

SEQ ID NO: 45382 - DNA, 20 bp, Human papillomavirus type 50
cttttaaaaatcctgaacaa

SEQ ID NO: 45383 - DNA, 20 bp, Human papillomavirus type 50
taaaaatcctgaacaaaggc

SEQ ID NO: 45384 - DNA, 20 bp, Human papillomavirus type 50
gttattgaaaatatttggag

SEQ ID NO: 45385 - DNA, 20 bp, Human papillomavirus type 50
ttgaaaatatttggaggttt

SEQ ID NO: 45386 - DNA, 20 bp, Human papillomavirus type 50
aaaatatttggaggtttagt

SEQ ID NO: 45387 - DNA, 20 bp, Human papillomavirus type 50
ggaggtttagtatactttgg

SEQ ID NO: 45388 - DNA, 20 bp, Human papillomavirus type 50
gaggtttagtatactttggc

SEQ ID NO: 45389 - DNA, 20 bp, Human papillomavirus type 50
gatttgcagctccagatgct

SEQ ID NO: 45390 - DNA, 20 bp, Human papillomavirus type 50
gcagctccagatgctggacc

SEQ ID NO: 45391 - DNA, 20 bp, Human papillomavirus type 50
cagctccagatgctggacct

SEQ ID NO: 45392 - DNA, 20 bp, Human papillomavirus type 50
aattatatactataacaaat

SEQ ID NO: 45393 - DNA, 20 bp, Human papillomavirus type 50
tatactataacaaattccac

SEQ ID NO: 45394 - DNA, 20 bp, Human papillomavirus type 50
gcaggagacactgtaggtga

SEQ ID NO: 45395 - DNA, 20 bp, Human papillomavirus type 50
caggagacactgtaggtgac

SEQ ID NO: 45396 - DNA, 20 bp, Human papillomavirus type 50
tatgaagagatacctttgga

SEQ ID NO: 45397 - DNA, 20 bp, Human papillomavirus type 50
atgaagagatacctttggaa

SEQ ID NO: 45398 - DNA, 20 bp, Human papillomavirus type 50
tgaagagatacctttggaac

SEQ ID NO: 45399 - DNA, 20 bp, Human papillomavirus type 50
gacccagatgtgagcctata

SEQ ID NO: 45400 - DNA, 20 bp, Human papillomavirus type 50
acccagatgtgagcctatac

SEQ ID NO: 45401 - DNA, 20 bp, Human papillomavirus type 50
gagcgggatttggaaggcct

SEQ ID NO: 45402 - DNA, 20 bp, Human papillomavirus type 50
agcgggatttggaaggcctc

SEQ ID NO: 45403 - DNA, 20 bp, Human papillomavirus type 50
ggaaggcctcagggcagcgc

SEQ ID NO: 45404 - DNA, 20 bp, Human papillomavirus type 50
taagcaccgatgaatatgtg

SEQ ID NO: 45405 - DNA, 20 bp, Human papillomavirus type 50
aagcaccgatgaatatgtga

SEQ ID NO: 45406 - DNA, 20 bp, Human papillomavirus type 50
agcaccgatgaatatgtgaa

SEQ ID NO: 45407 - DNA, 20 bp, Human papillomavirus type 50
actttcatgcacgcagtgag

SEQ ID NO: 45408 - DNA, 20 bp, Human papillomavirus type 50
ctttcatgcacgcagtgagc

SEQ ID NO: 45409 - DNA, 20 bp, Human papillomavirus type 50
aggtgttggatctactggtc

SEQ ID NO: 45410 - DNA, 20 bp, Human papillomavirus type 50
ggtgttggatctactggtca

SEQ ID NO: 45411 - DNA, 20 bp, Human papillomavirus type 50
gatctactggtcatcccttg

SEQ ID NO: 45412 - DNA, 20 bp, Human papillomavirus type 50
tttaataaggttggagacac

SEQ ID NO: 45413 - DNA, 20 bp, Human papillomavirus type 50
aataaggttggagacacaga

SEQ ID NO: 45414 - DNA, 20 bp, Human papillomavirus type 50
tattcaggatggtgatatgg

SEQ ID NO: 45415 - DNA, 20 bp, Human papillomavirus type 50
aggatggtgatatgggagat

SEQ ID NO: 45416 - DNA, 20 bp, Human papillomavirus type 50
ggtaatgcaaactttcctaa

SEQ ID NO: 45417 - DNA, 20 bp, Human papillomavirus type 50
gtaatgcaaactttcctaaa

SEQ ID NO: 45418 - DNA, 20 bp, Human papillomavirus type 50
cctaaactacaacaggacag

SEQ ID NO: 45419 - DNA, 20 bp, Human papillomavirus type 109
tattgcctgttaatctgctt

SEQ ID NO: 45420 - DNA, 20 bp, Human papillomavirus type 109
cctgttaatctgctttgtaa

SEQ ID NO: 45421 - DNA, 20 bp, Human papillomavirus type 109
atctgctttgtaacgaggat

SEQ ID NO: 45422 - DNA, 20 bp, Human papillomavirus type 109
gtaacgaggatttgtcacaa

SEQ ID NO: 45423 - DNA, 20 bp, Human papillomavirus type 109
taacgaggatttgtcacaag

SEQ ID NO: 45424 - DNA, 20 bp, Human papillomavirus type 109
cagtgtgtaagcctttcagc

SEQ ID NO: 45425 - DNA, 20 bp, Human papillomavirus type 109
cagcttcttcaaagaacatt

SEQ ID NO: 45426 - DNA, 20 bp, Human papillomavirus type 109
agcttcttcaaagaacatta

SEQ ID NO: 45427 - DNA, 20 bp, Human papillomavirus type 109
ttcaaagaacattaaaagac

SEQ ID NO: 45428 - DNA, 20 bp, Human papillomavirus type 109
aaagaacattaaaagacgtc

SEQ ID NO: 45429 - DNA, 20 bp, Human papillomavirus type 109
gacgacgacgacgagaaaga

SEQ ID NO: 45430 - DNA, 20 bp, Human papillomavirus type 109
tctttctcgtcgtcgtcgtc

SEQ ID NO: 45431 - DNA, 20 bp, Human papillomavirus type 109
ctcgtcgtcgtcgtcgaagt

SEQ ID NO: 45432 - DNA, 20 bp, Human papillomavirus type 109
tcgtcgtcgtcgtcgaagtc

SEQ ID NO: 45433 - DNA, 20 bp, Human papillomavirus type 109
taggcgtcgacgcactggtg

SEQ ID NO: 45434 - DNA, 20 bp, Human papillomavirus type 109
tttgcttaaaaggtcctgct

SEQ ID NO: 45435 - DNA, 20 bp, Human papillomavirus type 109
gcttaaaaggtcctgctaat

SEQ ID NO: 45436 - DNA, 20 bp, Human papillomavirus type 109
cttaaaaggtcctgctaata

SEQ ID NO: 45437 - DNA, 20 bp, Human papillomavirus type 109
aaaggtcctgctaatacatt

SEQ ID NO: 45438 - DNA, 20 bp, Human papillomavirus type 109
aaatgctggagatatcgctg

SEQ ID NO: 45439 - DNA, 20 bp, Human papillomavirus type 109
tgattagaccaaacatagtg

SEQ ID NO: 45440 - DNA, 20 bp, Human papillomavirus type 109
gaccaaacatagtggttgaa

SEQ ID NO: 45441 - DNA, 20 bp, Human papillomavirus type 109
aacctgtaggaccttcagaa

SEQ ID NO: 45442 - DNA, 20 bp, Human papillomavirus type 109
agaattggtgccaatagacg

SEQ ID NO: 45443 - DNA, 20 bp, Human papillomavirus type 109
gtgccaatagacgccctaaa

SEQ ID NO: 45444 - DNA, 20 bp, Human papillomavirus type 109
gaaaacctagatgtgctagt

SEQ ID NO: 45445 - DNA, 20 bp, Human papillomavirus type 109
cacttctattattgcagctg

SEQ ID NO: 45446 - DNA, 20 bp, Human papillomavirus type 109
tattattgcagctgtatcgt

SEQ ID NO: 45447 - DNA, 20 bp, Human papillomavirus type 109
ttgcagctgtatcgtctgca

SEQ ID NO: 45448 - DNA, 20 bp, Human papillomavirus type 109
cagctgtatcgtctgcagtt

SEQ ID NO: 45449 - DNA, 20 bp, Human papillomavirus type 109
tagtagagctttttttagag

SEQ ID NO: 45450 - DNA, 20 bp, Human papillomavirus type 109
agtagagctttttttagagc

SEQ ID NO: 45451 - DNA, 20 bp, Human papillomavirus type 109
gtagagctttttttagagca

SEQ ID NO: 45452 - DNA, 20 bp, Human papillomavirus type 109
ttttagagcaagggagttgt

SEQ ID NO: 45453 - DNA, 20 bp, Human papillomavirus type 109
tttagagcaagggagttgta

SEQ ID NO: 45454 - DNA, 20 bp, Human papillomavirus type 109
attatttcctgaagaggagt

SEQ ID NO: 45455 - DNA, 20 bp, Human papillomavirus type 109
ttatttcctgaagaggagtt

SEQ ID NO: 45456 - DNA, 20 bp, Human papillomavirus type 109
tttcctgaagaggagttagt

SEQ ID NO: 45457 - DNA, 20 bp, Human papillomavirus type 109
cctgaagaggagttagtaga

SEQ ID NO: 45458 - DNA, 20 bp, Human papillomavirus type 109
ctgaagaggagttagtagat

SEQ ID NO: 45459 - DNA, 20 bp, Human papillomavirus type 109
ttaatattttacagatgtca

SEQ ID NO: 45460 - DNA, 20 bp, Human papillomavirus type 109
taatattttacagatgtcat

SEQ ID NO: 45461 - DNA, 20 bp, Human papillomavirus type 109
aatattttacagatgtcata

SEQ ID NO: 45462 - DNA, 20 bp, Human papillomavirus type 109
atattttacagatgtcatat

SEQ ID NO: 45463 - DNA, 20 bp, Human papillomavirus type 109
tacagatgtcatattggctg

SEQ ID NO: 45464 - DNA, 20 bp, Human papillomavirus type 109
gtttagctgcaagaacaaat

SEQ ID NO: 45465 - DNA, 20 bp, Human papillomavirus type 109
agctgcaagaacaaattctt

SEQ ID NO: 45466 - DNA, 20 bp, Human papillomavirus type 109
gctgcaagaacaaattcttt

SEQ ID NO: 45467 - DNA, 20 bp, Human papillomavirus type 109
tttgacaggtaaacgtaaac

SEQ ID NO: 45468 - DNA, 20 bp, Human papillomavirus type 109
gacaggtaaacgtaaacgtg

SEQ ID NO: 45469 - DNA, 20 bp, Human papillomavirus type 109
ggccaattgccatgcaggtg

SEQ ID NO: 45470 - DNA, 20 bp, Human papillomavirus type 109
gccaattgccatgcaggtgg

SEQ ID NO: 45471 - DNA, 20 bp, Human papillomavirus type 109
ccatgcaggtggtaccccac

SEQ ID NO: 45472 - DNA, 20 bp, Human papillomavirus type 109
ataggtatatcctggactca

SEQ ID NO: 45473 - DNA, 20 bp, Human papillomavirus type 109
taaacacaaagtgttttgga

SEQ ID NO: 45474 - DNA, 20 bp, Human papillomavirus type 121
taacacctttggcttttctt

SEQ ID NO: 45475 - DNA, 20 bp, Human papillomavirus type 121
ggcttttctttaaaggacat

SEQ ID NO: 45476 - DNA, 20 bp, Human papillomavirus type 121
gcttttctttaaaggacatt

SEQ ID NO: 45477 - DNA, 20 bp, Human papillomavirus type 121
tctttaaaggacattagact

SEQ ID NO: 45478 - DNA, 20 bp, Human papillomavirus type 121
ctttaaaggacattagacta

SEQ ID NO: 45479 - DNA, 20 bp, Human papillomavirus type 121
gatgagcaaccttatagaat

SEQ ID NO: 45480 - DNA, 20 bp, Human papillomavirus type 121
tagaatagattcagtgtgca

SEQ ID NO: 45481 - DNA, 20 bp, Human papillomavirus type 121
agtgtgcagagtttgtaaaa

SEQ ID NO: 45482 - DNA, 20 bp, Human papillomavirus type 121
gtaaaacgtcaatcagattt

SEQ ID NO: 45483 - DNA, 20 bp, Human papillomavirus type 121
taaaacgtcaatcagatttt

SEQ ID NO: 45484 - DNA, 20 bp, Human papillomavirus type 121
gtcttcacaaaaaaacagta

SEQ ID NO: 45485 - DNA, 20 bp, Human papillomavirus type 121
tcttcacaaaaaaacagtaa

SEQ ID NO: 45486 - DNA, 20 bp, Human papillomavirus type 121
acaaaaaaacagtaaaagac

SEQ ID NO: 45487 - DNA, 20 bp, Human papillomavirus type 121
tttgagaacagtggcagtgc

SEQ ID NO: 45488 - DNA, 20 bp, Human papillomavirus type 121
gagaacagtggcagtgcaga

SEQ ID NO: 45489 - DNA, 20 bp, Human papillomavirus type 121
atatttctataagtgtacaa

SEQ ID NO: 45490 - DNA, 20 bp, Human papillomavirus type 121
tatttctataagtgtacaac

SEQ ID NO: 45491 - DNA, 20 bp, Human papillomavirus type 121
ctataagtgtacaactggaa

SEQ ID NO: 45492 - DNA, 20 bp, Human papillomavirus type 121
tataagtgtacaactggaaa

SEQ ID NO: 45493 - DNA, 20 bp, Human papillomavirus type 121
atggtagaacatcaatcagc

SEQ ID NO: 45494 - DNA, 20 bp, Human papillomavirus type 121
catgaatagtcacagtcatt

SEQ ID NO: 45495 - DNA, 20 bp, Human papillomavirus type 121
ttggattcaaccattgatag

SEQ ID NO: 45496 - DNA, 20 bp, Human papillomavirus type 121
tggattcaaccattgataga

SEQ ID NO: 45497 - DNA, 20 bp, Human papillomavirus type 121
ggattcaaccattgatagat

SEQ ID NO: 45498 - DNA, 20 bp, Human papillomavirus type 121
gattcaaccattgatagatt

SEQ ID NO: 45499 - DNA, 20 bp, Human papillomavirus type 121
gatgctgtgcaagaagctct

SEQ ID NO: 45500 - DNA, 20 bp, Human papillomavirus type 121
actctatatgaaaatgctgc

SEQ ID NO: 45501 - DNA, 20 bp, Human papillomavirus type 121
atacacaaatacagcactgg

SEQ ID NO: 45502 - DNA, 20 bp, Human papillomavirus type 121
ataattcccagtgctgtatt

SEQ ID NO: 45503 - DNA, 20 bp, Human papillomavirus type 121
ccagtgctgtatttgtgtat

SEQ ID NO: 45504 - DNA, 20 bp, Human papillomavirus type 121
tcagttactggagaatggga

SEQ ID NO: 45505 - DNA, 20 bp, Human papillomavirus type 121
ctggagaatgggaggtgaaa

SEQ ID NO: 45506 - DNA, 20 bp, Human papillomavirus type 121
ctccctctgttacctctagc

SEQ ID NO: 45507 - DNA, 20 bp, Human papillomavirus type 121
tccctctgttacctctagct

SEQ ID NO: 45508 - DNA, 20 bp, Human papillomavirus type 121
cctctagctcctctcccact

SEQ ID NO: 45509 - DNA, 20 bp, Human papillomavirus type 121
ttatcctttaaagacactgc

SEQ ID NO: 45510 - DNA, 20 bp, Human papillomavirus type 121
tcctttaaagacactgcaca

SEQ ID NO: 45511 - DNA, 20 bp, Human papillomavirus type 121
aaagacactgcacaaagaca

SEQ ID NO: 45512 - DNA, 20 bp, Human papillomavirus type 121
aagacactgcacaaagacaa

SEQ ID NO: 45513 - DNA, 20 bp, Human papillomavirus type 121
tttttggacactgtcacact

SEQ ID NO: 45514 - DNA, 20 bp, Human papillomavirus type 121
ttcctatagatactgttgat

SEQ ID NO: 45515 - DNA, 20 bp, Human papillomavirus type 121
ctatagatactgttgatcca

SEQ ID NO: 45516 - DNA, 20 bp, Human papillomavirus type 121
atccagcagggcctgctttg

SEQ ID NO: 45517 - DNA, 20 bp, Human papillomavirus type 121
ggtgcctctaaatgaaggca

SEQ ID NO: 45518 - DNA, 20 bp, Human papillomavirus type 121
gtgcctctaaatgaaggcaa

SEQ ID NO: 45519 - DNA, 20 bp, Human papillomavirus type 121
taaagctcgtgacctctata

SEQ ID NO: 45520 - DNA, 20 bp, Human papillomavirus type 121
ttaaatcagccttcccgcct

SEQ ID NO: 45521 - DNA, 20 bp, Human papillomavirus type 121
taaatcagccttcccgccta

SEQ ID NO: 45522 - DNA, 20 bp, Human papillomavirus type 121
aaatcagccttcccgcctag

SEQ ID NO: 45523 - DNA, 20 bp, Human papillomavirus type 121
aatcagccttcccgcctagt

SEQ ID NO: 45524 - DNA, 20 bp, Human papillomavirus type 121
gaaggtgtttgtaacagata

SEQ ID NO: 45525 - DNA, 20 bp, Human papillomavirus type 121
aaggtgtttgtaacagatat

SEQ ID NO: 45526 - DNA, 20 bp, Human papillomavirus type 121
gtaacagatatagcacaacc

SEQ ID NO: 45527 - DNA, 20 bp, Human papillomavirus type 121
taacagatatagcacaacca

SEQ ID NO: 45528 - DNA, 20 bp, Human papillomavirus type 121
gtgtcatacccacaaacaaa

SEQ ID NO: 45529 - DNA, 20 bp, Human papillomavirus type 121
agggttatgctgccagatcc

SEQ ID NO: 45530 - DNA, 20 bp, Human papillomavirus type 121
tgctgccagatccaaacaaa

SEQ ID NO: 45531 - DNA, 20 bp, Human papillomavirus type 121
gcattagttgatacagatgt

SEQ ID NO: 45532 - DNA, 20 bp, Human papillomavirus type 121
cattagttgatacagatgtt

SEQ ID NO: 45533 - DNA, 20 bp, Human papillomavirus type 121
gttgatacagatgtttataa

SEQ ID NO: 45534 - DNA, 20 bp, Human papillomavirus type 121
tacctgtaagtggcccgatt

SEQ ID NO: 45535 - DNA, 20 bp, Human papillomavirus type 121
tgttaaaatgacaaaggaat

SEQ ID NO: 45536 - DNA, 20 bp, Human papillomavirus type 121
gttaaaatgacaaaggaatc

SEQ ID NO: 45537 - DNA, 20 bp, Human papillomavirus type 121
ttaaaatgacaaaggaatcc

SEQ ID NO: 45538 - DNA, 20 bp, Human papillomavirus type 121
aaatgacaaaggaatcctat

SEQ ID NO: 45539 - DNA, 20 bp, Human papillomavirus type 121
tgtctcatattaatgctatg

SEQ ID NO: 45540 - DNA, 20 bp, Human papillomavirus type 121
gtctcatattaatgctatga

SEQ ID NO: 45541 - DNA, 20 bp, Human papillomavirus type 121
tctcatattaatgctatgaa

SEQ ID NO: 45542 - DNA, 20 bp, Human papillomavirus type 121
atgctatgaatccttctata

SEQ ID NO: 45543 - DNA, 20 bp, Human papillomavirus type 121
tatattagaagactggaatt

SEQ ID NO: 45544 - DNA, 20 bp, Human papillomavirus type 121
aataaaattgcaatgcttgc

SEQ ID NO: 45545 - DNA, 20 bp, Human papillomavirus type 121
ataaaattgcaatgcttgca

SEQ ID NO: 45546 - DNA, 20 bp, Human papillomavirus type 121
caatgcttgcaccttaatgt

SEQ ID NO: 45547 - DNA, 20 bp, Human papillomavirus type 121
caccttaatgtttcattgct

SEQ ID NO: 45548 - DNA, 20 bp, Human papillomavirus type 121
atgtttcattgcttttgttt

SEQ ID NO: 45549 - DNA, 20 bp, Human papillomavirus type 121
cgttactggctgtgtgcctt

SEQ ID NO: 45550 - DNA, 20 bp, Human papillomavirus type 121
gttactggctgtgtgccttt

SEQ ID NO: 45551 - DNA, 20 bp, Human papillomavirus type 121
ctggctgtgtgcctttgtac

SEQ ID NO: 45552 - DNA, 20 bp, Human papillomavirus type 121
gtaccgggagtggtaactgc

SEQ ID NO: 45553 - DNA, 20 bp, Human papillomavirus type 121
taccgggagtggtaactgct

SEQ ID NO: 45554 - DNA, 20 bp, Human herpesvirus 1
cgtgaacaagactatcacgg

SEQ ID NO: 45555 - DNA, 20 bp, Human herpesvirus 1
cccgtctccatgtccaggat

SEQ ID NO: 45556 - DNA, 20 bp, Human herpesvirus 1
ttcacgtaaggcgacagggc

SEQ ID NO: 45557 - DNA, 20 bp, Human herpesvirus 1
acgtaaggcgacagggcgac

SEQ ID NO: 45558 - DNA, 20 bp, Human herpesvirus 1
cgtcctcaagttttcgcacc

SEQ ID NO: 45559 - DNA, 20 bp, Human herpesvirus 1
tcgcacccgtcgcccctctc

SEQ ID NO: 45560 - DNA, 20 bp, Human herpesvirus 1
cgcacccgtcgcccctctcc

SEQ ID NO: 45561 - DNA, 20 bp, Human herpesvirus 1
gcacccgtcgcccctctcca

SEQ ID NO: 45562 - DNA, 20 bp, Human herpesvirus 1
cgaacggaaccttggagagg

SEQ ID NO: 45563 - DNA, 20 bp, Human herpesvirus 1
gacacgccaaaccacgagtc

SEQ ID NO: 45564 - DNA, 20 bp, Human herpesvirus 1
cattcggggtgccgctgtgg

SEQ ID NO: 45565 - DNA, 20 bp, Human herpesvirus 1
ggggtgccgctgtggcctca

SEQ ID NO: 45566 - DNA, 20 bp, Human herpesvirus 1
cgggcccccgtgtaaaggtt

SEQ ID NO: 45567 - DNA, 20 bp, Human herpesvirus 1
gtcaggtgaggccacagcgg

SEQ ID NO: 45568 - DNA, 20 bp, Human herpesvirus 1
aggcgcaggttgccgggcgt

SEQ ID NO: 45569 - DNA, 20 bp, Human herpesvirus 1
ccgggcgtaaagcagatggc

SEQ ID NO: 45570 - DNA, 20 bp, Human herpesvirus 1
tccaggctaaggccctggga

SEQ ID NO: 45571 - DNA, 20 bp, Human herpesvirus 1
ccatgaccatcacgcgctcc

SEQ ID NO: 45572 - DNA, 20 bp, Human herpesvirus 1
gcctggacaaggtcgccatc

SEQ ID NO: 45573 - DNA, 20 bp, Human herpesvirus 1
gtcccgcaagaccacgtaag

SEQ ID NO: 45574 - DNA, 20 bp, Human herpesvirus 1
cagtaactcggccacgttgg

SEQ ID NO: 45575 - DNA, 20 bp, Human herpesvirus 1
gccgtcgcgtgccgcctccg

SEQ ID NO: 45576 - DNA, 20 bp, Human herpesvirus 1
ctggaagaggcccccctgcc

SEQ ID NO: 45577 - DNA, 20 bp, Human herpesvirus 1
cgtggtcttgcgggaccaac

SEQ ID NO: 45578 - DNA, 20 bp, Human herpesvirus 1
gctgtgcacctcgcagcgca

SEQ ID NO: 45579 - DNA, 20 bp, Human herpesvirus 1
ctgtgcacctcgcagcgcat

SEQ ID NO: 45580 - DNA, 20 bp, Human herpesvirus 1
gtgatgcggctggcgttggc

SEQ ID NO: 45581 - DNA, 20 bp, Human herpesvirus 1
gccgtgagccacttttcaat

SEQ ID NO: 45582 - DNA, 20 bp, Human herpesvirus 1
aaaagtggctcacggccaac

SEQ ID NO: 45583 - DNA, 20 bp, Human herpesvirus 1
aggtaggcgtggagcttggc

SEQ ID NO: 45584 - DNA, 20 bp, Human herpesvirus 1
gccatgtacgcgctcacctc

SEQ ID NO: 45585 - DNA, 20 bp, Human herpesvirus 1
gtgggaggagaacagccgcg

SEQ ID NO: 45586 - DNA, 20 bp, Human herpesvirus 1
tgggaggagaacagccgcgt

SEQ ID NO: 45587 - DNA, 20 bp, Human herpesvirus 1
tcctcccacaaagaggtgag

SEQ ID NO: 45588 - DNA, 20 bp, Human herpesvirus 1
ctggtgctcgaaggtcgact

SEQ ID NO: 45589 - DNA, 20 bp, Human herpesvirus 1
tggtgctcgaaggtcgactc

SEQ ID NO: 45590 - DNA, 20 bp, Human herpesvirus 1
gtgtgtgtgggctcgccgac

SEQ ID NO: 45591 - DNA, 20 bp, Human herpesvirus 1
gagcaccagaaactgcggtg

SEQ ID NO: 45592 - DNA, 20 bp, Human herpesvirus 1
gagcttgcctgtctgctgat

SEQ ID NO: 45593 - DNA, 20 bp, Human herpesvirus 1
agcttgcctgtctgctgatg

SEQ ID NO: 45594 - DNA, 20 bp, Human herpesvirus 1
cctgtctgctgatgtacctg

SEQ ID NO: 45595 - DNA, 20 bp, Human herpesvirus 1
gcaaaggtcgacggggtggc

SEQ ID NO: 45596 - DNA, 20 bp, Human herpesvirus 1
gggggcagttctccaggtac

SEQ ID NO: 45597 - DNA, 20 bp, Human herpesvirus 1
atggtgcacgtaaaaccgtt

SEQ ID NO: 45598 - DNA, 20 bp, Human herpesvirus 1
gacgacgagttcgtcctgcc

SEQ ID NO: 45599 - DNA, 20 bp, Human herpesvirus 1
gtcctgccccactggtacat

SEQ ID NO: 45600 - DNA, 20 bp, Human herpesvirus 1
ttggccagcaggtaccgggc

SEQ ID NO: 45601 - DNA, 20 bp, Human herpesvirus 1
gccagcaggtaccgggccat

SEQ ID NO: 45602 - DNA, 20 bp, Human herpesvirus 1
gccccagattatcttgaaca

SEQ ID NO: 45603 - DNA, 20 bp, Human herpesvirus 1
tcttgaacagcgccaccgcg

SEQ ID NO: 45604 - DNA, 20 bp, Human herpesvirus 1
aacagcgccaccgcgtggtc

SEQ ID NO: 45605 - DNA, 20 bp, Human herpesvirus 1
gcgagacggaccacgcggtg

SEQ ID NO: 45606 - DNA, 20 bp, Human herpesvirus 1
aagataatctggggcgaact

SEQ ID NO: 45607 - DNA, 20 bp, Human herpesvirus 1
ggactcggcggccgggggat

SEQ ID NO: 45608 - DNA, 20 bp, Human herpesvirus 1
ggccccgatgacgtgctgga

SEQ ID NO: 45609 - DNA, 20 bp, Human herpesvirus 1
tttcgtcgacggtctccttc

SEQ ID NO: 45610 - DNA, 20 bp, Human herpesvirus 1
ttcgtcgacggtctccttcg

SEQ ID NO: 45611 - DNA, 20 bp, Human herpesvirus 1
tcgtcgacggtctccttcgc

SEQ ID NO: 45612 - DNA, 20 bp, Human herpesvirus 1
cgtcgacggtctccttcgcg

SEQ ID NO: 45613 - DNA, 20 bp, Human herpesvirus 1
gtcgacggtctccttcgcgg

SEQ ID NO: 45614 - DNA, 20 bp, Human herpesvirus 1
ccgcagccagcggatcagcg

SEQ ID NO: 45615 - DNA, 20 bp, Human herpesvirus 1
ttcccgaccccattggcgcg

SEQ ID NO: 45616 - DNA, 20 bp, Human herpesvirus 1
tcccgaccccattggcgcgc

SEQ ID NO: 45617 - DNA, 20 bp, Human herpesvirus 1
cccgaccccattggcgcgcg

SEQ ID NO: 45618 - DNA, 20 bp, Human herpesvirus 1
ccgaccccattggcgcgcgg

SEQ ID NO: 45619 - DNA, 20 bp, Human herpesvirus 1
ctggcccatcgcatcagcca

SEQ ID NO: 45620 - DNA, 20 bp, Human herpesvirus 1
acgtcctgcactttgcgtgt

SEQ ID NO: 45621 - DNA, 20 bp, Human herpesvirus 1
cgtcctgcactttgcgtgtc

SEQ ID NO: 45622 - DNA, 20 bp, Human herpesvirus 1
gcgtgtctggtgtattttgc

SEQ ID NO: 45623 - DNA, 20 bp, Human herpesvirus 1
cgtgtctggtgtattttgcg

SEQ ID NO: 45624 - DNA, 20 bp, Human herpesvirus 1
gctggatggccttatagatc

SEQ ID NO: 45625 - DNA, 20 bp, Human herpesvirus 1
gacgacacgctcgccgagct

SEQ ID NO: 45626 - DNA, 20 bp, Human herpesvirus 1
tccggggcccggccctgctg

SEQ ID NO: 45627 - DNA, 20 bp, Human herpesvirus 1
cgccctcctccgcgctggtg

SEQ ID NO: 45628 - DNA, 20 bp, Human herpesvirus 1
atcggcaggcaccgcaccag

SEQ ID NO: 45629 - DNA, 20 bp, Human herpesvirus 1
tcggcaggcaccgcaccagc

SEQ ID NO: 45630 - DNA, 20 bp, Human herpesvirus 1
cgcctggaggacggcgccgg

SEQ ID NO: 45631 - DNA, 20 bp, Human herpesvirus 1
acgggcgaatgggagctcgg

SEQ ID NO: 45632 - DNA, 20 bp, Human herpesvirus 1
gcccgttaaccccccacgtg

SEQ ID NO: 45633 - DNA, 20 bp, Human herpesvirus 1
accccccacgtgatcagcac

SEQ ID NO: 45634 - DNA, 20 bp, Human herpesvirus 1
agctcgggaggcagcgccac

SEQ ID NO: 45635 - DNA, 20 bp, Human herpesvirus 1
tgtgtgtgctggtaatttat

SEQ ID NO: 45636 - DNA, 20 bp, Human herpesvirus 1
atacaccgatccgtaaacgc

SEQ ID NO: 45637 - DNA, 20 bp, Human herpesvirus 1
tacaccgatccgtaaacgcg

SEQ ID NO: 45638 - DNA, 20 bp, Human herpesvirus 1
acggatcggtgtataaatta

SEQ ID NO: 45639 - DNA, 20 bp, Human herpesvirus 1
gggccccggggatctcgagg

SEQ ID NO: 45640 - DNA, 20 bp, Human herpesvirus 1
atggcgaacacggggctgca

SEQ ID NO: 45641 - DNA, 20 bp, Human herpesvirus 1
cggatgcgcgtgagggtgag

SEQ ID NO: 45642 - DNA, 20 bp, Human herpesvirus 1
gccatcaaccccgccctaca

SEQ ID NO: 45643 - DNA, 20 bp, Human herpesvirus 1
ctcctcctggtccgcaagac

SEQ ID NO: 45644 - DNA, 20 bp, Human herpesvirus 1
ctaaccgcacaccgacggta

SEQ ID NO: 45645 - DNA, 20 bp, Human herpesvirus 1
taaccgcacaccgacggtac

SEQ ID NO: 45646 - DNA, 20 bp, Human herpesvirus 1
gtgagcgcctggacgccgtg

SEQ ID NO: 45647 - DNA, 20 bp, Human herpesvirus 1
cggaccaggaggagcaactc

SEQ ID NO: 45648 - DNA, 20 bp, Human herpesvirus 1
caagtgggccgcctttgcag

SEQ ID NO: 45649 - DNA, 20 bp, Human herpesvirus 1
gcagccataaaggcgccaac

SEQ ID NO: 45650 - DNA, 20 bp, Human herpesvirus 1
cagccataaaggcgccaaca

SEQ ID NO: 45651 - DNA, 20 bp, Human herpesvirus 1
ggtgctgacgccctcccggt

SEQ ID NO: 45652 - DNA, 20 bp, Human herpesvirus 1
gttggcgcctttatggctgc

SEQ ID NO: 45653 - DNA, 20 bp, Human herpesvirus 1
gcacgcatacgggcggccac

SEQ ID NO: 45654 - DNA, 20 bp, Human herpesvirus 1
ggaagggccacctgacacag

SEQ ID NO: 45655 - DNA, 20 bp, Human herpesvirus 1
ggtgtctaacggtcctcacc

SEQ ID NO: 45656 - DNA, 20 bp, Human herpesvirus 1
ctaacccagaccccgggcgc

SEQ ID NO: 45657 - DNA, 20 bp, Human herpesvirus 1
gccaagtgcgcgttcatggt

SEQ ID NO: 45658 - DNA, 20 bp, Human herpesvirus 1
atggttcgggggtgggtgtg

SEQ ID NO: 45659 - DNA, 20 bp, Human herpesvirus 1
gggggtgggtgtgggtgtgt

SEQ ID NO: 45660 - DNA, 20 bp, Human herpesvirus 1
ccgcggactcgggggacccg

SEQ ID NO: 45661 - DNA, 20 bp, Human herpesvirus 1
gccaacgaggtccagtacga

SEQ ID NO: 45662 - DNA, 20 bp, Human herpesvirus 1
tgaccaagtctgcgggggag

SEQ ID NO: 45663 - DNA, 20 bp, Human herpesvirus 1
ctgttgtaccgcccctcgac

SEQ ID NO: 45664 - DNA, 20 bp, Human herpesvirus 1
tgttgtaccgcccctcgacc

SEQ ID NO: 45665 - DNA, 20 bp, Human herpesvirus 1
taccgcccctcgaccaccac

SEQ ID NO: 45666 - DNA, 20 bp, Human herpesvirus 1
gtcagaacgggccggtcgtc

SEQ ID NO: 45667 - DNA, 20 bp, Human herpesvirus 1
cggaaaacggaacggcgcct

SEQ ID NO: 45668 - DNA, 20 bp, Human herpesvirus 1
tggtcgccgtcattatggcc

SEQ ID NO: 45669 - DNA, 20 bp, Human herpesvirus 1
tggccatctacctcgcggcc

SEQ ID NO: 45670 - DNA, 20 bp, Human herpesvirus 1
cgttttccggaatacgtacg

SEQ ID NO: 45671 - DNA, 20 bp, Human herpesvirus 1
tccggaatacgtacggacgt

SEQ ID NO: 45672 - DNA, 20 bp, Human herpesvirus 1
gctctccatcctgcatcagg

SEQ ID NO: 45673 - DNA, 20 bp, Human herpesvirus 1
ggggtgaatgagctgggcgg

SEQ ID NO: 45674 - DNA, 20 bp, Human herpesvirus 1
accccgaagccccggccctg

SEQ ID NO: 45675 - DNA, 20 bp, Human herpesvirus 1
acgaggcgctcgtcgcctgg

SEQ ID NO: 45676 - DNA, 20 bp, Human herpesvirus 1
cgaggcgctcgtcgcctggc

SEQ ID NO: 45677 - DNA, 20 bp, Human herpesvirus 1
aggtcccggatgcccctggc

SEQ ID NO: 45678 - DNA, 20 bp, Human herpesvirus 1
cgcgcgccaggggcgatgga

SEQ ID NO: 45679 - DNA, 20 bp, Human herpesvirus 1
gcgcgccaggggcgatggaa

SEQ ID NO: 45680 - DNA, 20 bp, Human herpesvirus 1
cggtttcccgttccgcttcc

SEQ ID NO: 45681 - DNA, 20 bp, Human herpesvirus 1
cccgttccgcttccatcgcc

SEQ ID NO: 45682 - DNA, 20 bp, Human herpesvirus 1
ggcggcgatgtcggccgacg

SEQ ID NO: 45683 - DNA, 20 bp, Human herpesvirus 1
gcggcgatgtcggccgacgt

SEQ ID NO: 45684 - DNA, 20 bp, Human herpesvirus 1
aagttctttacgtcggccga

SEQ ID NO: 45685 - DNA, 20 bp, Human herpesvirus 1
agttctttacgtcggccgac

SEQ ID NO: 45686 - DNA, 20 bp, Human herpesvirus 1
tttacgtcggccgacatcgc

SEQ ID NO: 45687 - DNA, 20 bp, Human herpesvirus 1
tcagtcacaaagcggtcctg

SEQ ID NO: 45688 - DNA, 20 bp, Human herpesvirus 1
gggttcaccgtcgtccgaca

SEQ ID NO: 45689 - DNA, 20 bp, Human herpesvirus 1
ggttcaccgtcgtccgacag

SEQ ID NO: 45690 - DNA, 20 bp, Human herpesvirus 1
accgtcgtccgacaggaccg

SEQ ID NO: 45691 - DNA, 20 bp, Human herpesvirus 1
gtgactgagaacgtgctgtt

SEQ ID NO: 45692 - DNA, 20 bp, Human herpesvirus 1
ttccagtagctggtgatgca

SEQ ID NO: 45693 - DNA, 20 bp, Human herpesvirus 1
cagtagctggtgatgcactg

SEQ ID NO: 45694 - DNA, 20 bp, Human herpesvirus 1
tgcgccctggcccggctcgt

SEQ ID NO: 45695 - DNA, 20 bp, Human herpesvirus 1
tccagcagcacgtgcagcat

SEQ ID NO: 45696 - DNA, 20 bp, Human herpesvirus 1
ccagcagcacgtgcagcatc

SEQ ID NO: 45697 - DNA, 20 bp, Human herpesvirus 1
cagcagcacgtgcagcatct

SEQ ID NO: 45698 - DNA, 20 bp, Human herpesvirus 1
gagcgcggcacggccgacca

SEQ ID NO: 45699 - DNA, 20 bp, Human herpesvirus 1
agcgcggcacggccgaccag

SEQ ID NO: 45700 - DNA, 20 bp, Human herpesvirus 1
caatacgaccccagcagggc

SEQ ID NO: 45701 - DNA, 20 bp, Human herpesvirus 1
gacgccctgctggggtcgta

SEQ ID NO: 45702 - DNA, 20 bp, Human herpesvirus 1
caacaccctgtcgctcgtgc

SEQ ID NO: 45703 - DNA, 20 bp, Human herpesvirus 1
ctggagctcgggttgtcggt

SEQ ID NO: 45704 - DNA, 20 bp, Human herpesvirus 1
tggagctcgggttgtcggtg

SEQ ID NO: 45705 - DNA, 20 bp, Human herpesvirus 1
ggttggtggcgataaagtgg

SEQ ID NO: 45706 - DNA, 20 bp, Human herpesvirus 1
gttggtggcgataaagtgga

SEQ ID NO: 45707 - DNA, 20 bp, Human herpesvirus 1
gtggcgataaagtggaaaag

SEQ ID NO: 45708 - DNA, 20 bp, Human herpesvirus 1
ttgggaggcacggccctgtg

SEQ ID NO: 45709 - DNA, 20 bp, Human herpesvirus 1
tgggaggcacggccctgtgt

SEQ ID NO: 45710 - DNA, 20 bp, Human herpesvirus 1
cgtcgccgcccgcgatggag

SEQ ID NO: 45711 - DNA, 20 bp, Human herpesvirus 1
gctacgccaccaccatgcac

SEQ ID NO: 45712 - DNA, 20 bp, Human herpesvirus 1
gaccggggtctcggatcggg

SEQ ID NO: 45713 - DNA, 20 bp, Human herpesvirus 1
gcgtgggcggcgttcacgaa

SEQ ID NO: 45714 - DNA, 20 bp, Human herpesvirus 1
cgtgggcggcgttcacgaaa

SEQ ID NO: 45715 - DNA, 20 bp, Human herpesvirus 1
acgaaagcaaaacccgacgt

SEQ ID NO: 45716 - DNA, 20 bp, Human herpesvirus 1
ggcgccagaagagagggggg

SEQ ID NO: 45717 - DNA, 20 bp, Human herpesvirus 1
tggcgcctaacggggctgct

SEQ ID NO: 45718 - DNA, 20 bp, Human herpesvirus 1
ggccaggcggtcgatgtgtc

SEQ ID NO: 45719 - DNA, 20 bp, Human herpesvirus 1
gccaggcggtcgatgtgtct

SEQ ID NO: 45720 - DNA, 20 bp, Human herpesvirus 1
cccggcacaaacatcgtgtt

SEQ ID NO: 45721 - DNA, 20 bp, Human herpesvirus 1
ggggcccttccggaggacag

SEQ ID NO: 45722 - DNA, 20 bp, Human herpesvirus 1
cggaggacagacacatcgac

SEQ ID NO: 45723 - DNA, 20 bp, Human herpesvirus 1
tacaaggcgctggccgaaga

SEQ ID NO: 45724 - DNA, 20 bp, Human herpesvirus 1
cacgccaccaagatctgcgg

SEQ ID NO: 45725 - DNA, 20 bp, Human herpesvirus 1
acgccaccaagatctgcggc

SEQ ID NO: 45726 - DNA, 20 bp, Human herpesvirus 1
acgctgttaagcgggtcgct

SEQ ID NO: 45727 - DNA, 20 bp, Human herpesvirus 1
agcgggtcgctgcagggtcg

SEQ ID NO: 45728 - DNA, 20 bp, Human herpesvirus 1
cgttccttccccctcccccc

SEQ ID NO: 45729 - DNA, 20 bp, Human herpesvirus 1
gttccttccccctccccccg

SEQ ID NO: 45730 - DNA, 20 bp, Human herpesvirus 1
cttccccctccccccgcgtc

SEQ ID NO: 45731 - DNA, 20 bp, Human herpesvirus 1
cccctccccccgcgtcagac

SEQ ID NO: 45732 - DNA, 20 bp, Human herpesvirus 1
agcggtggttagggtttgtc

SEQ ID NO: 45733 - DNA, 20 bp, Human herpesvirus 1
atagtcgccgattcccgaaa

SEQ ID NO: 45734 - DNA, 20 bp, Human herpesvirus 1
ccgaaacttcatcacccccg

SEQ ID NO: 45735 - DNA, 20 bp, Human herpesvirus 1
atcacccccgagttcccccg

SEQ ID NO: 45736 - DNA, 20 bp, Human herpesvirus 1
ccccgggacttttggatgtc

SEQ ID NO: 45737 - DNA, 20 bp, Human herpesvirus 1
tggatgtcgcccgtctttaa

SEQ ID NO: 45738 - DNA, 20 bp, Human herpesvirus 1
cgggacggccgtatgtccaa

SEQ ID NO: 45739 - DNA, 20 bp, Human herpesvirus 1
gggacggccgtatgtccaag

SEQ ID NO: 45740 - DNA, 20 bp, Human herpesvirus 1
atgacggcgctggtactgtc

SEQ ID NO: 45741 - DNA, 20 bp, Human herpesvirus 1
gacatacggccgtcccgaaa

SEQ ID NO: 45742 - DNA, 20 bp, Human herpesvirus 1
gcctcgtcaaagtcgccgcc

SEQ ID NO: 45743 - DNA, 20 bp, Human herpesvirus 1
gacgaggccaagctagccga

SEQ ID NO: 45744 - DNA, 20 bp, Human herpesvirus 1
acgaggccaagctagccgag

SEQ ID NO: 45745 - DNA, 20 bp, Human herpesvirus 1
aggtcgatgaaggtgctgac

SEQ ID NO: 45746 - DNA, 20 bp, Human herpesvirus 1
gaggagtacgcgtactccca

SEQ ID NO: 45747 - DNA, 20 bp, Human herpesvirus 1
atcgacctcaacatcaccat

SEQ ID NO: 45748 - DNA, 20 bp, Human herpesvirus 1
gggttcagcttgcgggcctc

SEQ ID NO: 45749 - DNA, 20 bp, Human herpesvirus 1
agcttgcgggcctcgttcca

SEQ ID NO: 45750 - DNA, 20 bp, Human herpesvirus 1
cgggcctcgttccacagggt

SEQ ID NO: 45751 - DNA, 20 bp, Human herpesvirus 1
cacagggtcagctcgtgatt

SEQ ID NO: 45752 - DNA, 20 bp, Human herpesvirus 1
gccaggtagtactgcggctg

SEQ ID NO: 45753 - DNA, 20 bp, Human herpesvirus 1
atgtgcgtcgcgttgtacct

SEQ ID NO: 45754 - DNA, 20 bp, Human herpesvirus 1
tacctgcgggcgaagatgcg

SEQ ID NO: 45755 - DNA, 20 bp, Human herpesvirus 1
gcccgcaggtacaacgcgac

SEQ ID NO: 45756 - DNA, 20 bp, Human herpesvirus 1
gtcatggtgcagaccgacgg

SEQ ID NO: 45757 - DNA, 20 bp, Human herpesvirus 1
ggctggttggaccccggggg

SEQ ID NO: 45758 - DNA, 20 bp, Human herpesvirus 1
gaccccgggggcttgccgtt

SEQ ID NO: 45759 - DNA, 20 bp, Human herpesvirus 1
ccgttggggaagatggccgc

SEQ ID NO: 45760 - DNA, 20 bp, Human herpesvirus 1
gggaagatggccgcgtggaa

SEQ ID NO: 45761 - DNA, 20 bp, Human herpesvirus 1
agcagaaagcccagcggtcc

SEQ ID NO: 45762 - DNA, 20 bp, Human herpesvirus 1
ttaaacatgtccatcacgcg

SEQ ID NO: 45763 - DNA, 20 bp, Human herpesvirus 1
aacatgtccatcacgcgccg

SEQ ID NO: 45764 - DNA, 20 bp, Human herpesvirus 1
gaattgattgcgaaagttgc

SEQ ID NO: 45765 - DNA, 20 bp, Human herpesvirus 1
attgcgaaagttgcgcccct

SEQ ID NO: 45766 - DNA, 20 bp, Human herpesvirus 1
cgaaagttgcgcccctcgac

SEQ ID NO: 45767 - DNA, 20 bp, Human herpesvirus 1
ggccatgacgcgctcggtcg

SEQ ID NO: 45768 - DNA, 20 bp, Human herpesvirus 1
ccttgtccgagcctcccagg

SEQ ID NO: 45769 - DNA, 20 bp, Human herpesvirus 1
tccgagcctcccaggtgcag

SEQ ID NO: 45770 - DNA, 20 bp, Human herpesvirus 1
ctgcacctgggaggctcgga

SEQ ID NO: 45771 - DNA, 20 bp, Human herpesvirus 1
tgcacctgggaggctcggac

SEQ ID NO: 45772 - DNA, 20 bp, Human herpesvirus 1
atggtggttgccgtcttggg

SEQ ID NO: 45773 - DNA, 20 bp, Human herpesvirus 1
ccgtcttgggctttgtctcc

SEQ ID NO: 45774 - DNA, 20 bp, Human herpesvirus 1
ggctttgtctccatgtcctt

SEQ ID NO: 45775 - DNA, 20 bp, Human herpesvirus 1
gtctccatgtccttttgtca

SEQ ID NO: 45776 - DNA, 20 bp, Human herpesvirus 1
tctccatgtccttttgtcaa

SEQ ID NO: 45777 - DNA, 20 bp, Human herpesvirus 1
taccgcgtctacgtccgaag

SEQ ID NO: 45778 - DNA, 20 bp, Human herpesvirus 1
accgcgtctacgtccgaagc

SEQ ID NO: 45779 - DNA, 20 bp, Human herpesvirus 1
ccgcgtctacgtccgaagcg

SEQ ID NO: 45780 - DNA, 20 bp, Human herpesvirus 1
tcgcacaggtacgacagcac

SEQ ID NO: 45781 - DNA, 20 bp, Human herpesvirus 1
ggacgtagacgcggtaaaac

SEQ ID NO: 45782 - DNA, 20 bp, Human herpesvirus 1
cccagagcagccccgaggag

SEQ ID NO: 45783 - DNA, 20 bp, Human herpesvirus 1
tccaggagcacggcctcctc

SEQ ID NO: 45784 - DNA, 20 bp, Human herpesvirus 1
cgcatggcgagccagtcccg

SEQ ID NO: 45785 - DNA, 20 bp, Human herpesvirus 1
gcatggcgagccagtcccgc

SEQ ID NO: 45786 - DNA, 20 bp, Human herpesvirus 1
ctgccccccatcaaactcga

SEQ ID NO: 45787 - DNA, 20 bp, Human herpesvirus 1
tgccccccatcaaactcgag

SEQ ID NO: 45788 - DNA, 20 bp, Human herpesvirus 1
gatggggggcagaaacagcg

SEQ ID NO: 45789 - DNA, 20 bp, Human herpesvirus 1
atggggggcagaaacagcgc

SEQ ID NO: 45790 - DNA, 20 bp, Human herpesvirus 1
tcgcccacggccgtcagccc

SEQ ID NO: 45791 - DNA, 20 bp, Human herpesvirus 1
ttttacccggaccccactta

SEQ ID NO: 45792 - DNA, 20 bp, Human herpesvirus 1
tacccggaccccacttacgg

SEQ ID NO: 45793 - DNA, 20 bp, Human herpesvirus 1
acccggaccccacttacggg

SEQ ID NO: 45794 - DNA, 20 bp, Human herpesvirus 1
cccggaccccacttacgggg

SEQ ID NO: 45795 - DNA, 20 bp, Human herpesvirus 1
cgggggccacatgctgtacg

SEQ ID NO: 45796 - DNA, 20 bp, Human herpesvirus 1
agagccaggaggctgggatc

SEQ ID NO: 45797 - DNA, 20 bp, Human herpesvirus 1
gagcgcgcgtatgtggcctt

SEQ ID NO: 45798 - DNA, 20 bp, Human herpesvirus 1
gatcccagcctcctggctct

SEQ ID NO: 45799 - DNA, 20 bp, Human herpesvirus 1
acgaggctctctgcgccgag

SEQ ID NO: 45800 - DNA, 20 bp, Human herpesvirus 1
gtgcgcatgccccgcgtgca

SEQ ID NO: 45801 - DNA, 20 bp, Human herpesvirus 1
tgcgcatgccccgcgtgcag

SEQ ID NO: 45802 - DNA, 20 bp, Human herpesvirus 1
cgttctatcagcccttggtt

SEQ ID NO: 45803 - DNA, 20 bp, Human herpesvirus 1
tatcagcccttggttggcgg

SEQ ID NO: 45804 - DNA, 20 bp, Human herpesvirus 1
gttggcggcgtccgtcagga

SEQ ID NO: 45805 - DNA, 20 bp, Human herpesvirus 1
gcggcgtccgtcaggacgga

SEQ ID NO: 45806 - DNA, 20 bp, Human herpesvirus 1
ggagcgtgtacgacaggggg

SEQ ID NO: 45807 - DNA, 20 bp, Human herpesvirus 1
tgtctccagcaggcccgccg

SEQ ID NO: 45808 - DNA, 20 bp, Human herpesvirus 1
ttcggggagcccgcggcggg

SEQ ID NO: 45809 - DNA, 20 bp, Human herpesvirus 1
ggggagcccgcggcgggcct

SEQ ID NO: 45810 - DNA, 20 bp, Human herpesvirus 1
ttcgccggcccgtgggccct

SEQ ID NO: 45811 - DNA, 20 bp, Human herpesvirus 1
cgagcaccggtgaccacgat

SEQ ID NO: 45812 - DNA, 20 bp, Human herpesvirus 1
catcgtggagtgcggtgggg

SEQ ID NO: 45813 - DNA, 20 bp, Human herpesvirus 1
gcgcccgacctggagccggg

SEQ ID NO: 45814 - DNA, 20 bp, Human herpesvirus 1
cccgcccggtcgagttcgcc

SEQ ID NO: 45815 - DNA, 20 bp, Human herpesvirus 1
gccctgcgtgtgttggcctg

SEQ ID NO: 45816 - DNA, 20 bp, Human herpesvirus 1
gcctgggcccgggactttgg

SEQ ID NO: 45817 - DNA, 20 bp, Human herpesvirus 1
ctcaccagggccaagaaccg

SEQ ID NO: 45818 - DNA, 20 bp, Human herpesvirus 1
cacgaacggggcggggaaga

SEQ ID NO: 45819 - DNA, 20 bp, Human herpesvirus 1
cccgccccgttcgtgcaaga

SEQ ID NO: 45820 - DNA, 20 bp, Human herpesvirus 1
gtgcaagagggcctccggtt

SEQ ID NO: 45821 - DNA, 20 bp, Human herpesvirus 1
ttggccctggtgagtaatcg

SEQ ID NO: 45822 - DNA, 20 bp, Human herpesvirus 1
ggctgtggggtgggtggttc

SEQ ID NO: 45823 - DNA, 20 bp, Human herpesvirus 1
gctgtggggtgggtggttcc

SEQ ID NO: 45824 - DNA, 20 bp, Human herpesvirus 1
cgccttgcgtgagtgtcctt

SEQ ID NO: 45825 - DNA, 20 bp, Human herpesvirus 1
cgtgagtgtcctttcgaccc

SEQ ID NO: 45826 - DNA, 20 bp, Human herpesvirus 1
cgacccccccccccctccct

SEQ ID NO: 45827 - DNA, 20 bp, Human herpesvirus 1
tgggtttcactgaaactggc

SEQ ID NO: 45828 - DNA, 20 bp, Human herpesvirus 1
gggtttcactgaaactggcc

SEQ ID NO: 45829 - DNA, 20 bp, Human herpesvirus 1
ggtttcactgaaactggccc

SEQ ID NO: 45830 - DNA, 20 bp, Human herpesvirus 1
cactgaaactggcccgcgcc

SEQ ID NO: 45831 - DNA, 20 bp, Human herpesvirus 1
actgaaactggcccgcgccc

SEQ ID NO: 45832 - DNA, 20 bp, Human herpesvirus 1
aacgactccggccccgggac

SEQ ID NO: 45833 - DNA, 20 bp, Human herpesvirus 1
acgactccggccccgggacc

SEQ ID NO: 45834 - DNA, 20 bp, Human herpesvirus 1
aacgcctgcacgcatagccc

SEQ ID NO: 45835 - DNA, 20 bp, Human herpesvirus 1
cgggcgaggatggcactgac

SEQ ID NO: 45836 - DNA, 20 bp, Human herpesvirus 1
gaggccggatggacgatctc

SEQ ID NO: 45837 - DNA, 20 bp, Human herpesvirus 1
gagccggcgatggccgcccc

SEQ ID NO: 45838 - DNA, 20 bp, Human herpesvirus 1
ctggagcagttgcggaccca

SEQ ID NO: 45839 - DNA, 20 bp, Human herpesvirus 1
tggagcagttgcggacccag

SEQ ID NO: 45840 - DNA, 20 bp, Human herpesvirus 1
cggacccaggcccccccacc

SEQ ID NO: 45841 - DNA, 20 bp, Human herpesvirus 1
ggggagcaggtgttcctgcc

SEQ ID NO: 45842 - DNA, 20 bp, Human herpesvirus 1
gggagcaggtgttcctgccc

SEQ ID NO: 45843 - DNA, 20 bp, Human herpesvirus 1
ctgcccctggaacactcgca

SEQ ID NO: 45844 - DNA, 20 bp, Human herpesvirus 1
agtcggtatcgctggcgcgg

SEQ ID NO: 45845 - DNA, 20 bp, Human herpesvirus 1
cgagtgttccaggggcagga

SEQ ID NO: 45846 - DNA, 20 bp, Human herpesvirus 1
acgcgaccggggccgatagt

SEQ ID NO: 45847 - DNA, 20 bp, Human herpesvirus 1
gagctcggggttaacggcaa

SEQ ID NO: 45848 - DNA, 20 bp, Human herpesvirus 1
acggcaaattttccgtgttc

SEQ ID NO: 45849 - DNA, 20 bp, Human herpesvirus 1
gccgttaaccccgagctcga

SEQ ID NO: 45850 - DNA, 20 bp, Human herpesvirus 1
ccgttaaccccgagctcgaa

SEQ ID NO: 45851 - DNA, 20 bp, Human herpesvirus 1
cggaaggggacacgggctac

SEQ ID NO: 45852 - DNA, 20 bp, Human herpesvirus 1
cggaatttatacccgggccc

SEQ ID NO: 45853 - DNA, 20 bp, Human herpesvirus 1
atacccgggccccatccggg

SEQ ID NO: 45854 - DNA, 20 bp, Human herpesvirus 1
tacccgggccccatccgggg

SEQ ID NO: 45855 - DNA, 20 bp, Human herpesvirus 1
aaggcgacgtgcacggccgc

SEQ ID NO: 45856 - DNA, 20 bp, Human herpesvirus 1
gtctggttcgaggacgacca

SEQ ID NO: 45857 - DNA, 20 bp, Human herpesvirus 1
tctggttcgaggacgaccac

SEQ ID NO: 45858 - DNA, 20 bp, Human herpesvirus 1
gaggacgaccaccaggtgtt

SEQ ID NO: 45859 - DNA, 20 bp, Human herpesvirus 1
aacacctggtggtcgtcctc

SEQ ID NO: 45860 - DNA, 20 bp, Human herpesvirus 1
gacgggggattcacggcccc

SEQ ID NO: 45861 - DNA, 20 bp, Human herpesvirus 1
acgggggattcacggccccc

SEQ ID NO: 45862 - DNA, 20 bp, Human herpesvirus 1
acggcccccgaggtgggcac

SEQ ID NO: 45863 - DNA, 20 bp, Human herpesvirus 1
ctccccgcgggacacacgcg

SEQ ID NO: 45864 - DNA, 20 bp, Human herpesvirus 1
tccccgcgggacacacgcgc

SEQ ID NO: 45865 - DNA, 20 bp, Human herpesvirus 1
tggggggaagtgggcagcgg

SEQ ID NO: 45866 - DNA, 20 bp, Human herpesvirus 1
ccgaggaatgacagcccgtg

SEQ ID NO: 45867 - DNA, 20 bp, Human herpesvirus 1
aagcaacccgcacgggccgc

SEQ ID NO: 45868 - DNA, 20 bp, Human herpesvirus 1
agcaacccgcacgggccgcc

SEQ ID NO: 45869 - DNA, 20 bp, Human herpesvirus 1
cttaaatgcgtggtggcgac

SEQ ID NO: 45870 - DNA, 20 bp, Human herpesvirus 1
accaactcgttggcgcgctg

SEQ ID NO: 45871 - DNA, 20 bp, Human herpesvirus 1
gcgcgctgaagcaggttttt

SEQ ID NO: 45872 - DNA, 20 bp, Human herpesvirus 1
ttgccctcgcagaccgtcac

SEQ ID NO: 45873 - DNA, 20 bp, Human herpesvirus 1
tgccctcgcagaccgtcacg

SEQ ID NO: 45874 - DNA, 20 bp, Human herpesvirus 1
agcgcgccaacgagttggtg

SEQ ID NO: 45875 - DNA, 20 bp, Human herpesvirus 1
ggacggcgggggtggtgcag

SEQ ID NO: 45876 - DNA, 20 bp, Human herpesvirus 1
tgcggaccctctcttctctc

SEQ ID NO: 45877 - DNA, 20 bp, Human herpesvirus 1
gcggaccctctcttctctcc

SEQ ID NO: 45878 - DNA, 20 bp, Human herpesvirus 1
cggaccctctcttctctccc

SEQ ID NO: 45879 - DNA, 20 bp, Human herpesvirus 1
tctcccgggccgcccctatc

SEQ ID NO: 45880 - DNA, 20 bp, Human herpesvirus 1
taggttcaccatgcaggcgt

SEQ ID NO: 45881 - DNA, 20 bp, Human herpesvirus 1
accatgcaggcgtggtacgt

SEQ ID NO: 45882 - DNA, 20 bp, Human herpesvirus 1
gcccgcacgtaccacgcctg

SEQ ID NO: 45883 - DNA, 20 bp, Human herpesvirus 1
tctaacgatgcggggggtgg

SEQ ID NO: 45884 - DNA, 20 bp, Human herpesvirus 1
gagaaccgtggacgacgtac

SEQ ID NO: 45885 - DNA, 20 bp, Human herpesvirus 1
gtcgcgctgagcgtcggggc

SEQ ID NO: 45886 - DNA, 20 bp, Human herpesvirus 1
tgtcagcagtgctttgccgc

SEQ ID NO: 45887 - DNA, 20 bp, Human herpesvirus 1
ggcggcaaagcactgctgac

SEQ ID NO: 45888 - DNA, 20 bp, Human herpesvirus 1
gcggcaaagcactgctgaca

SEQ ID NO: 45889 - DNA, 20 bp, Human herpesvirus 1
ttggccccgacgctcagcgc

SEQ ID NO: 45890 - DNA, 20 bp, Human herpesvirus 1
ataacggcgtacggcctcgt

SEQ ID NO: 45891 - DNA, 20 bp, Human herpesvirus 1
ggtgccagtccgctgcaccg

SEQ ID NO: 45892 - DNA, 20 bp, Human herpesvirus 1
ctgtatctggcgttcgtcgc

SEQ ID NO: 45893 - DNA, 20 bp, Human herpesvirus 1
gtcgccctccaccaacgccg

SEQ ID NO: 45894 - DNA, 20 bp, Human herpesvirus 1
ggcgtcgtgagtcccgccca

SEQ ID NO: 45895 - DNA, 20 bp, Human herpesvirus 1
gcgtcgtgagtcccgcccac

SEQ ID NO: 45896 - DNA, 20 bp, Human herpesvirus 1
tgggcgggactcacgacgcc

SEQ ID NO: 45897 - DNA, 20 bp, Human herpesvirus 1
ctcgtcggacgaggacatgg

SEQ ID NO: 45898 - DNA, 20 bp, Human herpesvirus 1
catgtcctcgtccgacgagg

SEQ ID NO: 45899 - DNA, 20 bp, Human herpesvirus 1
caggtcgtcgcggcggctct

SEQ ID NO: 45900 - DNA, 20 bp, Human herpesvirus 1
ctgcctcaacgccacctggc

SEQ ID NO: 45901 - DNA, 20 bp, Human herpesvirus 1
tgctggtgtgcatggccgtt

SEQ ID NO: 45902 - DNA, 20 bp, Human herpesvirus 1
gctggtgtgcatggccgttt

SEQ ID NO: 45903 - DNA, 20 bp, Human herpesvirus 1
ctggtgtgcatggccgtttc

SEQ ID NO: 45904 - DNA, 20 bp, Human herpesvirus 1
cggcctgccaggtggcgttg

SEQ ID NO: 45905 - DNA, 20 bp, Human herpesvirus 1
cgttcgtcgctggtcgtcgg

SEQ ID NO: 45906 - DNA, 20 bp, Human herpesvirus 1
gtcgctggtcgtcgggcgcc

SEQ ID NO: 45907 - DNA, 20 bp, Human herpesvirus 1
ggtcgaacgaacggccacga

SEQ ID NO: 45908 - DNA, 20 bp, Human herpesvirus 1
gttcgaccgaacagccgtcc

SEQ ID NO: 45909 - DNA, 20 bp, Human herpesvirus 1
gaccgaacagccgtccgggg

SEQ ID NO: 45910 - DNA, 20 bp, Human herpesvirus 1
ctaccagacaagctatcgta

SEQ ID NO: 45911 - DNA, 20 bp, Human herpesvirus 1
tctggtaggaacgaggggcc

SEQ ID NO: 45912 - DNA, 20 bp, Human herpesvirus 1
gtcgttattgatctggacac

SEQ ID NO: 45913 - DNA, 20 bp, Human herpesvirus 1
tcgttattgatctggacacc

SEQ ID NO: 45914 - DNA, 20 bp, Human herpesvirus 1
ttgatctggacacccccacg

SEQ ID NO: 45915 - DNA, 20 bp, Human herpesvirus 1
gggtaatggaaaaggcccta

SEQ ID NO: 45916 - DNA, 20 bp, Human herpesvirus 1
acgggctacgccttcgggaa

SEQ ID NO: 45917 - DNA, 20 bp, Human herpesvirus 1
ccgaaggcgtagcccgttaa

SEQ ID NO: 45918 - DNA, 20 bp, Human herpesvirus 1
acttggctggcttggatggg

SEQ ID NO: 45919 - DNA, 20 bp, Human herpesvirus 1
gctggcttggatggggagta

SEQ ID NO: 45920 - DNA, 20 bp, Human herpesvirus 1
ctcccccgttatcccactcg

SEQ ID NO: 45921 - DNA, 20 bp, Human herpesvirus 1
tcccactcgtcgagggcgcc

SEQ ID NO: 45922 - DNA, 20 bp, Human herpesvirus 1
aacaaagacgccgcgtttcc

SEQ ID NO: 45923 - DNA, 20 bp, Human herpesvirus 1
gttgaacgacaccggggcgc

SEQ ID NO: 45924 - DNA, 20 bp, Human herpesvirus 1
ttgaacgacaccggggcgcc

SEQ ID NO: 45925 - DNA, 20 bp, Human herpesvirus 1
gggggcggttttttctggac

SEQ ID NO: 45926 - DNA, 20 bp, Human herpesvirus 1
tttctggacatgtcggcgga

SEQ ID NO: 45927 - DNA, 20 bp, Human herpesvirus 1
ttctggacatgtcggcggaa

SEQ ID NO: 45928 - DNA, 20 bp, Human herpesvirus 1
tctggacatgtcggcggaat

SEQ ID NO: 45929 - DNA, 20 bp, Human herpesvirus 1
ctggacatgtcggcggaatc

SEQ ID NO: 45930 - DNA, 20 bp, Human herpesvirus 1
gccgcgaacggcgatcagag

SEQ ID NO: 45931 - DNA, 20 bp, Human herpesvirus 1
cttgcggaccacggcccggc

SEQ ID NO: 45932 - DNA, 20 bp, Human herpesvirus 1
ttgcggaccacggcccggcg

SEQ ID NO: 45933 - DNA, 20 bp, Human herpesvirus 1
cggaccacggcccggcgatg

SEQ ID NO: 45934 - DNA, 20 bp, Human herpesvirus 1
ctcgtctgggacctcgggca

SEQ ID NO: 45935 - DNA, 20 bp, Human herpesvirus 1
gcggaggacagccccttgga

SEQ ID NO: 45936 - DNA, 20 bp, Human herpesvirus 1
cggaggacagccccttggag

SEQ ID NO: 45937 - DNA, 20 bp, Human herpesvirus 1
gagagcaccgaggtcgtgga

SEQ ID NO: 45938 - DNA, 20 bp, Human herpesvirus 1
tgatgccaaaatgcggcact

SEQ ID NO: 45939 - DNA, 20 bp, Human herpesvirus 1
cgtcgacggaagtccggggc

SEQ ID NO: 45940 - DNA, 20 bp, Human herpesvirus 1
cgtcgacgcaagcccggccc

SEQ ID NO: 45941 - DNA, 20 bp, Human herpesvirus 1
ctgcttaggcagtgccgcat

SEQ ID NO: 45942 - DNA, 20 bp, Human herpesvirus 1
ggcagtgccgcattttggca

SEQ ID NO: 45943 - DNA, 20 bp, Human herpesvirus 1
aaaccccggggcccgtcgtt

SEQ ID NO: 45944 - DNA, 20 bp, Human herpesvirus 1
ggggtgctcgttggttggca

SEQ ID NO: 45945 - DNA, 20 bp, Human herpesvirus 1
gttggcactcacggtgcggc

SEQ ID NO: 45946 - DNA, 20 bp, Human herpesvirus 1
gcactcacggtgcggcgaat

SEQ ID NO: 45947 - DNA, 20 bp, Human herpesvirus 1
gccgcaccgtgagtgccaac

SEQ ID NO: 45948 - DNA, 20 bp, Human herpesvirus 1
cctcatggccccttttatac

SEQ ID NO: 45949 - DNA, 20 bp, Human herpesvirus 1
ctcatggccccttttatacc

SEQ ID NO: 45950 - DNA, 20 bp, Human herpesvirus 1
tataccccagccgaggacgc

SEQ ID NO: 45951 - DNA, 20 bp, Human herpesvirus 1
ataccccagccgaggacgcg

SEQ ID NO: 45952 - DNA, 20 bp, Human herpesvirus 1
taccccagccgaggacgcgt

SEQ ID NO: 45953 - DNA, 20 bp, Human herpesvirus 1
gggccacgggatttaccgcg

SEQ ID NO: 45954 - DNA, 20 bp, Human herpesvirus 1
accgcggaagagctggacgc

SEQ ID NO: 45955 - DNA, 20 bp, Human herpesvirus 1
ccgcggaagagctggacgcc

SEQ ID NO: 45956 - DNA, 20 bp, Human herpesvirus 1
ccgccgcggctgatggctcg

SEQ ID NO: 45957 - DNA, 20 bp, Human herpesvirus 1
cgcggtaaatcccgtggccc

SEQ ID NO: 45958 - DNA, 20 bp, Human herpesvirus 1
gacagcagccatccagatta

SEQ ID NO: 45959 - DNA, 20 bp, Human herpesvirus 1
acagcagccatccagattac

SEQ ID NO: 45960 - DNA, 20 bp, Human herpesvirus 1
cccccaacgggtaatcgtga

SEQ ID NO: 45961 - DNA, 20 bp, Human herpesvirus 1
acgattacccgttgggggta

SEQ ID NO: 45962 - DNA, 20 bp, Human herpesvirus 1
cccgttgggggtaatctgga

SEQ ID NO: 45963 - DNA, 20 bp, Human herpesvirus 1
ggagctgccgggagaccgct

SEQ ID NO: 45964 - DNA, 20 bp, Human herpesvirus 1
aggcgcctactcagataggt

SEQ ID NO: 45965 - DNA, 20 bp, Human herpesvirus 1
ttctcggccccccgcggccc

SEQ ID NO: 45966 - DNA, 20 bp, Human herpesvirus 1
tcggccccccgcggccccaa

SEQ ID NO: 45967 - DNA, 20 bp, Human herpesvirus 1
tggggccgcggggggccgag

SEQ ID NO: 45968 - DNA, 20 bp, Human herpesvirus 1
ggggccgcggggggccgaga

SEQ ID NO: 45969 - DNA, 20 bp, Human herpesvirus 1
gggccgcggggggccgagaa

SEQ ID NO: 45970 - DNA, 20 bp, Human herpesvirus 1
ccacgcccgaccacacaccc

SEQ ID NO: 45971 - DNA, 20 bp, Human herpesvirus 1
gcatggggggtgtgtggtcg

SEQ ID NO: 45972 - DNA, 20 bp, Human herpesvirus 1
aatacatgcccgggacccat

SEQ ID NO: 45973 - DNA, 20 bp, Human herpesvirus 1
cgggcctcagaacccacccg

SEQ ID NO: 45974 - DNA, 20 bp, Human herpesvirus 1
gccgtttcgggtgggttctg

SEQ ID NO: 45975 - DNA, 20 bp, Human herpesvirus 1
cgggtgggttctgaggcccg

SEQ ID NO: 45976 - DNA, 20 bp, Human herpesvirus 1
gggtgggttctgaggcccgg

SEQ ID NO: 45977 - DNA, 20 bp, Human herpesvirus 1
tgggaagcctcgtgggggct

SEQ ID NO: 45978 - DNA, 20 bp, Human herpesvirus 1
gggaagcctcgtgggggctg

SEQ ID NO: 45979 - DNA, 20 bp, Human herpesvirus 1
ggaagcctcgtgggggctgt

SEQ ID NO: 45980 - DNA, 20 bp, Human herpesvirus 1
ttgccgccacccatcgggga

SEQ ID NO: 45981 - DNA, 20 bp, Human herpesvirus 1
ccgccacccatcggggacct

SEQ ID NO: 45982 - DNA, 20 bp, Human herpesvirus 1
attgggggccggggccacgg

SEQ ID NO: 45983 - DNA, 20 bp, Human herpesvirus 1
ttgggggccggggccacgga

SEQ ID NO: 45984 - DNA, 20 bp, Human herpesvirus 1
ggggccggggccacggattt

SEQ ID NO: 45985 - DNA, 20 bp, Human herpesvirus 1
cctggttagcccggtgttgt

SEQ ID NO: 45986 - DNA, 20 bp, Human herpesvirus 1
ctggttagcccggtgttgtt

SEQ ID NO: 45987 - DNA, 20 bp, Human herpesvirus 1
gtggacgccggggccttggg

SEQ ID NO: 45988 - DNA, 20 bp, Human herpesvirus 1
tggacgccggggccttgggg

SEQ ID NO: 45989 - DNA, 20 bp, Human herpesvirus 1
gggcccgacggcgtagtgga

SEQ ID NO: 45990 - DNA, 20 bp, Human herpesvirus 1
ctccactacgccgtcgggcc

SEQ ID NO: 45991 - DNA, 20 bp, Human herpesvirus 1
gataccagactgaccgtggg

SEQ ID NO: 45992 - DNA, 20 bp, Human herpesvirus 1
cgcgtatgggtcggtgacgc

SEQ ID NO: 45993 - DNA, 20 bp, Human herpesvirus 1
gtcctggggatggccatagc

SEQ ID NO: 45994 - DNA, 20 bp, Human herpesvirus 1
tcctggggatggccatagcc

SEQ ID NO: 45995 - DNA, 20 bp, Human herpesvirus 1
ggcggctatggccatcccca

SEQ ID NO: 45996 - DNA, 20 bp, Human herpesvirus 1
ggcgcgtcaccgacccatac

SEQ ID NO: 45997 - DNA, 20 bp, Human herpesvirus 1
ttcacggggtccgagagacg

SEQ ID NO: 45998 - DNA, 20 bp, Human herpesvirus 1
acggggtccgagagacggac

SEQ ID NO: 45999 - DNA, 20 bp, Human herpesvirus 1
gcgagccgggtcctttatgt

SEQ ID NO: 46000 - DNA, 20 bp, Human herpesvirus 1
atgtcgcccacggacagggt

SEQ ID NO: 46001 - DNA, 20 bp, Human herpesvirus 1
tgtcgcccacggacagggta

SEQ ID NO: 46002 - DNA, 20 bp, Human herpesvirus 1
atcccacggcctcgccagtt

SEQ ID NO: 46003 - DNA, 20 bp, Human herpesvirus 1
tcccacggcctcgccagttt

SEQ ID NO: 46004 - DNA, 20 bp, Human herpesvirus 1
cggtcgaagcctactactcg

SEQ ID NO: 46005 - DNA, 20 bp, Human herpesvirus 1
ggtcgaagcctactactcgg

SEQ ID NO: 46006 - DNA, 20 bp, Human herpesvirus 1
gccgcctcgtcttcgctttc

SEQ ID NO: 46007 - DNA, 20 bp, Human herpesvirus 1
tgtcgggcggatttggggcg

SEQ ID NO: 46008 - DNA, 20 bp, Human herpesvirus 1
ggggcgctcctgatgtggct

SEQ ID NO: 46009 - DNA, 20 bp, Human herpesvirus 1
gggcgctcctgatgtggctg

SEQ ID NO: 46010 - DNA, 20 bp, Human herpesvirus 1
tagcggagcagccacatcag

SEQ ID NO: 46011 - DNA, 20 bp, Human herpesvirus 1
agcggagcagccacatcagg

SEQ ID NO: 46012 - DNA, 20 bp, Influenza A virus
ggataattagcttgatgtta

SEQ ID NO: 46013 - DNA, 20 bp, Influenza A virus
gcttgatgttacaaattggg

SEQ ID NO: 46014 - DNA, 20 bp, Influenza A virus
atgttacaaattgggaacat

SEQ ID NO: 46015 - DNA, 20 bp, Influenza A virus
caaattgggaacataatctc

SEQ ID NO: 46016 - DNA, 20 bp, Influenza A virus
ggaacataatctcaatatgg

SEQ ID NO: 46017 - DNA, 20 bp, Influenza A virus
gtcggcaagtgcttgccatg

SEQ ID NO: 46018 - DNA, 20 bp, Influenza A virus
ccatgatggcaccagttggt

SEQ ID NO: 46019 - DNA, 20 bp, Influenza A virus
gttgacaattggaatttctg

SEQ ID NO: 46020 - DNA, 20 bp, Influenza A virus
acaattggaatttctggccc

SEQ ID NO: 46021 - DNA, 20 bp, Influenza A virus
gaatttctggcccagacaat

SEQ ID NO: 46022 - DNA, 20 bp, Influenza A virus
aatgcccctaattatcacta

SEQ ID NO: 46023 - DNA, 20 bp, Influenza A virus
tcactatgaggagtgctcct

SEQ ID NO: 46024 - DNA, 20 bp, Influenza A virus
tcctgatgctggcgaaatca

SEQ ID NO: 46025 - DNA, 20 bp, Influenza A virus
gcatggctcaaatcggccat

SEQ ID NO: 46026 - DNA, 20 bp, Influenza A virus
gagccatgccaattatccct

SEQ ID NO: 46027 - DNA, 20 bp, Influenza A virus
ggatcgggagaaccaaaagc

SEQ ID NO: 46028 - DNA, 20 bp, Influenza A virus
gatcgggagaaccaaaagca

SEQ ID NO: 46029 - DNA, 20 bp, Influenza A virus
caggagcggctttgaaatga

SEQ ID NO: 46030 - DNA, 20 bp, Influenza A virus
gaaatgatttgggatccaaa

SEQ ID NO: 46031 - DNA, 20 bp, Influenza A virus
aaatgatttgggatccaaat

SEQ ID NO: 46032 - DNA, 20 bp, Hepatitis B virus
ggacggaaattgcacctgta

SEQ ID NO: 46033 - DNA, 20 bp, Hepatitis B virus
cacctgtattcccatcccat

SEQ ID NO: 46034 - DNA, 20 bp, Hepatitis B virus
ccatcccatcatcctgggct

SEQ ID NO: 46035 - DNA, 20 bp, Hepatitis B virus
cggaaaattcctatgggagt

SEQ ID NO: 46036 - DNA, 20 bp, Hepatitis B virus
ggaaaattcctatgggagtg

SEQ ID NO: 46037 - DNA, 20 bp, Hepatitis B virus
ctctctaaattttatgggtt

SEQ ID NO: 46038 - DNA, 20 bp, Hepatitis B virus
tatgggttatgtcattggat

SEQ ID NO: 46039 - DNA, 20 bp, Hepatitis B virus
atgggttatgtcattggatg

SEQ ID NO: 46040 - DNA, 20 bp, Hepatitis B virus
tgggttatgtcattggatgt

SEQ ID NO: 46041 - DNA, 20 bp, Hepatitis B virus
tgtcattggatgttatgggt

SEQ ID NO: 46042 - DNA, 20 bp, Hepatitis B virus
gcttcacctctgcacgtcgc

SEQ ID NO: 46043 - DNA, 20 bp, Hepatitis B virus
acctctgcacgtcgcatgga

SEQ ID NO: 46044 - DNA, 20 bp, Hepatitis B virus
cccaaggtcttacataagag

SEQ ID NO: 46045 - DNA, 20 bp, Hepatitis B virus
cataagaggactcttggact

SEQ ID NO: 46046 - DNA, 20 bp, Hepatitis B virus
gactctcagcaatgtcaacg

SEQ ID NO: 46047 - DNA, 20 bp, Hepatitis B virus
ttcacctcaccatactgcac

SEQ ID NO: 46048 - DNA, 20 bp, Hepatitis B virus
acctcaccatactgcactca

SEQ ID NO: 46049 - DNA, 20 bp, Hepatitis B virus
tttgctggggggaactaatg

SEQ ID NO: 46050 - DNA, 20 bp, Hepatitis B virus
gctggggggaactaatgact

SEQ ID NO: 46051 - DNA, 20 bp, Hepatitis B virus
ctggggggaactaatgactc

SEQ ID NO: 46052 - DNA, 20 bp, Hepatitis B virus
tgtgggtcaccatattcttg

SEQ ID NO: 46053 - DNA, 20 bp, Hepatitis B virus
gtgggtcaccatattcttgg

SEQ ID NO: 46054 - DNA, 20 bp, Hepatitis B virus
tgggtcaccatattcttggg

SEQ ID NO: 46055 - DNA, 20 bp, Hepatitis B virus
ttgggaacaagatctacagc

SEQ ID NO: 46056 - DNA, 20 bp, Hepatitis B virus
ggaacaagatctacagcatg

SEQ ID NO: 46057 - DNA, 20 bp, Influenza A virus
agaagtacacatcggggaga

SEQ ID NO: 46058 - DNA, 20 bp, Influenza A virus
tcctgtctccccgatgtgta

SEQ ID NO: 46059 - DNA, 20 bp, Influenza A virus
cctgtctccccgatgtgtac

SEQ ID NO: 46060 - DNA, 20 bp, Influenza A virus
ctgtctccccgatgtgtact

SEQ ID NO: 46061 - DNA, 20 bp, Influenza A virus
ttaattatggccatatggtc

SEQ ID NO: 46062 - DNA, 20 bp, Influenza A virus
ggctgtaacatggtggaata

SEQ ID NO: 46063 - DNA, 20 bp, Influenza A virus
gctgtaacatggtggaatag

SEQ ID NO: 46064 - DNA, 20 bp, Influenza A virus
cccaaaagtatacaagactt

SEQ ID NO: 46065 - DNA, 20 bp, Influenza A virus
tcaaaataagtcttgtatac

SEQ ID NO: 46066 - DNA, 20 bp, Influenza A virus
tatacttttgggtaatggac

SEQ ID NO: 46067 - DNA, 20 bp, Influenza A virus
attggagatgtgccacagca

SEQ ID NO: 46068 - DNA, 20 bp, Influenza A virus
ttggagatgtgccacagcac

SEQ ID NO: 46069 - DNA, 20 bp, Influenza A virus
gagatgtgccacagcacaca

SEQ ID NO: 46070 - DNA, 20 bp, Influenza A virus
tcccgccaatttgtgtgctg

SEQ ID NO: 46071 - DNA, 20 bp, Influenza A virus
gtgtgctgtggcacatctcc

SEQ ID NO: 46072 - DNA, 20 bp, Influenza A virus
caggcaatctccaaacattg

SEQ ID NO: 46073 - DNA, 20 bp, Influenza A virus
aagataagagtacatgaggg

SEQ ID NO: 46074 - DNA, 20 bp, Influenza A virus
acaatggtggggaaaagagc

SEQ ID NO: 46075 - DNA, 20 bp, Influenza A virus
ctcttttccccaccattgtg

SEQ ID NO: 46076 - DNA, 20 bp, Influenza A virus
tccccaccattgtgaactcc

SEQ ID NO: 46077 - DNA, 20 bp, Influenza A virus
aaccccatgcatcagctttt

SEQ ID NO: 46078 - DNA, 20 bp, Influenza A virus
taaggcattttcagaaagat

SEQ ID NO: 46079 - DNA, 20 bp, Influenza A virus
aaggcattttcagaaagatg

SEQ ID NO: 46080 - DNA, 20 bp, Influenza A virus
aggcattttcagaaagatgc

SEQ ID NO: 46081 - DNA, 20 bp, Influenza A virus
tcagaaagatgcgaaagtgc

SEQ ID NO: 46082 - DNA, 20 bp, Influenza A virus
gagaccaacgcgggaatgta

SEQ ID NO: 46083 - DNA, 20 bp, Influenza A virus
ttgtctcctgaggaggtcag

SEQ ID NO: 46084 - DNA, 20 bp, Influenza A virus
tctcctgaggaggtcagtga

SEQ ID NO: 46085 - DNA, 20 bp, Influenza A virus
acaataacatattcatcgtc

SEQ ID NO: 46086 - DNA, 20 bp, Influenza A virus
atcgtcgatgatgtgggaga

SEQ ID NO: 46087 - DNA, 20 bp, Influenza A virus
gtcagaactctattccaaca

SEQ ID NO: 46088 - DNA, 20 bp, Influenza A virus
tcagaactctattccaacaa

SEQ ID NO: 46089 - DNA, 20 bp, Influenza A virus
caacaaatgagagacgtact

SEQ ID NO: 46090 - DNA, 20 bp, Influenza A virus
ggacatttgacaccacccag

SEQ ID NO: 46091 - DNA, 20 bp, Influenza A virus
gacaccacccagataataaa

SEQ ID NO: 46092 - DNA, 20 bp, Influenza A virus
aattgaagacccagatgaaa

SEQ ID NO: 46093 - DNA, 20 bp, Influenza A virus
attgaagacccagatgaaag

SEQ ID NO: 46094 - DNA, 20 bp, Influenza A virus
aagacccagatgaaagcaca

SEQ ID NO: 46095 - DNA, 20 bp, Influenza A virus
agagggtttctcattatagg

SEQ ID NO: 46096 - DNA, 20 bp, Influenza A virus
ctcattataggtaaggaaga

SEQ ID NO: 46097 - DNA, 20 bp, Human papillomavirus type 178
ctttgccttgcattttctgt

SEQ ID NO: 46098 - DNA, 20 bp, Human papillomavirus type 178
gccttgcattttctgtcgtc

SEQ ID NO: 46099 - DNA, 20 bp, Human papillomavirus type 178
ccttgcattttctgtcgtcg

SEQ ID NO: 46100 - DNA, 20 bp, Human papillomavirus type 178
cattttctgtcgtcgtgatt

SEQ ID NO: 46101 - DNA, 20 bp, Human papillomavirus type 178
tctgtcgtcgtgatttgtgt

SEQ ID NO: 46102 - DNA, 20 bp, Human papillomavirus type 178
tgtatggggttgcttactaa

SEQ ID NO: 46103 - DNA, 20 bp, Human papillomavirus type 178
gtatggggttgcttactaat

SEQ ID NO: 46104 - DNA, 20 bp, Human papillomavirus type 178
tatggggttgcttactaatg

SEQ ID NO: 46105 - DNA, 20 bp, Human papillomavirus type 178
cttactaatgaggagaagat

SEQ ID NO: 46106 - DNA, 20 bp, Human papillomavirus type 178
ctaatgaggagaagattgat

SEQ ID NO: 46107 - DNA, 20 bp, Human papillomavirus type 178
acagctgttgcgacaactgt

SEQ ID NO: 46108 - DNA, 20 bp, Human papillomavirus type 178
cgacaactgttgccgagtaa

SEQ ID NO: 46109 - DNA, 20 bp, Human papillomavirus type 178
ccgagtaattcgtgtcgttg

SEQ ID NO: 46110 - DNA, 20 bp, Human papillomavirus type 178
gtgtcgttgttgttgctact

SEQ ID NO: 46111 - DNA, 20 bp, Human papillomavirus type 178
ttgttgctactgaaactggc

SEQ ID NO: 46112 - DNA, 20 bp, Human papillomavirus type 178
gatgacagtacagaatcaaa

SEQ ID NO: 46113 - DNA, 20 bp, Human papillomavirus type 178
atgacagtacagaatcaaac

SEQ ID NO: 46114 - DNA, 20 bp, Human papillomavirus type 178
gacgacagtgatgaggtgga

SEQ ID NO: 46115 - DNA, 20 bp, Human papillomavirus type 178
attaaacagagccagggtat

SEQ ID NO: 46116 - DNA, 20 bp, Human papillomavirus type 178
aacagagccagggtattccc

SEQ ID NO: 46117 - DNA, 20 bp, Human papillomavirus type 178
agcaggatgaagctgaaaat

SEQ ID NO: 46118 - DNA, 20 bp, Human papillomavirus type 178
tacgtcgcaggtagagatcg

SEQ ID NO: 46119 - DNA, 20 bp, Human papillomavirus type 178
acgtcgcaggtagagatcgc

SEQ ID NO: 46120 - DNA, 20 bp, Human papillomavirus type 178
cgtcgcaggtagagatcgcc

SEQ ID NO: 46121 - DNA, 20 bp, Human papillomavirus type 178
gataatagtaatgttagtac

SEQ ID NO: 46122 - DNA, 20 bp, Human papillomavirus type 178
ttagacaagaaaatgtgtat

SEQ ID NO: 46123 - DNA, 20 bp, Human papillomavirus type 178
gacaagaaaatgtgtattta

SEQ ID NO: 46124 - DNA, 20 bp, Human papillomavirus type 178
atattatgggagaaaagaag

SEQ ID NO: 46125 - DNA, 20 bp, Human papillomavirus type 178
tattatgggagaaaagaagg

SEQ ID NO: 46126 - DNA, 20 bp, Human papillomavirus type 178
tgggagaaaagaaggcctca

SEQ ID NO: 46127 - DNA, 20 bp, Human papillomavirus type 178
tcccctcactccgggaagaa

SEQ ID NO: 46128 - DNA, 20 bp, Human papillomavirus type 178
ccagtcccaccgaaaacacc

SEQ ID NO: 46129 - DNA, 20 bp, Human papillomavirus type 178
cagtcccaccgaaaacaccg

SEQ ID NO: 46130 - DNA, 20 bp, Human papillomavirus type 178
ttggagtcgtcctgggcttt

SEQ ID NO: 46131 - DNA, 20 bp, Human papillomavirus type 178
tggagtcgtcctgggctttc

SEQ ID NO: 46132 - DNA, 20 bp, Human papillomavirus type 178
ttaaaaattataggtagtgt

SEQ ID NO: 46133 - DNA, 20 bp, Human papillomavirus type 178
aaaattataggtagtgttgt

SEQ ID NO: 46134 - DNA, 20 bp, Human papillomavirus type 178
taggtagtgttgtttatttt

SEQ ID NO: 46135 - DNA, 20 bp, Human papillomavirus type 178
tttattttggaggactgggt

SEQ ID NO: 46136 - DNA, 20 bp, Human papillomavirus type 178
attttggaggactgggtata

SEQ ID NO: 46137 - DNA, 20 bp, Human papillomavirus type 178
atgctggctcagcagaacca

SEQ ID NO: 46138 - DNA, 20 bp, Human papillomavirus type 178
caactatagatcctatatca

SEQ ID NO: 46139 - DNA, 20 bp, Human papillomavirus type 178
cagcagtagataaccaacct

SEQ ID NO: 46140 - DNA, 20 bp, Human papillomavirus type 178
gttatctactgctgtaacgt

SEQ ID NO: 46141 - DNA, 20 bp, Human papillomavirus type 178
tctactgctgtaacgtctga

SEQ ID NO: 46142 - DNA, 20 bp, Human papillomavirus type 178
gcagtttgatcaagacgtgc

SEQ ID NO: 46143 - DNA, 20 bp, Human papillomavirus type 178
cagtttgatcaagacgtgca

SEQ ID NO: 46144 - DNA, 20 bp, Human papillomavirus type 178
gatcaagacgtgcagaatgt

SEQ ID NO: 46145 - DNA, 20 bp, Human papillomavirus type 178
atcaagacgtgcagaatgta

SEQ ID NO: 46146 - DNA, 20 bp, Human papillomavirus type 178
tgcagatgttatcacagtac

SEQ ID NO: 46147 - DNA, 20 bp, Human papillomavirus type 178
gggacaataggccaacattc

SEQ ID NO: 46148 - DNA, 20 bp, Human papillomavirus type 178
aggcgaaactgcaattgtag

SEQ ID NO: 46149 - DNA, 20 bp, Human papillomavirus type 178
tagatgcagtggcagagagc

SEQ ID NO: 46150 - DNA, 20 bp, Human papillomavirus type 178
gtagatatccctaatagtag

SEQ ID NO: 46151 - DNA, 20 bp, Human papillomavirus type 178
tagatatccctaatagtagt

SEQ ID NO: 46152 - DNA, 20 bp, Human papillomavirus type 178
tcagcacggacgaatacgtg

SEQ ID NO: 46153 - DNA, 20 bp, Human papillomavirus type 178
ttctatgctggtacagaacg

SEQ ID NO: 46154 - DNA, 20 bp, Human papillomavirus type 178
tctatgctggtacagaacgc

SEQ ID NO: 46155 - DNA, 20 bp, Human papillomavirus type 178
ctatgctggtacagaacgct

SEQ ID NO: 46156 - DNA, 20 bp, Human papillomavirus type 178
tatgctggtacagaacgctt

SEQ ID NO: 46157 - DNA, 20 bp, Human papillomavirus type 178
ggggtagccacaacaggcaa

SEQ ID NO: 46158 - DNA, 20 bp, Human papillomavirus type 178
tttaacaaatataatgatac

SEQ ID NO: 46159 - DNA, 20 bp, Human papillomavirus type 178
aacaaatataatgatactga

SEQ ID NO: 46160 - DNA, 20 bp, Human papillomavirus type 178
acaaatataatgatactgaa

SEQ ID NO: 46161 - DNA, 20 bp, Human papillomavirus type 178
tgcctattatcatctgtttg

SEQ ID NO: 46162 - DNA, 20 bp, Human papillomavirus type 178
tgttatacaagatggggata

SEQ ID NO: 46163 - DNA, 20 bp, Human papillomavirus type 178
tacaagatggggatatgtgt

SEQ ID NO: 46164 - DNA, 20 bp, Human papillomavirus type 178
gctttggtgcttgcaatttc

SEQ ID NO: 46165 - DNA, 20 bp, Human papillomavirus type 178
ggtgcttgcaatttcagaac

SEQ ID NO: 46166 - DNA, 20 bp, Human papillomavirus type 178
gtgcttgcaatttcagaaca

SEQ ID NO: 46167 - DNA, 20 bp, Human papillomavirus type 178
caaagattataccttttggc

SEQ ID NO: 46168 - DNA, 20 bp, Human papillomavirus type 178
taccttttggcaaatagata

SEQ ID NO: 46169 - DNA, 20 bp, Human papillomavirus type 178
tggcaaatagatatgactga

SEQ ID NO: 46170 - DNA, 20 bp, Human papillomavirus type 178
ggcaaatagatatgactgaa

SEQ ID NO: 46171 - DNA, 20 bp, Human papillomavirus type 178
gcaaatagatatgactgaac

SEQ ID NO: 46172 - DNA, 20 bp, Human papillomavirus type 178
caaaactgtgaatggtctct

SEQ ID NO: 46173 - DNA, 20 bp, Human papillomavirus type 178
gtctgaataaattgctgatg

SEQ ID NO: 46174 - DNA, 20 bp, Human papillomavirus type 178
tctgaataaattgctgatgc

SEQ ID NO: 46175 - DNA, 20 bp, Human papillomavirus type 178
ctgatgcgcaataatctggt

SEQ ID NO: 46176 - DNA, 20 bp, Human papillomavirus type 178
caattttactgactcatttg

SEQ ID NO: 46177 - DNA, 20 bp, Human papillomavirus type 178
ctggtaagtttttggcgcca

SEQ ID NO: 46178 - DNA, 20 bp, Human papillomavirus type 178
tggtaagtttttggcgccaa

SEQ ID NO: 46179 - DNA, 20 bp, Human papillomavirus type 178
ttggcgccaaagggcaaaaa

SEQ ID NO: 46180 - DNA, 20 bp, Human papillomavirus type 178
tggcgccaaagggcaaaaaa

SEQ ID NO: 46181 - DNA, 20 bp, Human papillomavirus type 178
ggcgccaaagggcaaaaaag

SEQ ID NO: 46182 - DNA, 20 bp, Human papillomavirus type 48
gaagagcttgttttgcctgc

SEQ ID NO: 46183 - DNA, 20 bp, Human papillomavirus type 48
ttttgcctgctaacttaatt

SEQ ID NO: 46184 - DNA, 20 bp, Human papillomavirus type 48
tgcctgctaacttaatttct

SEQ ID NO: 46185 - DNA, 20 bp, Human papillomavirus type 48
gcctgctaacttaatttctg

SEQ ID NO: 46186 - DNA, 20 bp, Human papillomavirus type 48
cctgctaacttaatttctga

SEQ ID NO: 46187 - DNA, 20 bp, Human papillomavirus type 48
tcggcagtgcatataacgcc

SEQ ID NO: 46188 - DNA, 20 bp, Human papillomavirus type 48
aatgatagtggagttgttga

SEQ ID NO: 46189 - DNA, 20 bp, Human papillomavirus type 48
atgatagtggagttgttgaa

SEQ ID NO: 46190 - DNA, 20 bp, Human papillomavirus type 48
ttgaagatgaagctgaaagt

SEQ ID NO: 46191 - DNA, 20 bp, Human papillomavirus type 48
aagatgaagctgaaagtaat

SEQ ID NO: 46192 - DNA, 20 bp, Human papillomavirus type 48
gggtccgactctgcaccaac

SEQ ID NO: 46193 - DNA, 20 bp, Human papillomavirus type 48
ggaagtgggatcaagatcta

SEQ ID NO: 46194 - DNA, 20 bp, Human papillomavirus type 48
caagcgttgtagatcttgat

SEQ ID NO: 46195 - DNA, 20 bp, Human papillomavirus type 48
tagatcttgatcccacttcc

SEQ ID NO: 46196 - DNA, 20 bp, Human papillomavirus type 48
atcccacttccgaaggagtt

SEQ ID NO: 46197 - DNA, 20 bp, Human papillomavirus type 48
gaaatttgggaataggatct

SEQ ID NO: 46198 - DNA, 20 bp, Human papillomavirus type 48
gggaataggatctggaaaag

SEQ ID NO: 46199 - DNA, 20 bp, Human papillomavirus type 48
ggaataggatctggaaaagg

SEQ ID NO: 46200 - DNA, 20 bp, Human papillomavirus type 48
ggatatagaccattaggatc

SEQ ID NO: 46201 - DNA, 20 bp, Human papillomavirus type 48
gatatagaccattaggatcc

SEQ ID NO: 46202 - DNA, 20 bp, Human papillomavirus type 48
caccagatgcaggtccaggt

SEQ ID NO: 46203 - DNA, 20 bp, Human papillomavirus type 48
aactattcacctttagagat

SEQ ID NO: 46204 - DNA, 20 bp, Human papillomavirus type 48
acctttagagatccagcaac

SEQ ID NO: 46205 - DNA, 20 bp, Human papillomavirus type 48
agagatccagcaactgatgt

SEQ ID NO: 46206 - DNA, 20 bp, Human papillomavirus type 48
gagatccagcaactgatgta

SEQ ID NO: 46207 - DNA, 20 bp, Human papillomavirus type 48
tttgcaggagagacaattgg

SEQ ID NO: 46208 - DNA, 20 bp, Human papillomavirus type 48
gcaggagagacaattgggga

SEQ ID NO: 46209 - DNA, 20 bp, Human papillomavirus type 48
caggagagacaattggggac

SEQ ID NO: 46210 - DNA, 20 bp, Human papillomavirus type 48
gggacaacatatttgaagag

SEQ ID NO: 46211 - DNA, 20 bp, Human papillomavirus type 48
gaagagatacccttgcagaa

SEQ ID NO: 46212 - DNA, 20 bp, Human papillomavirus type 48
gatccagatattagtataca

SEQ ID NO: 46213 - DNA, 20 bp, Human papillomavirus type 48
atccagatattagtatacag

SEQ ID NO: 46214 - DNA, 20 bp, Human papillomavirus type 48
gtatacagttccagcgtgat

SEQ ID NO: 46215 - DNA, 20 bp, Human papillomavirus type 48
cagcgtgatgtaaatagcct

SEQ ID NO: 46216 - DNA, 20 bp, Human papillomavirus type 48
tgctgacattgcttatttaa

SEQ ID NO: 46217 - DNA, 20 bp, Human papillomavirus type 48
cagtttctggactttagata

SEQ ID NO: 46218 - DNA, 20 bp, Human papillomavirus type 48
ctggactttagatatgacag

SEQ ID NO: 46219 - DNA, 20 bp, Human papillomavirus type 48
tggactttagatatgacaga

SEQ ID NO: 46220 - DNA, 20 bp, Human papillomavirus type 48
agatatgacagagcgcttct

SEQ ID NO: 46221 - DNA, 20 bp, Human papillomavirus type 48
gatatgacagagcgcttctc

SEQ ID NO: 46222 - DNA, 20 bp, Human papillomavirus type 48
atacgcctccattgggtggg

SEQ ID NO: 46223 - DNA, 20 bp, Human papillomavirus type 48
tacgcctccattgggtgggt

SEQ ID NO: 46224 - DNA, 20 bp, Human papillomavirus type 48
ggtgggttctgacctataaa

SEQ ID NO: 46225 - DNA, 20 bp, Human papillomavirus type 48
tgacctataaactcctgggt

SEQ ID NO: 46226 - DNA, 20 bp, Human papillomavirus type 48
ggtcagcagacgctgaggag

SEQ ID NO: 46227 - DNA, 20 bp, Human immunodeficiency virus 2
gcagaattatactcatgggc

SEQ ID NO: 46228 - DNA, 20 bp, Human immunodeficiency virus 2
tactcatgggccaggagtaa

SEQ ID NO: 46229 - DNA, 20 bp, Human immunodeficiency virus 2
ggtaccttactcctggccca

SEQ ID NO: 46230 - DNA, 20 bp, Human immunodeficiency virus 2
ctcctggcccatgagtataa

SEQ ID NO: 46231 - DNA, 20 bp, Human immunodeficiency virus 2
tgccaatctggtattatccc

SEQ ID NO: 46232 - DNA, 20 bp, Human immunodeficiency virus 2
ccagaaggggctgtaaccaa

SEQ ID NO: 46233 - DNA, 20 bp, Human immunodeficiency virus 2
cagaaggggctgtaaccaag

SEQ ID NO: 46234 - DNA, 20 bp, Human immunodeficiency virus 2
ctgtataaatgtacccgctt

SEQ ID NO: 46235 - DNA, 20 bp, Human immunodeficiency virus 2
ttgcattgtattcagtcgct

SEQ ID NO: 46236 - DNA, 20 bp, Human immunodeficiency virus 2
cattgtattcagtcgctctg

SEQ ID NO: 46237 - DNA, 20 bp, Human immunodeficiency virus 2
gggaatccaaggcaggaaaa

SEQ ID NO: 46238 - DNA, 20 bp, Human immunodeficiency virus 2
ggaatccaaggcaggaaaat

SEQ ID NO: 46239 - DNA, 20 bp, Human immunodeficiency virus 2
gcgcccgaacagggacttga

SEQ ID NO: 46240 - DNA, 20 bp, Human immunodeficiency virus 2
aagaggactgagaagccctg

SEQ ID NO: 46241 - DNA, 20 bp, Human immunodeficiency virus 2
ctgccttcactcagccgagt

SEQ ID NO: 46242 - DNA, 20 bp, Human immunodeficiency virus 2
agagggaaaaaagcagacga

SEQ ID NO: 46243 - DNA, 20 bp, Human immunodeficiency virus 2
gaaaaagttaggttacggcc

SEQ ID NO: 46244 - DNA, 20 bp, Human immunodeficiency virus 2
ggttacggcccggcggaaag

SEQ ID NO: 46245 - DNA, 20 bp, Human immunodeficiency virus 2
cggcccggcggaaagaaaaa

SEQ ID NO: 46246 - DNA, 20 bp, Human immunodeficiency virus 2
aaacatattgtgtgggcagc

SEQ ID NO: 46247 - DNA, 20 bp, Human immunodeficiency virus 2
tacccatgcatttagagttc

SEQ ID NO: 46248 - DNA, 20 bp, Human immunodeficiency virus 2
acccatgcatttagagttcg

SEQ ID NO: 46249 - DNA, 20 bp, Human immunodeficiency virus 2
cccatgcatttagagttcgg

SEQ ID NO: 46250 - DNA, 20 bp, Human immunodeficiency virus 2
agagttcgggggctcagtgg

SEQ ID NO: 46251 - DNA, 20 bp, Human immunodeficiency virus 2
gagttcgggggctcagtggc

SEQ ID NO: 46252 - DNA, 20 bp, Human immunodeficiency virus 2
gttgggttgtactttctgac

SEQ ID NO: 46253 - DNA, 20 bp, Human immunodeficiency virus 2
ggttgtactttctgacacac

SEQ ID NO: 46254 - DNA, 20 bp, Human immunodeficiency virus 2
tactttctgacacacttttg

SEQ ID NO: 46255 - DNA, 20 bp, Human immunodeficiency virus 2
ctgacacacttttgcagccc

SEQ ID NO: 46256 - DNA, 20 bp, Human immunodeficiency virus 2
tgacacacttttgcagccct

SEQ ID NO: 46257 - DNA, 20 bp, Human immunodeficiency virus 2
gcagcagcccaacaaagaaa

SEQ ID NO: 46258 - DNA, 20 bp, Human immunodeficiency virus 2
cagcagcccaacaaagaaag

SEQ ID NO: 46259 - DNA, 20 bp, Human immunodeficiency virus 2
ggtattggaactgtggaaag

SEQ ID NO: 46260 - DNA, 20 bp, Human immunodeficiency virus 2
gaactgtggaaaggagggac

SEQ ID NO: 46261 - DNA, 20 bp, Human immunodeficiency virus 2
ccacacttccagcagccctg

SEQ ID NO: 46262 - DNA, 20 bp, Human immunodeficiency virus 2
ggcagaaatattctgacagc

SEQ ID NO: 46263 - DNA, 20 bp, Human immunodeficiency virus 2
gcagaaatattctgacagcc

SEQ ID NO: 46264 - DNA, 20 bp, Human immunodeficiency virus 2
tgacagccttaggcatgtca

SEQ ID NO: 46265 - DNA, 20 bp, Human immunodeficiency virus 2
ggcatgtcattaaatttacc

SEQ ID NO: 46266 - DNA, 20 bp, Human immunodeficiency virus 2
aatttaccagttgccaagat

SEQ ID NO: 46267 - DNA, 20 bp, Human immunodeficiency virus 2
agctaggaattccacacccg

SEQ ID NO: 46268 - DNA, 20 bp, Human immunodeficiency virus 2
cacacccggcaggactagcc

SEQ ID NO: 46269 - DNA, 20 bp, Human immunodeficiency virus 2
gatgtaggggatgcctattt

SEQ ID NO: 46270 - DNA, 20 bp, Human immunodeficiency virus 2
ttccataccactacatgaag

SEQ ID NO: 46271 - DNA, 20 bp, Human immunodeficiency virus 2
tccataccactacatgaaga

SEQ ID NO: 46272 - DNA, 20 bp, Human immunodeficiency virus 2
taaatggcctagggttttct

SEQ ID NO: 46273 - DNA, 20 bp, Human immunodeficiency virus 2
tctactccagatgagaagtt

SEQ ID NO: 46274 - DNA, 20 bp, Human immunodeficiency virus 2
ctactccagatgagaagttc

SEQ ID NO: 46275 - DNA, 20 bp, Human immunodeficiency virus 2
tactccagatgagaagttcc

SEQ ID NO: 46276 - DNA, 20 bp, Human immunodeficiency virus 2
caaaaagaccctccatttca

SEQ ID NO: 46277 - DNA, 20 bp, Human immunodeficiency virus 2
tcttgagccaggaacaagaa

SEQ ID NO: 46278 - DNA, 20 bp, Human immunodeficiency virus 2
agccaggaacaagaaggata

SEQ ID NO: 46279 - DNA, 20 bp, Human immunodeficiency virus 2
ttaccaagaagaaaaagaat

SEQ ID NO: 46280 - DNA, 20 bp, Human immunodeficiency virus 2
ccaagaagaaaaagaattag

SEQ ID NO: 46281 - DNA, 20 bp, Human immunodeficiency virus 2
gaggcaacaatccaaaaaag

SEQ ID NO: 46282 - DNA, 20 bp, Human immunodeficiency virus 2
acatttaacctagtaggaga

SEQ ID NO: 46283 - DNA, 20 bp, Human immunodeficiency virus 2
aacctagtaggagatcctat

SEQ ID NO: 46284 - DNA, 20 bp, Human immunodeficiency virus 2
acctagtaggagatcctata

SEQ ID NO: 46285 - DNA, 20 bp, Human immunodeficiency virus 2
tacacagatggatcatgcaa

SEQ ID NO: 46286 - DNA, 20 bp, Human immunodeficiency virus 2
tgactgtctattgcatgatc

SEQ ID NO: 46287 - DNA, 20 bp, Human immunodeficiency virus 2
agtaagtcaaggcatcagac

SEQ ID NO: 46288 - DNA, 20 bp, Human immunodeficiency virus 2
gtaagtcaaggcatcagaca

SEQ ID NO: 46289 - DNA, 20 bp, Human immunodeficiency virus 2
ttcctggaaaagatagagcc

SEQ ID NO: 46290 - DNA, 20 bp, Human immunodeficiency virus 2
ctggaaaagatagagcccgc

SEQ ID NO: 46291 - DNA, 20 bp, Human immunodeficiency virus 2
ttcatgttcctcttgagcgg

SEQ ID NO: 46292 - DNA, 20 bp, Human immunodeficiency virus 2
ctattaaaactggccagtag

SEQ ID NO: 46293 - DNA, 20 bp, Human immunodeficiency virus 2
aaactggccagtaggtggcc

SEQ ID NO: 46294 - DNA, 20 bp, Human immunodeficiency virus 2
cacacagacaatggccccaa

SEQ ID NO: 46295 - DNA, 20 bp, Human immunodeficiency virus 2
acttcacaggaagtgaagat

SEQ ID NO: 46296 - DNA, 20 bp, Human immunodeficiency virus 2
acaggaagtgaagatggtgg

SEQ ID NO: 46297 - DNA, 20 bp, Human immunodeficiency virus 2
ccacagaacaagaaatacaa

SEQ ID NO: 46298 - DNA, 20 bp, Human immunodeficiency virus 2
ctccaaagaaaaaattcaaa

SEQ ID NO: 46299 - DNA, 20 bp, Human immunodeficiency virus 2
aaattttaaaaatttccagg

SEQ ID NO: 46300 - DNA, 20 bp, Human immunodeficiency virus 2
taaaaatttccaggtctatt

SEQ ID NO: 46301 - DNA, 20 bp, Human immunodeficiency virus 2
aaaaatttccaggtctatta

SEQ ID NO: 46302 - DNA, 20 bp, Human immunodeficiency virus 2
acctggtatacagaaaagtt

SEQ ID NO: 46303 - DNA, 20 bp, Human immunodeficiency virus 2
tggacagatgttaccccaga

SEQ ID NO: 46304 - DNA, 20 bp, Human immunodeficiency virus 2
ccccagactgtgcagacatc

SEQ ID NO: 46305 - DNA, 20 bp, Human immunodeficiency virus 2
ggatgtctgcacagtctggg

SEQ ID NO: 46306 - DNA, 20 bp, Human immunodeficiency virus 2
tctgtataccaggttaatct

SEQ ID NO: 46307 - DNA, 20 bp, Human immunodeficiency virus 2
tccaggtgtggcaaaggtcc

SEQ ID NO: 46308 - DNA, 20 bp, Human immunodeficiency virus 2
ccaggtgtggcaaaggtcct

SEQ ID NO: 46309 - DNA, 20 bp, Human immunodeficiency virus 2
caggtgtggcaaaggtcctg

SEQ ID NO: 46310 - DNA, 20 bp, Human immunodeficiency virus 2
gcatgatgaacaagggatgt

SEQ ID NO: 46311 - DNA, 20 bp, Human immunodeficiency virus 2
ctgacatcccttgttcatca

SEQ ID NO: 46312 - DNA, 20 bp, Human immunodeficiency virus 2
tgatccccgcttgctaattg

SEQ ID NO: 46313 - DNA, 20 bp, Human immunodeficiency virus 2
gatccccgcttgctaattgc

SEQ ID NO: 46314 - DNA, 20 bp, Human immunodeficiency virus 2
atccccgcttgctaattgct

SEQ ID NO: 46315 - DNA, 20 bp, Human immunodeficiency virus 2
ctaattgctcttggctacta

SEQ ID NO: 46316 - DNA, 20 bp, Human immunodeficiency virus 2
ctcttggctactatatccat

SEQ ID NO: 46317 - DNA, 20 bp, Human immunodeficiency virus 2
gccttctgcaccagacaagt

SEQ ID NO: 46318 - DNA, 20 bp, Human immunodeficiency virus 2
tgcaccagacaagtgagtat

SEQ ID NO: 46319 - DNA, 20 bp, Human immunodeficiency virus 2
gttgtcattttactaacaag

SEQ ID NO: 46320 - DNA, 20 bp, Human immunodeficiency virus 2
ttagtaaaatgacaacaaac

SEQ ID NO: 46321 - DNA, 20 bp, Human immunodeficiency virus 2
gtaaaatgacaacaaacagc

SEQ ID NO: 46322 - DNA, 20 bp, Human immunodeficiency virus 2
gagacatcaataaaaccatg

SEQ ID NO: 46323 - DNA, 20 bp, Human immunodeficiency virus 2
agacatcaataaaaccatgt

SEQ ID NO: 46324 - DNA, 20 bp, Human immunodeficiency virus 2
tagcagggttcaagggaata

SEQ ID NO: 46325 - DNA, 20 bp, Human immunodeficiency virus 2
aagggaataccacgaccccg

SEQ ID NO: 46326 - DNA, 20 bp, Human immunodeficiency virus 2
ggggtcgtggtattcccttg

SEQ ID NO: 46327 - DNA, 20 bp, Human immunodeficiency virus 2
gtgacaacacaacagctggc

SEQ ID NO: 46328 - DNA, 20 bp, Human immunodeficiency virus 2
tgacaacacaacagctggca

SEQ ID NO: 46329 - DNA, 20 bp, Human immunodeficiency virus 2
catgagacattgcaacacat

SEQ ID NO: 46330 - DNA, 20 bp, Human immunodeficiency virus 2
caacacatcaatcatcaaag

SEQ ID NO: 46331 - DNA, 20 bp, Human immunodeficiency virus 2
ggatgctatgaggtttagat

SEQ ID NO: 46332 - DNA, 20 bp, Human immunodeficiency virus 2
taccaataacacttatgtca

SEQ ID NO: 46333 - DNA, 20 bp, Human immunodeficiency virus 2
accaataacacttatgtcag

SEQ ID NO: 46334 - DNA, 20 bp, Human immunodeficiency virus 2
ccaataacacttatgtcagg

SEQ ID NO: 46335 - DNA, 20 bp, Human immunodeficiency virus 2
tgtcaggattagtgtttcac

SEQ ID NO: 46336 - DNA, 20 bp, Human immunodeficiency virus 2
gtgtttcactctcagccaat

SEQ ID NO: 46337 - DNA, 20 bp, Human immunodeficiency virus 2
ccatataaagcagataatta

SEQ ID NO: 46338 - DNA, 20 bp, Human immunodeficiency virus 2
atacctggcataaagtaggg

SEQ ID NO: 46339 - DNA, 20 bp, Human immunodeficiency virus 2
gcctcctagggaaggggagt

SEQ ID NO: 46340 - DNA, 20 bp, Human immunodeficiency virus 2
cctcctagggaaggggagtt

SEQ ID NO: 46341 - DNA, 20 bp, Human immunodeficiency virus 2
gcctgtgaatcaacagtaac

SEQ ID NO: 46342 - DNA, 20 bp, Human immunodeficiency virus 2
atggggatgtgcgtttagac

SEQ ID NO: 46343 - DNA, 20 bp, Human immunodeficiency virus 2
agacaggtctgccacactac

SEQ ID NO: 46344 - DNA, 20 bp, Human immunodeficiency virus 2
gacaggtctgccacactact

SEQ ID NO: 46345 - DNA, 20 bp, Human immunodeficiency virus 2
atcgcctgactggaaaaata

SEQ ID NO: 46346 - DNA, 20 bp, Human immunodeficiency virus 2
tcgcctgactggaaaaatat

SEQ ID NO: 46347 - DNA, 20 bp, Human immunodeficiency virus 2
aggcggcccaactgcaatat

SEQ ID NO: 46348 - DNA, 20 bp, Human immunodeficiency virus 2
ttggatccactcgcacccat

SEQ ID NO: 46349 - DNA, 20 bp, Human immunodeficiency virus 2
gatccactcgcacccatatt

SEQ ID NO: 46350 - DNA, 20 bp, Human immunodeficiency virus 2
cagttgggccgccttaagtc

SEQ ID NO: 46351 - DNA, 20 bp, Human immunodeficiency virus 2
ggccgccttaagtctcagcc

SEQ ID NO: 46352 - DNA, 20 bp, Human immunodeficiency virus 2
gtataggcagcaaaatatgg

SEQ ID NO: 46353 - DNA, 20 bp, Human immunodeficiency virus 2
tataggcagcaaaatatgga

SEQ ID NO: 46354 - DNA, 20 bp, Human immunodeficiency virus 2
tgatgatgatgacctaatag

SEQ ID NO: 46355 - DNA, 20 bp, Human immunodeficiency virus 2
ctgttacaccaagagtacca

SEQ ID NO: 46356 - DNA, 20 bp, Human immunodeficiency virus 2
caccaagagtaccacggaga

SEQ ID NO: 46357 - DNA, 20 bp, Human immunodeficiency virus 2
gtgtggcagtttgactccat

SEQ ID NO: 46358 - DNA, 20 bp, Human immunodeficiency virus 2
gactccatgctggcctataa

SEQ ID NO: 46359 - DNA, 20 bp, Human immunodeficiency virus 2
actccatgctggcctataac

SEQ ID NO: 46360 - DNA, 20 bp, Human immunodeficiency virus 2
actctgtacccagaagagtt

SEQ ID NO: 46361 - DNA, 20 bp, Human immunodeficiency virus 2
gggcacaagtcaggattgcc

SEQ ID NO: 46362 - DNA, 20 bp, Human immunodeficiency virus 2
tctccagcactagcaggtag

SEQ ID NO: 46363 - DNA, 20 bp, Human immunodeficiency virus 2
cctgctggactctcaccagt

SEQ ID NO: 46364 - DNA, 20 bp, Human immunodeficiency virus 2
gccggtactgggcagacggc

SEQ ID NO: 46365 - DNA, 20 bp, Human immunodeficiency virus 2
cttgcttaaagacctcttca

SEQ ID NO: 46366 - DNA, 20 bp, Human immunodeficiency virus 2
cttaaagacctcttcaataa

SEQ ID NO: 46367 - DNA, 20 bp, Influenza B virus
aaactgccactcaaggggaa

SEQ ID NO: 46368 - DNA, 20 bp, Influenza B virus
acttccccttgagtggcagt

SEQ ID NO: 46369 - DNA, 20 bp, Influenza B virus
cccttgagtggcagttttaa

SEQ ID NO: 46370 - DNA, 20 bp, Influenza B virus
agtggcagttttaaccacat

SEQ ID NO: 46371 - DNA, 20 bp, Influenza B virus
taaccacatgaggtgagttt

SEQ ID NO: 46372 - DNA, 20 bp, Influenza B virus
cctataatgcacgacagaac

SEQ ID NO: 46373 - DNA, 20 bp, Influenza B virus
ctataatgcacgacagaaca

SEQ ID NO: 46374 - DNA, 20 bp, Influenza B virus
ttgttctgtcgtgcattata

SEQ ID NO: 46375 - DNA, 20 bp, Influenza B virus
tgttctgtcgtgcattatag

SEQ ID NO: 46376 - DNA, 20 bp, Influenza B virus
gttctgtcgtgcattatagg

SEQ ID NO: 46377 - DNA, 20 bp, Influenza B virus
aacacaatggcttgggttat

SEQ ID NO: 46378 - DNA, 20 bp, Influenza B virus
ggttatcccaaaagacaaca

SEQ ID NO: 46379 - DNA, 20 bp, Influenza B virus
tcccaaaagacaacaacaag

SEQ ID NO: 46380 - DNA, 20 bp, Influenza B virus
gttcagaaggggaagaccaa

SEQ ID NO: 46381 - DNA, 20 bp, Influenza B virus
ttcagaaggggaagaccaaa

SEQ ID NO: 46382 - DNA, 20 bp, Influenza B virus
ttgttgattacatggtacaa

SEQ ID NO: 46383 - DNA, 20 bp, Influenza B virus
ttgattacatggtacaaaaa

SEQ ID NO: 46384 - DNA, 20 bp, Influenza B virus
attacatggtacaaaaacct

SEQ ID NO: 46385 - DNA, 20 bp, Influenza B virus
catggtacaaaaacctggaa

SEQ ID NO: 46386 - DNA, 20 bp, Influenza B virus
tttatcaaagaggcatttta

SEQ ID NO: 46387 - DNA, 20 bp, Influenza B virus
aagctggccaatggaaccaa

SEQ ID NO: 46388 - DNA, 20 bp, Influenza B virus
aaggaaagaggtttcttcgg

SEQ ID NO: 46389 - DNA, 20 bp, Influenza B virus
cttcggagctattgctggtt

SEQ ID NO: 46390 - DNA, 20 bp, Influenza B virus
ttcggagctattgctggttt

SEQ ID NO: 46391 - DNA, 20 bp, Influenza B virus
ggagctattgctggtttctt

SEQ ID NO: 46392 - DNA, 20 bp, Influenza B virus
acgacgaaatactcgagcta

SEQ ID NO: 46393 - DNA, 20 bp, Influenza B virus
cagtcttgctttccaacgaa

SEQ ID NO: 46394 - DNA, 20 bp, Influenza B virus
gttggaaagcaagactgcaa

SEQ ID NO: 46395 - DNA, 20 bp, Influenza B virus
gaaagcaagactgcaagctc

SEQ ID NO: 46396 - DNA, 20 bp, Influenza B virus
gtgagcttattgtatcagct

SEQ ID NO: 46397 - DNA, 20 bp, Influenza B virus
cctagacaggatagctgctg

SEQ ID NO: 46398 - DNA, 20 bp, Influenza B virus
aatgcaggagatttttctct

SEQ ID NO: 46399 - DNA, 20 bp, Influenza B virus
atgcaggagatttttctctt

SEQ ID NO: 46400 - DNA, 20 bp, Influenza B virus
ttctcttcccacttttgatt

SEQ ID NO: 46401 - DNA, 20 bp, Influenza B virus
tctcttcccacttttgattc

SEQ ID NO: 46402 - DNA, 20 bp, Influenza A virus
agctatacaagaagctgaaa

SEQ ID NO: 46403 - DNA, 20 bp, Influenza A virus
catggggctaaggaggtcgc

SEQ ID NO: 46404 - DNA, 20 bp, Influenza A virus
agtagctgagtgcgacctcc

SEQ ID NO: 46405 - DNA, 20 bp, Influenza A virus
gccccatggaatgttatttc

SEQ ID NO: 46406 - DNA, 20 bp, Influenza A virus
tttctcttttcagcttcttg

SEQ ID NO: 46407 - DNA, 20 bp, Influenza A virus
ctagtcaggctaggcagatg

SEQ ID NO: 46408 - DNA, 20 bp, Influenza A virus
cgctgcctgctcactcgatc

SEQ ID NO: 46409 - DNA, 20 bp, Influenza A virus
ttgttgccgcaagtatcatt

SEQ ID NO: 46410 - DNA, 20 bp, Influenza A virus
ttgccgcaagtatcattggg

SEQ ID NO: 46411 - DNA, 20 bp, Influenza A virus
ccgcaagtatcattgggata

SEQ ID NO: 46412 - DNA, 20 bp, Influenza A virus
ggatactgcacttgatattg

SEQ ID NO: 46413 - DNA, 20 bp, Influenza A virus
atattgtggattcttgatcg

SEQ ID NO: 46414 - DNA, 20 bp, Human papillomavirus type 161
cagcctcgttaccagctatc

SEQ ID NO: 46415 - DNA, 20 bp, Human papillomavirus type 161
ccagctatcagcctttttga

SEQ ID NO: 46416 - DNA, 20 bp, Human papillomavirus type 161
ttgaagaattattgcgcgga

SEQ ID NO: 46417 - DNA, 20 bp, Human papillomavirus type 161
tgaagaattattgcgcggag

SEQ ID NO: 46418 - DNA, 20 bp, Human papillomavirus type 161
gaagaattattgcgcggagg

SEQ ID NO: 46419 - DNA, 20 bp, Human papillomavirus type 161
cctggcattgtataacaagc

SEQ ID NO: 46420 - DNA, 20 bp, Human papillomavirus type 161
tataacaagcaagtaactga

SEQ ID NO: 46421 - DNA, 20 bp, Human papillomavirus type 161
agccttacatgtgctaaaac

SEQ ID NO: 46422 - DNA, 20 bp, Human papillomavirus type 161
gccttacatgtgctaaaacg

SEQ ID NO: 46423 - DNA, 20 bp, Human papillomavirus type 161
catgtgctaaaacgaaagta

SEQ ID NO: 46424 - DNA, 20 bp, Human papillomavirus type 161
ttttagaaagtttgcagtgc

SEQ ID NO: 46425 - DNA, 20 bp, Human papillomavirus type 161
tttagaaagtttgcagtgca

SEQ ID NO: 46426 - DNA, 20 bp, Human papillomavirus type 161
ttagaaagtttgcagtgcaa

SEQ ID NO: 46427 - DNA, 20 bp, Human papillomavirus type 161
tagaaagtttgcagtgcaat

SEQ ID NO: 46428 - DNA, 20 bp, Human papillomavirus type 161
agaaagtttgcagtgcaatt

SEQ ID NO: 46429 - DNA, 20 bp, Human papillomavirus type 161
caatggaaccttttatgagg

SEQ ID NO: 46430 - DNA, 20 bp, Human papillomavirus type 161
tatgaggaggttacaggaga

SEQ ID NO: 46431 - DNA, 20 bp, Human papillomavirus type 161
atgaggaggttacaggagaa

SEQ ID NO: 46432 - DNA, 20 bp, Human papillomavirus type 161
tgaggaggttacaggagaaa

SEQ ID NO: 46433 - DNA, 20 bp, Human papillomavirus type 161
caggagaaagagtatacttt

SEQ ID NO: 46434 - DNA, 20 bp, Human papillomavirus type 161
agctgaggatttgtataaac

SEQ ID NO: 46435 - DNA, 20 bp, Human papillomavirus type 161
gtataaacaatgctttactg

SEQ ID NO: 46436 - DNA, 20 bp, Human papillomavirus type 161
tataaacaatgctttactgg

SEQ ID NO: 46437 - DNA, 20 bp, Human papillomavirus type 161
actggtgattgtccccctga

SEQ ID NO: 46438 - DNA, 20 bp, Human papillomavirus type 161
ctggtgattgtccccctgat

SEQ ID NO: 46439 - DNA, 20 bp, Human papillomavirus type 161
gacctgcagtacctgtggag

SEQ ID NO: 46440 - DNA, 20 bp, Human papillomavirus type 161
gtcctgtagaaataatacct

SEQ ID NO: 46441 - DNA, 20 bp, Human papillomavirus type 161
tagatttaacaaatgtacaa

SEQ ID NO: 46442 - DNA, 20 bp, Human papillomavirus type 161
aacaaatgtacaaattcctg

SEQ ID NO: 46443 - DNA, 20 bp, Human papillomavirus type 161
gtacatttgttaaatctata

SEQ ID NO: 46444 - DNA, 20 bp, Human papillomavirus type 161
agccaataccaccccctaaa

SEQ ID NO: 46445 - DNA, 20 bp, Human papillomavirus type 161
tgctttagatgtaaataatg

SEQ ID NO: 46446 - DNA, 20 bp, Human papillomavirus type 161
gctttagatgtaaataatga

SEQ ID NO: 46447 - DNA, 20 bp, Human papillomavirus type 161
ctttagatgtaaataatgaa

SEQ ID NO: 46448 - DNA, 20 bp, Human papillomavirus type 161
agatgtaaataatgaaccac

SEQ ID NO: 46449 - DNA, 20 bp, Human papillomavirus type 161
aacgtttagctggcaatgcc

SEQ ID NO: 46450 - DNA, 20 bp, Human papillomavirus type 161
agctggcaatgccaggagat

SEQ ID NO: 46451 - DNA, 20 bp, Human papillomavirus type 161
gctggcaatgccaggagatt

SEQ ID NO: 46452 - DNA, 20 bp, Human papillomavirus type 161
tacaatagactgtttgaaca

SEQ ID NO: 46453 - DNA, 20 bp, Human papillomavirus type 161
gaacaggttcctacacgaaa

SEQ ID NO: 46454 - DNA, 20 bp, Human papillomavirus type 161
cataagagtgagccgtgaag

SEQ ID NO: 46455 - DNA, 20 bp, Human papillomavirus type 161
ataagagtgagccgtgaagg

SEQ ID NO: 46456 - DNA, 20 bp, Human papillomavirus type 161
cagttgggtcgccctgttca

SEQ ID NO: 46457 - DNA, 20 bp, Human papillomavirus type 161
ggtcgccctgttcattttta

SEQ ID NO: 46458 - DNA, 20 bp, Human papillomavirus type 161
tggtagttatagatgcacga

SEQ ID NO: 46459 - DNA, 20 bp, Human papillomavirus type 161
acgtaaacgaaaacgcaaac

SEQ ID NO: 46460 - DNA, 20 bp, Human papillomavirus type 161
cgtaaacgaaaacgcaaacg

SEQ ID NO: 46461 - DNA, 20 bp, Human papillomavirus type 161
taattattttgcagatgact

SEQ ID NO: 46462 - DNA, 20 bp, Human papillomavirus type 161
aattattttgcagatgactg

SEQ ID NO: 46463 - DNA, 20 bp, Human papillomavirus type 161
attattttgcagatgactgt

SEQ ID NO: 46464 - DNA, 20 bp, Human papillomavirus type 161
cagcacatcaatttagagtg

SEQ ID NO: 46465 - DNA, 20 bp, Human papillomavirus type 161
agcacatcaatttagagtgt

SEQ ID NO: 46466 - DNA, 20 bp, Human papillomavirus type 161
agagtgtttagattactgtg

SEQ ID NO: 46467 - DNA, 20 bp, Human papillomavirus type 161
gagtgtttagattactgtgt

SEQ ID NO: 46468 - DNA, 20 bp, Human papillomavirus type 161
agattactgtgtccagatcc

SEQ ID NO: 46469 - DNA, 20 bp, Human papillomavirus type 161
catttgatcctaagcaaaat

SEQ ID NO: 46470 - DNA, 20 bp, Human papillomavirus type 161
gatcctaagcaaaatcaggt

SEQ ID NO: 46471 - DNA, 20 bp, Human papillomavirus type 161
atcctaagcaaaatcaggtg

SEQ ID NO: 46472 - DNA, 20 bp, Human papillomavirus type 161
atagtaggttgcactcctcc

SEQ ID NO: 46473 - DNA, 20 bp, Human papillomavirus type 161
tagtaggttgcactcctcca

SEQ ID NO: 46474 - DNA, 20 bp, Human papillomavirus type 161
gacattttaaatgatatcac

SEQ ID NO: 46475 - DNA, 20 bp, Human papillomavirus type 161
taaatgatatcaccaaatgg

SEQ ID NO: 46476 - DNA, 20 bp, Human papillomavirus type 161
aaatgatatcaccaaatggc

SEQ ID NO: 46477 - DNA, 20 bp, Human papillomavirus type 161
aatgatatcaccaaatggcc

SEQ ID NO: 46478 - DNA, 20 bp, Human papillomavirus type 161
tattaaaatgtcaaaggata

SEQ ID NO: 46479 - DNA, 20 bp, Human papillomavirus type 161
cacacatcaatgttatgaat

SEQ ID NO: 46480 - DNA, 20 bp, Human papillomavirus type 161
tgaatccaacagtgttagat

SEQ ID NO: 46481 - DNA, 20 bp, Human papillomavirus type 161
gatgattgggatttagcatt

SEQ ID NO: 46482 - DNA, 20 bp, Human papillomavirus type 161
ggatttagcatttgtacccc

SEQ ID NO: 46483 - DNA, 20 bp, Human papillomavirus type 161
agcatttgtacccccaccac

SEQ ID NO: 46484 - DNA, 20 bp, Human papillomavirus type 161
taggtagaaaacgtatcaga

SEQ ID NO: 46485 - DNA, 20 bp, Human papillomavirus type 161
aggtagaaaacgtatcagaa

SEQ ID NO: 46486 - DNA, 20 bp, Human papillomavirus type 161
ggtagaaaacgtatcagaac

SEQ ID NO: 46487 - DNA, 20 bp, Human papillomavirus type 161
catctccgaaagtatccaga

SEQ ID NO: 46488 - DNA, 20 bp, Human papillomavirus type 161
cagtatttatgtatggaaca

SEQ ID NO: 46489 - DNA, 20 bp, Human papillomavirus type 154
ggaaggaaaatgtttgccat

SEQ ID NO: 46490 - DNA, 20 bp, Human papillomavirus type 154
gaaggaaaatgtttgccatg

SEQ ID NO: 46491 - DNA, 20 bp, Human papillomavirus type 154
gccatgcctgttgcgaaagc

SEQ ID NO: 46492 - DNA, 20 bp, Human papillomavirus type 154
ccatgcctgttgcgaaagct

SEQ ID NO: 46493 - DNA, 20 bp, Human papillomavirus type 154
cgaaagctgtttgtctttaa

SEQ ID NO: 46494 - DNA, 20 bp, Human papillomavirus type 154
tcaccttaccaggttgacac

SEQ ID NO: 46495 - DNA, 20 bp, Human papillomavirus type 154
ccaggttgacactatttgta

SEQ ID NO: 46496 - DNA, 20 bp, Human papillomavirus type 154
acactatttgtaattcctgt

SEQ ID NO: 46497 - DNA, 20 bp, Human papillomavirus type 154
gtaattcctgtaacaaacgc

SEQ ID NO: 46498 - DNA, 20 bp, Human papillomavirus type 154
taattcctgtaacaaacgca

SEQ ID NO: 46499 - DNA, 20 bp, Human papillomavirus type 154
caggacagtggactaggaga

SEQ ID NO: 46500 - DNA, 20 bp, Human papillomavirus type 154
aggacagtggactaggagac

SEQ ID NO: 46501 - DNA, 20 bp, Human papillomavirus type 154
ttttaaccaggtagagactt

SEQ ID NO: 46502 - DNA, 20 bp, Human papillomavirus type 154
taaccaggtagagactttat

SEQ ID NO: 46503 - DNA, 20 bp, Human papillomavirus type 154
aaccaggtagagactttatc

SEQ ID NO: 46504 - DNA, 20 bp, Human papillomavirus type 154
cctgattggattgctaaact

SEQ ID NO: 46505 - DNA, 20 bp, Human papillomavirus type 154
gattgctaaactaacacaat

SEQ ID NO: 46506 - DNA, 20 bp, Human papillomavirus type 154
ctaaactaacacaattaaat

SEQ ID NO: 46507 - DNA, 20 bp, Human papillomavirus type 154
aatcatcaaatggcttctca

SEQ ID NO: 46508 - DNA, 20 bp, Human papillomavirus type 154
tcaagcggaatcatttgatt

SEQ ID NO: 46509 - DNA, 20 bp, Human papillomavirus type 154
agatgcactacaagagcaat

SEQ ID NO: 46510 - DNA, 20 bp, Human papillomavirus type 154
gatgcactacaagagcaatt

SEQ ID NO: 46511 - DNA, 20 bp, Human papillomavirus type 154
atgactctctatgaattggg

SEQ ID NO: 46512 - DNA, 20 bp, Human papillomavirus type 154
ggacccaccgatttatcctc

SEQ ID NO: 46513 - DNA, 20 bp, Human papillomavirus type 154
atcctctcaaataaagcatt

SEQ ID NO: 46514 - DNA, 20 bp, Human papillomavirus type 154
acaaccgcagacgacaagcc

SEQ ID NO: 46515 - DNA, 20 bp, Human papillomavirus type 154
caaccgcagacgacaagccc

SEQ ID NO: 46516 - DNA, 20 bp, Human papillomavirus type 154
ttgatggtgagtacgtggta

SEQ ID NO: 46517 - DNA, 20 bp, Human papillomavirus type 154
atggtgagtacgtggtagtg

SEQ ID NO: 46518 - DNA, 20 bp, Human papillomavirus type 154
tcgtctgcggttgtaaagat

SEQ ID NO: 46519 - DNA, 20 bp, Human papillomavirus type 154
tgtgcaagacatttacagat

SEQ ID NO: 46520 - DNA, 20 bp, Human papillomavirus type 154
acagatcttgtgtgcaaggg

SEQ ID NO: 46521 - DNA, 20 bp, Human papillomavirus type 154
cagatcttgtgtgcaagggg

SEQ ID NO: 46522 - DNA, 20 bp, Human papillomavirus type 154
tgtgcaagggggggactgtc

SEQ ID NO: 46523 - DNA, 20 bp, Human papillomavirus type 154
aaggaacaacatgggcagat

SEQ ID NO: 46524 - DNA, 20 bp, Human papillomavirus type 154
ttggtcctcaagaagtacta

SEQ ID NO: 46525 - DNA, 20 bp, Human papillomavirus type 154
gtcctcaagaagtactacca

SEQ ID NO: 46526 - DNA, 20 bp, Human papillomavirus type 154
tagttcctttagaagaagga

SEQ ID NO: 46527 - DNA, 20 bp, Human papillomavirus type 154
ctttagaagaaggaattcca

SEQ ID NO: 46528 - DNA, 20 bp, Human papillomavirus type 154
agaagaaggaattccagatg

SEQ ID NO: 46529 - DNA, 20 bp, Human papillomavirus type 154
atctaatcgtgccatctcaa

SEQ ID NO: 46530 - DNA, 20 bp, Human papillomavirus type 154
tctaatcgtgccatctcaag

SEQ ID NO: 46531 - DNA, 20 bp, Human papillomavirus type 154
atcatagatttgttcaacag

SEQ ID NO: 46532 - DNA, 20 bp, Human papillomavirus type 154
tcatagatttgttcaacagg

SEQ ID NO: 46533 - DNA, 20 bp, Human papillomavirus type 154
gttcaacaggttcctactcg

SEQ ID NO: 46534 - DNA, 20 bp, Human papillomavirus type 154
tacaattaacacatttgtta

SEQ ID NO: 46535 - DNA, 20 bp, Human papillomavirus type 154
acaattaacacatttgttaa

SEQ ID NO: 46536 - DNA, 20 bp, Human papillomavirus type 154
caattaacacatttgttaac

SEQ ID NO: 46537 - DNA, 20 bp, Human papillomavirus type 154
acacatttgttaacattcct

SEQ ID NO: 46538 - DNA, 20 bp, Human papillomavirus type 154
gttaacattcctgacactag

SEQ ID NO: 46539 - DNA, 20 bp, Human papillomavirus type 154
cagcaaatcaatatagagtt

SEQ ID NO: 46540 - DNA, 20 bp, Human papillomavirus type 154
agcaaatcaatatagagtta

SEQ ID NO: 46541 - DNA, 20 bp, Human papillomavirus type 154
tgagattattattaccagat

SEQ ID NO: 46542 - DNA, 20 bp, Human papillomavirus type 154
ttattaccagatcctaacca

SEQ ID NO: 46543 - DNA, 20 bp, Human papillomavirus type 154
ttaccagatcctaaccagtt

SEQ ID NO: 46544 - DNA, 20 bp, Human papillomavirus type 154
tattcaaatgactaaagagg

SEQ ID NO: 46545 - DNA, 20 bp, Human papillomavirus type 154
attcaaatgactaaagaggt

SEQ ID NO: 46546 - DNA, 20 bp, Human papillomavirus type 154
ttcaaatgactaaagaggtg

SEQ ID NO: 46547 - DNA, 20 bp, Human papillomavirus type 154
aaatgactaaagaggtgtat

SEQ ID NO: 46548 - DNA, 20 bp, Human papillomavirus type 154
tttttttatggacggcggga

SEQ ID NO: 46549 - DNA, 20 bp, Human papillomavirus type 154
gctcatattaatgcaatgga

SEQ ID NO: 46550 - DNA, 20 bp, Human papillomavirus type 154
atgcaatggacccttcaata

SEQ ID NO: 46551 - DNA, 20 bp, Human papillomavirus type 154
aatattagaaaactggcagc

SEQ ID NO: 46552 - DNA, 20 bp, Human papillomavirus type 154
gaaaactggcagctggcatt

SEQ ID NO: 46553 - DNA, 20 bp, Human papillomavirus type 154
attccagctcctcctcaagg

SEQ ID NO: 46554 - DNA, 20 bp, Human papillomavirus type 154
ctcgagaggtcatatctgct

SEQ ID NO: 46555 - DNA, 20 bp, Human papillomavirus type 154
gatacccgaccgatttcggt

SEQ ID NO: 46556 - DNA, 20 bp, Human papillomavirus type 154
atacccgaccgatttcggta

SEQ ID NO: 46557 - DNA, 20 bp, Human papillomavirus type 154
cggtaagtacaatacttata

SEQ ID NO: 46558 - DNA, 20 bp, Human papillomavirus type 154
ggtaagtacaatacttatat

SEQ ID NO: 46559 - DNA, 20 bp, Influenza A virus
agaagtacacatcaggaaga

SEQ ID NO: 46560 - DNA, 20 bp, Influenza A virus
gaatgaaatggatgatggcg

SEQ ID NO: 46561 - DNA, 20 bp, Influenza A virus
catcgccatcatccatttca

SEQ ID NO: 46562 - DNA, 20 bp, Influenza A virus
atcgccatcatccatttcat

SEQ ID NO: 46563 - DNA, 20 bp, Influenza A virus
cattctaagagcgggattct

SEQ ID NO: 46564 - DNA, 20 bp, Influenza A virus
tccaaaggtgtataaaacct

SEQ ID NO: 46565 - DNA, 20 bp, Influenza A virus
tcaaagtaggttttatacac

SEQ ID NO: 46566 - DNA, 20 bp, Influenza A virus
caaagtaggttttatacacc

SEQ ID NO: 46567 - DNA, 20 bp, Influenza A virus
aaagtaggttttatacacct

SEQ ID NO: 46568 - DNA, 20 bp, Influenza A virus
tatacacctttggataatgg

SEQ ID NO: 46569 - DNA, 20 bp, Influenza A virus
gagccaggatattgacatca

SEQ ID NO: 46570 - DNA, 20 bp, Influenza A virus
acatcagaatcacagctgac

SEQ ID NO: 46571 - DNA, 20 bp, Influenza A virus
taatattgctcctttaatgg

SEQ ID NO: 46572 - DNA, 20 bp, Influenza A virus
ctcctttaatggtggcatat

SEQ ID NO: 46573 - DNA, 20 bp, Influenza A virus
aatggtggcatatatgttgg

SEQ ID NO: 46574 - DNA, 20 bp, Influenza A virus
accaaagtttaatcattgct

SEQ ID NO: 46575 - DNA, 20 bp, Influenza A virus
aatcattgctgctaggaaca

SEQ ID NO: 46576 - DNA, 20 bp, Influenza A virus
atcattgctgctaggaacat

SEQ ID NO: 46577 - DNA, 20 bp, Influenza A virus
ctgctaggaacattgtcagg

SEQ ID NO: 46578 - DNA, 20 bp, Influenza A virus
tcaggagagcaacagtatca

SEQ ID NO: 46579 - DNA, 20 bp, Influenza A virus
caggcaacctccaaacattg

SEQ ID NO: 46580 - DNA, 20 bp, Influenza A virus
aagataaaagtacatgaagg

SEQ ID NO: 46581 - DNA, 20 bp, Influenza A virus
acaatggttggacgaagagc

SEQ ID NO: 46582 - DNA, 20 bp, Influenza A virus
gacgaagagcaacagccatt

SEQ ID NO: 46583 - DNA, 20 bp, Influenza A virus
taagaaaagcaaccagaagg

SEQ ID NO: 46584 - DNA, 20 bp, Influenza A virus
gtaaacagagcaaatcaacg

SEQ ID NO: 46585 - DNA, 20 bp, Influenza A virus
caaaaggatgcaaaggtgct

SEQ ID NO: 46586 - DNA, 20 bp, Influenza A virus
aaaaggatgcaaaggtgctg

SEQ ID NO: 46587 - DNA, 20 bp, Influenza A virus
cccagttttgaaacagcacc

SEQ ID NO: 46588 - DNA, 20 bp, Influenza A virus
tgaaacagcacctttgcatc

SEQ ID NO: 46589 - DNA, 20 bp, Influenza A virus
gtgaaacacagggaatggaa

SEQ ID NO: 46590 - DNA, 20 bp, Influenza A virus
acgataacttattcatcgtc

SEQ ID NO: 46591 - DNA, 20 bp, Influenza A virus
ttcatcgtctatgatgtggg

SEQ ID NO: 46592 - DNA, 20 bp, Influenza A virus
tcgtcaacttttccattccc

SEQ ID NO: 46593 - DNA, 20 bp, Influenza A virus
tccattccctgtgtttcact

SEQ ID NO: 46594 - DNA, 20 bp, Influenza A virus
gtgagaacgctattccagca

SEQ ID NO: 46595 - DNA, 20 bp, Influenza A virus
tgagaacgctattccagcag

SEQ ID NO: 46596 - DNA, 20 bp, Influenza A virus
cagcagatgcgtgatgtttt

SEQ ID NO: 46597 - DNA, 20 bp, Influenza A virus
tgggaacgttcgacactgtt

SEQ ID NO: 46598 - DNA, 20 bp, Influenza A virus
gggaacgttcgacactgttc

SEQ ID NO: 46599 - DNA, 20 bp, Influenza A virus
cagaggacccagatgaagga

SEQ ID NO: 46600 - DNA, 20 bp, Influenza A virus
agaggatttctaatcctcgg

SEQ ID NO: 46601 - DNA, 20 bp, Influenza A virus
ctaatcctcggcaaagaaga

SEQ ID NO: 46602 - DNA, 20 bp, Influenza A virus
taatcctcggcaaagaagac

SEQ ID NO: 46603 - DNA, 20 bp, Influenza A virus
tgtcttctttgccgaggatt

SEQ ID NO: 46604 - DNA, 20 bp, Influenza A virus
actgaaagaggagtggaagt

SEQ ID NO: 46605 - DNA, 20 bp, Influenza A virus
cagttgcattgacgacttcc

SEQ ID NO: 46606 - DNA, 20 bp, Influenza A virus
agttgcattgacgacttcca

SEQ ID NO: 46607 - DNA, 20 bp, Influenza A virus
cattgacgacttccactcct

SEQ ID NO: 46608 - DNA, 20 bp, Influenza A virus
acgacttccactcctctttc

SEQ ID NO: 46609 - DNA, 20 bp, Influenza A virus
tcctgggaaattcgtgaatg

SEQ ID NO: 46610 - DNA, 20 bp, Influenza A virus
gtgaatgaagaagctctgag

SEQ ID NO: 46611 - DNA, 20 bp, Influenza A virus
tcagagaatcaggcggaatt

SEQ ID NO: 46612 - DNA, 20 bp, Influenza A virus
acaaggaagcaatgggattc

SEQ ID NO: 46613 - DNA, 20 bp, Influenza A virus
cttccttgtcaattccgcct

SEQ ID NO: 46614 - DNA, 20 bp, Influenza A virus
ggagttctaattatcaacaa

SEQ ID NO: 46615 - DNA, 20 bp, Influenza A virus
taattatcaacaatcttttg

SEQ ID NO: 46616 - DNA, 20 bp, Influenza A virus
tcaacaatcttttgtaccga

SEQ ID NO: 46617 - DNA, 20 bp, Influenza A virus
tgtaccgagtccaggagcga

SEQ ID NO: 46618 - DNA, 20 bp, Influenza A virus
gtaccgagtccaggagcgag

SEQ ID NO: 46619 - DNA, 20 bp, Influenza A virus
atgccaattgtgaaggggac

SEQ ID NO: 46620 - DNA, 20 bp, Influenza A virus
tgaaggggactgctatcata

SEQ ID NO: 46621 - DNA, 20 bp, Influenza A virus
ccatttcagaacatagatag

SEQ ID NO: 46622 - DNA, 20 bp, Influenza A virus
cagaacatagatagcagggc

SEQ ID NO: 46623 - DNA, 20 bp, Influenza A virus
agaacatagatagcagggca

SEQ ID NO: 46624 - DNA, 20 bp, Influenza A virus
cattgaaaatggatgggaag

SEQ ID NO: 46625 - DNA, 20 bp, Influenza A virus
attgaaaatggatgggaagg

SEQ ID NO: 46626 - DNA, 20 bp, Influenza A virus
aaaatggatgggaaggccta

SEQ ID NO: 46627 - DNA, 20 bp, Influenza A virus
atggttggtatggtttcaga

SEQ ID NO: 46628 - DNA, 20 bp, Influenza A virus
gtatggtttcagacaccaga

SEQ ID NO: 46629 - DNA, 20 bp, Influenza A virus
atctggctgattcagaaatg

SEQ ID NO: 46630 - DNA, 20 bp, Influenza A virus
agaaatggacaaactgtacg

SEQ ID NO: 46631 - DNA, 20 bp, Influenza A virus
ttcagcattctctctcagct

SEQ ID NO: 46632 - DNA, 20 bp, Influenza A virus
agcattctctctcagctgtc

SEQ ID NO: 46633 - DNA, 20 bp, Influenza A virus
tctctcagctgtcttttcac

SEQ ID NO: 46634 - DNA, 20 bp, Human papillomavirus type 32
ttaaggcagaatggcaagta

SEQ ID NO: 46635 - DNA, 20 bp, Human papillomavirus type 32
aggcagaatggcaagtactt

SEQ ID NO: 46636 - DNA, 20 bp, Human papillomavirus type 32
tgcctcatcacagccaagta

SEQ ID NO: 46637 - DNA, 20 bp, Human papillomavirus type 32
taccaattgtgcaaagattt

SEQ ID NO: 46638 - DNA, 20 bp, Human papillomavirus type 32
tgcaaagattttgggctgac

SEQ ID NO: 46639 - DNA, 20 bp, Human papillomavirus type 32
gaagaacaaataattcgctg

SEQ ID NO: 46640 - DNA, 20 bp, Human papillomavirus type 32
gctgtgctatatgtcaaaag

SEQ ID NO: 46641 - DNA, 20 bp, Human papillomavirus type 32
atcgccaagtgagaaagatc

SEQ ID NO: 46642 - DNA, 20 bp, Human papillomavirus type 32
tcgccaagtgagaaagatca

SEQ ID NO: 46643 - DNA, 20 bp, Human papillomavirus type 32
taaatatgatgatctttctc

SEQ ID NO: 46644 - DNA, 20 bp, Human papillomavirus type 32
cagaatagtgtgtggttgta

SEQ ID NO: 46645 - DNA, 20 bp, Human papillomavirus type 32
tacacagtgtggacggtcag

SEQ ID NO: 46646 - DNA, 20 bp, Human papillomavirus type 32
aacttgttgtcagtagtaca

SEQ ID NO: 46647 - DNA, 20 bp, Human papillomavirus type 32
ttgtcagtagtacaggcgcg

SEQ ID NO: 46648 - DNA, 20 bp, Human papillomavirus type 32
tcagtagtacaggcgcggac

SEQ ID NO: 46649 - DNA, 20 bp, Human papillomavirus type 32
cttaagtgtaagaacttgca

SEQ ID NO: 46650 - DNA, 20 bp, Human papillomavirus type 32
agtgtaagaacttgcaagca

SEQ ID NO: 46651 - DNA, 20 bp, Human papillomavirus type 32
caagcaacattgttaggtaa

SEQ ID NO: 46652 - DNA, 20 bp, Human papillomavirus type 32
ttaggtaagtttaaagagct

SEQ ID NO: 46653 - DNA, 20 bp, Human papillomavirus type 32
aaacttacctaacaatgttg

SEQ ID NO: 46654 - DNA, 20 bp, Human papillomavirus type 32
ttaatgctaattagatttaa

SEQ ID NO: 46655 - DNA, 20 bp, Human papillomavirus type 32
atgctaattagatttaaatg

SEQ ID NO: 46656 - DNA, 20 bp, Human papillomavirus type 32
gatttaaatgtggcaagaat

SEQ ID NO: 46657 - DNA, 20 bp, Human papillomavirus type 32
aaatgtggcaagaatcgcac

SEQ ID NO: 46658 - DNA, 20 bp, Human papillomavirus type 32
aatgtggcaagaatcgcacc

SEQ ID NO: 46659 - DNA, 20 bp, Human papillomavirus type 32
catatgaatatgcccaacgt

SEQ ID NO: 46660 - DNA, 20 bp, Human papillomavirus type 32
ttaaaaagcaactgtcaggc

SEQ ID NO: 46661 - DNA, 20 bp, Human papillomavirus type 32
taaaaagcaactgtcaggca

SEQ ID NO: 46662 - DNA, 20 bp, Human papillomavirus type 32
aaaaagcaactgtcaggcaa

SEQ ID NO: 46663 - DNA, 20 bp, Human papillomavirus type 32
aaaagcaactgtcaggcaaa

SEQ ID NO: 46664 - DNA, 20 bp, Human papillomavirus type 32
agatgcgtgccaggaacagt

SEQ ID NO: 46665 - DNA, 20 bp, Human papillomavirus type 32
gatgcgtgccaggaacagtt

SEQ ID NO: 46666 - DNA, 20 bp, Human papillomavirus type 32
ttagaactgtatgaggaaga

SEQ ID NO: 46667 - DNA, 20 bp, Human papillomavirus type 32
gaactgtatgaggaagatag

SEQ ID NO: 46668 - DNA, 20 bp, Human papillomavirus type 32
agaaaaacatgtgcagcact

SEQ ID NO: 46669 - DNA, 20 bp, Human papillomavirus type 32
tgaaatgtggcatgcggagc

SEQ ID NO: 46670 - DNA, 20 bp, Human papillomavirus type 32
aaaaaaacagggacgcactg

SEQ ID NO: 46671 - DNA, 20 bp, Human papillomavirus type 32
aaaaaacagggacgcactgt

SEQ ID NO: 46672 - DNA, 20 bp, Human papillomavirus type 32
tattcgatggaaatcctgag

SEQ ID NO: 46673 - DNA, 20 bp, Human papillomavirus type 32
gatggaaatcctgagaatgc

SEQ ID NO: 46674 - DNA, 20 bp, Human papillomavirus type 32
tacaaagaccccaccccgac

SEQ ID NO: 46675 - DNA, 20 bp, Human papillomavirus type 32
gcagccaccaacaaagcacc

SEQ ID NO: 46676 - DNA, 20 bp, Human papillomavirus type 32
cagccaccaacaaagcacct

SEQ ID NO: 46677 - DNA, 20 bp, Human papillomavirus type 32
gttggtggctgcaaagactg

SEQ ID NO: 46678 - DNA, 20 bp, Human papillomavirus type 32
ttggtggctgcaaagactgt

SEQ ID NO: 46679 - DNA, 20 bp, Human papillomavirus type 32
ttgtttatagttgttgctgc

SEQ ID NO: 46680 - DNA, 20 bp, Human papillomavirus type 32
tttatagttgttgctgcgtg

SEQ ID NO: 46681 - DNA, 20 bp, Human papillomavirus type 32
atagttgttgctgcgtgtgt

SEQ ID NO: 46682 - DNA, 20 bp, Human papillomavirus type 32
tagttgttgctgcgtgtgtg

SEQ ID NO: 46683 - DNA, 20 bp, Human papillomavirus type 32
ttgctgcgtgtgtgttgtgt

SEQ ID NO: 46684 - DNA, 20 bp, Human papillomavirus type 32
tactttagaaaatggcgatg

SEQ ID NO: 46685 - DNA, 20 bp, Human papillomavirus type 32
agaaaatggcgatgtgtggc

SEQ ID NO: 46686 - DNA, 20 bp, Human papillomavirus type 32
gaaaatggcgatgtgtggct

SEQ ID NO: 46687 - DNA, 20 bp, Human papillomavirus type 32
ttagccacagtgtttatttg

SEQ ID NO: 46688 - DNA, 20 bp, Human papillomavirus type 32
tagccacagtgtttatttgt

SEQ ID NO: 46689 - DNA, 20 bp, Human papillomavirus type 32
aatattacgtcctctgcaag

SEQ ID NO: 46690 - DNA, 20 bp, Human papillomavirus type 32
atattacgtcctctgcaagt

SEQ ID NO: 46691 - DNA, 20 bp, Human papillomavirus type 32
cgtcctctgcaagtggcccg

SEQ ID NO: 46692 - DNA, 20 bp, Human papillomavirus type 32
gacatttctcctcccaccaa

SEQ ID NO: 46693 - DNA, 20 bp, Human papillomavirus type 32
ctcctcccaccaatactata

SEQ ID NO: 46694 - DNA, 20 bp, Human papillomavirus type 32
tttccatgatattagcccaa

SEQ ID NO: 46695 - DNA, 20 bp, Human papillomavirus type 32
ttccatgatattagcccaat

SEQ ID NO: 46696 - DNA, 20 bp, Human papillomavirus type 32
tccatgatattagcccaatc

SEQ ID NO: 46697 - DNA, 20 bp, Human papillomavirus type 32
ccatgatattagcccaatca

SEQ ID NO: 46698 - DNA, 20 bp, Human papillomavirus type 32
catgatattagcccaatcac

SEQ ID NO: 46699 - DNA, 20 bp, Human papillomavirus type 32
atctgcctcctcctcctgtt

SEQ ID NO: 46700 - DNA, 20 bp, Human papillomavirus type 32
tctgcctcctcctcctgttt

SEQ ID NO: 46701 - DNA, 20 bp, Human papillomavirus type 32
ccaaggtggtcagcacagat

SEQ ID NO: 46702 - DNA, 20 bp, Human papillomavirus type 32
caaggtggtcagcacagatg

SEQ ID NO: 46703 - DNA, 20 bp, Human papillomavirus type 32
gtacgttgcacatattcatc

SEQ ID NO: 46704 - DNA, 20 bp, Human papillomavirus type 32
ggaattacaaaacagtgtta

SEQ ID NO: 46705 - DNA, 20 bp, Human papillomavirus type 32
gaattacaaaacagtgttat

SEQ ID NO: 46706 - DNA, 20 bp, Human papillomavirus type 32
caaaacagtgttattcagga

SEQ ID NO: 46707 - DNA, 20 bp, Human papillomavirus type 32
ttcaggatggtgatatggca

SEQ ID NO: 46708 - DNA, 20 bp, Human papillomavirus type 32
aggatggtgatatggcagat

SEQ ID NO: 46709 - DNA, 20 bp, Human papillomavirus type 32
tgtcatatatccacaccatg

SEQ ID NO: 46710 - DNA, 20 bp, Human papillomavirus type 32
gaatgttggtgtagctccac

SEQ ID NO: 46711 - DNA, 20 bp, Human papillomavirus type 32
gtgtagctccaccgccctct

SEQ ID NO: 46712 - DNA, 20 bp, Human papillomavirus type 32
agaagatagttatagatttg

SEQ ID NO: 46713 - DNA, 20 bp, Human papillomavirus type 32
gaagatagttatagatttgt

SEQ ID NO: 46714 - DNA, 20 bp, Human papillomavirus type 32
ccgttggataatgtccatta

SEQ ID NO: 46715 - DNA, 20 bp, Human papillomavirus type 32
gataatgtccattaaattta

SEQ ID NO: 46716 - DNA, 20 bp, Human papillomavirus type 32
aatttagcaagcacatgcag

SEQ ID NO: 46717 - DNA, 20 bp, Human papillomavirus type 32
agcaagcacatgcagttttt

SEQ ID NO: 46718 - DNA, 20 bp, Human papillomavirus type 32
gcaagcacatgcagttttta

SEQ ID NO: 46719 - DNA, 20 bp, Human papillomavirus type 136
atcatcaaatggcggcacag

SEQ ID NO: 46720 - DNA, 20 bp, Human papillomavirus type 136
caattaagtaaaatggttca

SEQ ID NO: 46721 - DNA, 20 bp, Human papillomavirus type 136
aattaagtaaaatggttcaa

SEQ ID NO: 46722 - DNA, 20 bp, Human papillomavirus type 136
agtaaaatggttcaatgggc

SEQ ID NO: 46723 - DNA, 20 bp, Human papillomavirus type 136
aatgggcgtatgataacaaa

SEQ ID NO: 46724 - DNA, 20 bp, Human papillomavirus type 136
tactttcggcaagaaatgaa

SEQ ID NO: 46725 - DNA, 20 bp, Human papillomavirus type 136
cggcaagaaatgaaaaatat

SEQ ID NO: 46726 - DNA, 20 bp, Human papillomavirus type 136
ggcaagaaatgaaaaatatg

SEQ ID NO: 46727 - DNA, 20 bp, Human papillomavirus type 136
tcaaatgttgtagggaatgt

SEQ ID NO: 46728 - DNA, 20 bp, Human papillomavirus type 136
caaatgttgtagggaatgtg

SEQ ID NO: 46729 - DNA, 20 bp, Human papillomavirus type 136
aacacccagactgaagagac

SEQ ID NO: 46730 - DNA, 20 bp, Human papillomavirus type 136
ctcaagaagcggcaggacct

SEQ ID NO: 46731 - DNA, 20 bp, Human papillomavirus type 136
aaccacgacatcacctaaaa

SEQ ID NO: 46732 - DNA, 20 bp, Human papillomavirus type 136
taggtgatgtcgtggttgaa

SEQ ID NO: 46733 - DNA, 20 bp, Human papillomavirus type 136
aggtgatgtcgtggttgaac

SEQ ID NO: 46734 - DNA, 20 bp, Human papillomavirus type 136
ggcaaagccatcgatcagta

SEQ ID NO: 46735 - DNA, 20 bp, Human papillomavirus type 136
caagagttgagcgacttaaa

SEQ ID NO: 46736 - DNA, 20 bp, Human papillomavirus type 136
agcgacttaaagcagaggct

SEQ ID NO: 46737 - DNA, 20 bp, Human papillomavirus type 136
aagcagaggctcgggatccg

SEQ ID NO: 46738 - DNA, 20 bp, Human papillomavirus type 136
gtccttataaaaggttgtgc

SEQ ID NO: 46739 - DNA, 20 bp, Human papillomavirus type 136
accccattgaagttacaact

SEQ ID NO: 46740 - DNA, 20 bp, Human papillomavirus type 136
aagttacaactgcaattgat

SEQ ID NO: 46741 - DNA, 20 bp, Human papillomavirus type 136
caactgcaattgatccagtt

SEQ ID NO: 46742 - DNA, 20 bp, Human papillomavirus type 136
atccagtttcagaagtagtt

SEQ ID NO: 46743 - DNA, 20 bp, Human papillomavirus type 136
cagaagtagttggtgtaggt

SEQ ID NO: 46744 - DNA, 20 bp, Human papillomavirus type 136
agagattattaactccactt

SEQ ID NO: 46745 - DNA, 20 bp, Human papillomavirus type 136
gagattattaactccacttg

SEQ ID NO: 46746 - DNA, 20 bp, Human papillomavirus type 136
ttaactccacttgtaaatgg

SEQ ID NO: 46747 - DNA, 20 bp, Human papillomavirus type 136
actccacttgtaaatggcct

SEQ ID NO: 46748 - DNA, 20 bp, Human papillomavirus type 136
taaatggcctgattttactc

SEQ ID NO: 46749 - DNA, 20 bp, Human papillomavirus type 136
gccccttcgacgtattatcc

SEQ ID NO: 46750 - DNA, 20 bp, Human papillomavirus type 136
gacgtattatccgacgccca

SEQ ID NO: 46751 - DNA, 20 bp, Human papillomavirus type 136
tccgacgcccagtggttcgt

SEQ ID NO: 46752 - DNA, 20 bp, Human papillomavirus type 136
gttagttagcagcgaatctc

SEQ ID NO: 46753 - DNA, 20 bp, Human papillomavirus type 136
gttagcagcgaatctcaaat

SEQ ID NO: 46754 - DNA, 20 bp, Human papillomavirus type 136
tgtaaagttcctctggaagc

SEQ ID NO: 46755 - DNA, 20 bp, Human papillomavirus type 136
ctctggaagctgatgtgcta

SEQ ID NO: 46756 - DNA, 20 bp, Human papillomavirus type 136
atgcaatggactctcgcatc

SEQ ID NO: 46757 - DNA, 20 bp, Human papillomavirus type 136
gatgactgggagttagcatt

SEQ ID NO: 46758 - DNA, 20 bp, Human papillomavirus type 136
cattaatgtgggctagcaca

SEQ ID NO: 46759 - DNA, 20 bp, Human papillomavirus type 136
atcagacaccattaggcaaa

SEQ ID NO: 46760 - DNA, 20 bp, Human papillomavirus type 136
ggcaaaaaattcttatatca

SEQ ID NO: 46761 - DNA, 20 bp, Human papillomavirus type 136
ttatatcagatgggattact

SEQ ID NO: 46762 - DNA, 20 bp, Human papillomavirus type 136
tatcagatgggattacttaa

SEQ ID NO: 46763 - DNA, 20 bp, Human papillomavirus type 136
cttaattcccgtaagcgacc

SEQ ID NO: 46764 - DNA, 20 bp, Human papillomavirus type 136
cttgatgtgtccactaataa

SEQ ID NO: 46765 - DNA, 20 bp, Human papillomavirus type 136
atgtgtccactaataaacaa

SEQ ID NO: 46766 - DNA, 20 bp, Human papillomavirus type 136
ctgactcattatattggtag

SEQ ID NO: 46767 - DNA, 20 bp, Human papillomavirus type 136
tattggtagtttaccctcct

SEQ ID NO: 46768 - DNA, 20 bp, Human papillomavirus type 136
gtagtttaccctcctattat

SEQ ID NO: 46769 - DNA, 20 bp, Human papillomavirus type 136
gtatagttttggcgcgttct

SEQ ID NO: 46770 - DNA, 20 bp, Human papillomavirus type 136
tggcgcgttctgcaaatcca

SEQ ID NO: 46771 - DNA, 20 bp, Human papillomavirus type 136
ggcgcgttctgcaaatccaa

SEQ ID NO: 46772 - DNA, 20 bp, Human papillomavirus type 136
gcgcgttctgcaaatccaac

SEQ ID NO: 46773 - DNA, 20 bp, Human papillomavirus type 136
tgcaaatccaaccgttaacg

SEQ ID NO: 46774 - DNA, 20 bp, Influenza A virus
cgacttccatggcttctgct

SEQ ID NO: 46775 - DNA, 20 bp, Influenza A virus
catggcttctgctgcctgct

SEQ ID NO: 46776 - DNA, 20 bp, Influenza A virus
tgctgcctgctcacttgatc

SEQ ID NO: 46777 - DNA, 20 bp, Influenza A virus
atccagccatctgctccatg

SEQ ID NO: 46778 - DNA, 20 bp, Influenza A virus
gccgtagtgctggctagtac

SEQ ID NO: 46779 - DNA, 20 bp, Influenza A virus
ttgcagcaagtatcattggg

SEQ ID NO: 46780 - DNA, 20 bp, Influenza A virus
cagcaagtatcattgggata

SEQ ID NO: 46781 - DNA, 20 bp, Influenza A virus
ggatattgcacttgatattg

SEQ ID NO: 46782 - DNA, 20 bp, Influenza A virus
cacttgatattgtggattct

SEQ ID NO: 46783 - DNA, 20 bp, Influenza A virus
atattgtggattcttgatcg

SEQ ID NO: 46784 - DNA, 20 bp, Human parainfluenza virus 3
ctggtgtccttattatcaat

SEQ ID NO: 46785 - DNA, 20 bp, Human parainfluenza virus 3
ttatcaatggcttatgccaa

SEQ ID NO: 46786 - DNA, 20 bp, Human parainfluenza virus 3
tcaatggcttatgccaatcc

SEQ ID NO: 46787 - DNA, 20 bp, Human parainfluenza virus 3
tgccaatccagagctctacc

SEQ ID NO: 46788 - DNA, 20 bp, Human parainfluenza virus 3
acatctgcattacttccatt

SEQ ID NO: 46789 - DNA, 20 bp, Human parainfluenza virus 3
gggtatccatcatgtttagg

SEQ ID NO: 46790 - DNA, 20 bp, Human parainfluenza virus 3
ggtatccatcatgtttagga

SEQ ID NO: 46791 - DNA, 20 bp, Human parainfluenza virus 3
aggagctcttataatacaga

SEQ ID NO: 46792 - DNA, 20 bp, Human parainfluenza virus 3
ggagctcttataatacagat

SEQ ID NO: 46793 - DNA, 20 bp, Human parainfluenza virus 3
taatacagatctggatagtt

SEQ ID NO: 46794 - DNA, 20 bp, Human parainfluenza virus 3
tacaaaatagagccatgcaa

SEQ ID NO: 46795 - DNA, 20 bp, Human parainfluenza virus 3
atatgttccagctaggacaa

SEQ ID NO: 46796 - DNA, 20 bp, Human parainfluenza virus 3
cagctaggacaagcagtagc

SEQ ID NO: 46797 - DNA, 20 bp, Human parainfluenza virus 3
agctcatctgagcttcagca

SEQ ID NO: 46798 - DNA, 20 bp, Human parainfluenza virus 3
agcatcacgtgctactgctt

SEQ ID NO: 46799 - DNA, 20 bp, Human parainfluenza virus 3
atggaaagcgatgctaaaaa

SEQ ID NO: 46800 - DNA, 20 bp, Human parainfluenza virus 3
ttgggaagaggaatcaagag

SEQ ID NO: 46801 - DNA, 20 bp, Human parainfluenza virus 3
ggaagaggaatcaagagata

SEQ ID NO: 46802 - DNA, 20 bp, Human parainfluenza virus 3
aattcatacttagcaccgac

SEQ ID NO: 46803 - DNA, 20 bp, Human parainfluenza virus 3
aatgatattgagggccgagg

SEQ ID NO: 46804 - DNA, 20 bp, Human parainfluenza virus 3
tgggttccatttttagaatt

SEQ ID NO: 46805 - DNA, 20 bp, Human parainfluenza virus 3
catttttagaatttgtgatg

SEQ ID NO: 46806 - DNA, 20 bp, Human parainfluenza virus 3
ttagaatttgtgatgcttct

SEQ ID NO: 46807 - DNA, 20 bp, Human parainfluenza virus 3
tagaatttgtgatgcttctg

SEQ ID NO: 46808 - DNA, 20 bp, Human parainfluenza virus 3
agaatttgtgatgcttctgg

SEQ ID NO: 46809 - DNA, 20 bp, Human parainfluenza virus 3
ataacaacacagatcgaacc

SEQ ID NO: 46810 - DNA, 20 bp, Human parainfluenza virus 3
ggttcgatctgtgttgttat

SEQ ID NO: 46811 - DNA, 20 bp, Human parainfluenza virus 3
gatctgtgttgttatcaatg

SEQ ID NO: 46812 - DNA, 20 bp, Human parainfluenza virus 3
ttatcaatggtgagattcca

SEQ ID NO: 46813 - DNA, 20 bp, Human parainfluenza virus 3
tcaatggtgagattccatga

SEQ ID NO: 46814 - DNA, 20 bp, Human parainfluenza virus 3
gacccacttatggagacaca

SEQ ID NO: 46815 - DNA, 20 bp, Human parainfluenza virus 3
acccacttatggagacacaa

SEQ ID NO: 46816 - DNA, 20 bp, Human parainfluenza virus 3
tggagacacaagggattgac

SEQ ID NO: 46817 - DNA, 20 bp, Human parainfluenza virus 3
acaagaatatacctgatcta

SEQ ID NO: 46818 - DNA, 20 bp, Human parainfluenza virus 3
aatcagagatattaagttca

SEQ ID NO: 46819 - DNA, 20 bp, Human parainfluenza virus 3
tttgaaaatggtcatataga

SEQ ID NO: 46820 - DNA, 20 bp, Human parainfluenza virus 3
gaaaatggtcatatagaacc

SEQ ID NO: 46821 - DNA, 20 bp, Human parainfluenza virus 3
aaaatggtcatatagaacca

SEQ ID NO: 46822 - DNA, 20 bp, Human parainfluenza virus 3
ccactcaaagtcaatgaaca

SEQ ID NO: 46823 - DNA, 20 bp, Human parainfluenza virus 3
gagttgccaaaatcggaaat

SEQ ID NO: 46824 - DNA, 20 bp, Human parainfluenza virus 3
gatgccaacaaagttgctct

SEQ ID NO: 46825 - DNA, 20 bp, Human parainfluenza virus 3
ctcttgctcctcaatgtctt

SEQ ID NO: 46826 - DNA, 20 bp, Human parainfluenza virus 3
ctcctcaatgtcttccacta

SEQ ID NO: 46827 - DNA, 20 bp, Human parainfluenza virus 3
cactagataggagcataaaa

SEQ ID NO: 46828 - DNA, 20 bp, Human parainfluenza virus 3
tatgctcctatctagtggaa

SEQ ID NO: 46829 - DNA, 20 bp, Human parainfluenza virus 3
caaccttctttacctggcga

SEQ ID NO: 46830 - DNA, 20 bp, Human parainfluenza virus 3
tttacctggcgaattcagat

SEQ ID NO: 46831 - DNA, 20 bp, Human parainfluenza virus 3
acctggcgaattcagatact

SEQ ID NO: 46832 - DNA, 20 bp, Human parainfluenza virus 3
cctggcgaattcagatacta

SEQ ID NO: 46833 - DNA, 20 bp, Human parainfluenza virus 3
agatactatcctaatattat

SEQ ID NO: 46834 - DNA, 20 bp, Human parainfluenza virus 3
ttggatagactgatcatccc

SEQ ID NO: 46835 - DNA, 20 bp, Human parainfluenza virus 3
gatagactgatcatccctct

SEQ ID NO: 46836 - DNA, 20 bp, Human parainfluenza virus 3
agattacagaaagatgtgat

SEQ ID NO: 46837 - DNA, 20 bp, Human parainfluenza virus 3
cagaaagatgtgatagtaac

SEQ ID NO: 46838 - DNA, 20 bp, Human parainfluenza virus 3
tgttctgggattagtgtttt

SEQ ID NO: 46839 - DNA, 20 bp, Human parainfluenza virus 3
attaactaggctgctgaaca

SEQ ID NO: 46840 - DNA, 20 bp, Human parainfluenza virus 3
ttaactaggctgctgaacac

SEQ ID NO: 46841 - DNA, 20 bp, Human parainfluenza virus 3
actaggctgctgaacactca

SEQ ID NO: 46842 - DNA, 20 bp, Human parainfluenza virus 3
catatcatataatatccaca

SEQ ID NO: 46843 - DNA, 20 bp, Human parainfluenza virus 3
ctcttcccagccatatcatg

SEQ ID NO: 46844 - DNA, 20 bp, Human parainfluenza virus 3
tacatgcaacggaatcggca

SEQ ID NO: 46845 - DNA, 20 bp, Human parainfluenza virus 3
taacacataaagaatgtagt

SEQ ID NO: 46846 - DNA, 20 bp, Human parainfluenza virus 3
cttctttgtttgtattgaac

SEQ ID NO: 46847 - DNA, 20 bp, Human parainfluenza virus 3
tttgtttgtattgaacagca

SEQ ID NO: 46848 - DNA, 20 bp, Human parainfluenza virus 3
gtttgtattgaacagcattc

SEQ ID NO: 46849 - DNA, 20 bp, Human parainfluenza virus 3
agaaagaacccaatagacaa

SEQ ID NO: 46850 - DNA, 20 bp, Human parainfluenza virus 3
gagatggaatactggaagca

SEQ ID NO: 46851 - DNA, 20 bp, Human parainfluenza virus 3
ccagcatcctttccgtgatt

SEQ ID NO: 46852 - DNA, 20 bp, Human parainfluenza virus 3
ccgtgattggtatgcttcca

SEQ ID NO: 46853 - DNA, 20 bp, Human parainfluenza virus 3
cgtgattggtatgcttccag

SEQ ID NO: 46854 - DNA, 20 bp, Human parainfluenza virus 3
aaatccagatgatttttgga

SEQ ID NO: 46855 - DNA, 20 bp, Human parainfluenza virus 3
aatccagatgatttttggag

SEQ ID NO: 46856 - DNA, 20 bp, Human parainfluenza virus 3
ttggaggtgcacgtctggtc

SEQ ID NO: 46857 - DNA, 20 bp, Human parainfluenza virus 3
tggaggtgcacgtctggtct

SEQ ID NO: 46858 - DNA, 20 bp, Human parainfluenza virus 3
ggaggtgcacgtctggtctt

SEQ ID NO: 46859 - DNA, 20 bp, Human parainfluenza virus 3
gaccagggatatattacaaa

SEQ ID NO: 46860 - DNA, 20 bp, Human parainfluenza virus 3
caaaggcaaaataatatttc

SEQ ID NO: 46861 - DNA, 20 bp, Human parainfluenza virus 3
ctcgggtatggaggtcttga

SEQ ID NO: 46862 - DNA, 20 bp, Human parainfluenza virus 3
tcgggtatggaggtcttgaa

SEQ ID NO: 46863 - DNA, 20 bp, Human parainfluenza virus 3
aacatccaataaatgagaat

SEQ ID NO: 46864 - DNA, 20 bp, Human parainfluenza virus 3
ctcaacagcaactgaaagag

SEQ ID NO: 46865 - DNA, 20 bp, Human parainfluenza virus 3
ctgatggccagctcgtttac

SEQ ID NO: 46866 - DNA, 20 bp, Human parainfluenza virus 3
tgatggccagctcgtttact

SEQ ID NO: 46867 - DNA, 20 bp, Human parainfluenza virus 3
actctttcagttgctgttga

SEQ ID NO: 46868 - DNA, 20 bp, Human parainfluenza virus 3
ctctttcagttgctgttgag

SEQ ID NO: 46869 - DNA, 20 bp, Human parainfluenza virus 3
atcataaatgcttacggttc

SEQ ID NO: 46870 - DNA, 20 bp, Human parainfluenza virus 3
cggttcaaactctgcgatat

SEQ ID NO: 46871 - DNA, 20 bp, Human parainfluenza virus 3
aaactctgcgatatcatatg

SEQ ID NO: 46872 - DNA, 20 bp, Human parainfluenza virus 3
attattaccagagcttcata

SEQ ID NO: 46873 - DNA, 20 bp, Human parainfluenza virus 3
ttaccagagcttcataggaa

SEQ ID NO: 46874 - DNA, 20 bp, Human parainfluenza virus 3
ttcctcaagctctgaaagca

SEQ ID NO: 46875 - DNA, 20 bp, Human parainfluenza virus 3
ctcaagctctgaaagcatta

SEQ ID NO: 46876 - DNA, 20 bp, Human parainfluenza virus 3
tctagatgtgtcttttggtc

SEQ ID NO: 46877 - DNA, 20 bp, Human parainfluenza virus 3
tggtcagagacagtaataga

SEQ ID NO: 46878 - DNA, 20 bp, Human parainfluenza virus 3
ggtcagagacagtaatagac

SEQ ID NO: 46879 - DNA, 20 bp, Human parainfluenza virus 3
taagaattcaaattggatgc

SEQ ID NO: 46880 - DNA, 20 bp, Human parainfluenza virus 3
aagaattcaaattggatgca

SEQ ID NO: 46881 - DNA, 20 bp, Human parainfluenza virus 3
agaattcaaattggatgcaa

SEQ ID NO: 46882 - DNA, 20 bp, Human parainfluenza virus 3
aaattggatgcaatatgcct

SEQ ID NO: 46883 - DNA, 20 bp, Human parainfluenza virus 3
gatgcaatatgcctctttaa

SEQ ID NO: 46884 - DNA, 20 bp, Human parainfluenza virus 3
ccatagcattgcgacaaaag

SEQ ID NO: 46885 - DNA, 20 bp, Human parainfluenza virus 3
cgacaaaagatgtggattca

SEQ ID NO: 46886 - DNA, 20 bp, Human parainfluenza virus 3
atttatcaggaggaaggatg

SEQ ID NO: 46887 - DNA, 20 bp, Human parainfluenza virus 3
atcaggaggaaggatgataa

SEQ ID NO: 46888 - DNA, 20 bp, Human parainfluenza virus 3
tcaggaggaaggatgataag

SEQ ID NO: 46889 - DNA, 20 bp, Human parainfluenza virus 3
gatggaagcctcacagatag

SEQ ID NO: 46890 - DNA, 20 bp, Human parainfluenza virus 3
tacactagatagtctcaaaa

SEQ ID NO: 46891 - DNA, 20 bp, Human parainfluenza virus 3
acactagatagtctcaaaat

SEQ ID NO: 46892 - DNA, 20 bp, Human parainfluenza virus 3
cactagatagtctcaaaatt

SEQ ID NO: 46893 - DNA, 20 bp, Human parainfluenza virus 3
taacaccggtagctacatca

SEQ ID NO: 46894 - DNA, 20 bp, Human coronavirus 229E
ttgctatggccggcatcttt

SEQ ID NO: 46895 - DNA, 20 bp, Human coronavirus 229E
tgctatggccggcatctttg

SEQ ID NO: 46896 - DNA, 20 bp, Human coronavirus 229E
gctatggccggcatctttga

SEQ ID NO: 46897 - DNA, 20 bp, Human coronavirus 229E
ctatggccggcatctttgat

SEQ ID NO: 46898 - DNA, 20 bp, Human coronavirus 229E
gatgctggagtcgtagtgta

SEQ ID NO: 46899 - DNA, 20 bp, Human coronavirus 229E
tactattgcgcaagccgtcc

SEQ ID NO: 46900 - DNA, 20 bp, Human coronavirus 229E
cgcaagccgtccgccgttat

SEQ ID NO: 46901 - DNA, 20 bp, Human coronavirus 229E
tagcgaggccgctagcaatg

SEQ ID NO: 46902 - DNA, 20 bp, Human coronavirus 229E
tagggcatgccgatttgttt

SEQ ID NO: 46903 - DNA, 20 bp, Human coronavirus 229E
agggcatgccgatttgtttc

SEQ ID NO: 46904 - DNA, 20 bp, Human coronavirus 229E
cggtgagaacgaagaaatta

SEQ ID NO: 46905 - DNA, 20 bp, Human coronavirus 229E
ggtgagaacgaagaaattat

SEQ ID NO: 46906 - DNA, 20 bp, Human coronavirus 229E
tcatcaatggtcatacttac

SEQ ID NO: 46907 - DNA, 20 bp, Human coronavirus 229E
cgtttgtgcttggcttacta

SEQ ID NO: 46908 - DNA, 20 bp, Human coronavirus 229E
gtgcttggcttactaagcgt

SEQ ID NO: 46909 - DNA, 20 bp, Human coronavirus 229E
caacatcctagaggccttta

SEQ ID NO: 46910 - DNA, 20 bp, Human coronavirus 229E
actaaacctgtgtttattag

SEQ ID NO: 46911 - DNA, 20 bp, Human coronavirus 229E
ctaaacctgtgtttattagt

SEQ ID NO: 46912 - DNA, 20 bp, Human coronavirus 229E
attagtgcattagttcaatg

SEQ ID NO: 46913 - DNA, 20 bp, Human coronavirus 229E
ttagtgcattagttcaatgt

SEQ ID NO: 46914 - DNA, 20 bp, Human coronavirus 229E
ctttgttgcttcttccactt

SEQ ID NO: 46915 - DNA, 20 bp, Human coronavirus 229E
gttgcttcttccacttttgt

SEQ ID NO: 46916 - DNA, 20 bp, Human coronavirus 229E
ttgcttcttccacttttgta

SEQ ID NO: 46917 - DNA, 20 bp, Human coronavirus 229E
cttcttccacttttgtagaa

SEQ ID NO: 46918 - DNA, 20 bp, Human coronavirus 229E
ttccacttttgtagaagagg

SEQ ID NO: 46919 - DNA, 20 bp, Human coronavirus 229E
gacgtgtttgtcacagctat

SEQ ID NO: 46920 - DNA, 20 bp, Human coronavirus 229E
acgtgtttgtcacagctatt

SEQ ID NO: 46921 - DNA, 20 bp, Human coronavirus 229E
gtcacagctattcaaactgt

SEQ ID NO: 46922 - DNA, 20 bp, Human coronavirus 229E
tcacagctattcaaactgtc

SEQ ID NO: 46923 - DNA, 20 bp, Human coronavirus 229E
aaactgtctttgactgtgct

SEQ ID NO: 46924 - DNA, 20 bp, Human coronavirus 229E
ttgttggttccactgaagaa

SEQ ID NO: 46925 - DNA, 20 bp, Human coronavirus 229E
ttggttccactgaagaagtt

SEQ ID NO: 46926 - DNA, 20 bp, Human coronavirus 229E
gttccactgaagaagttaaa

SEQ ID NO: 46927 - DNA, 20 bp, Human coronavirus 229E
cactgaagaagttaaatctt

SEQ ID NO: 46928 - DNA, 20 bp, Human coronavirus 229E
aatcttcacgtgttgaacgt

SEQ ID NO: 46929 - DNA, 20 bp, Human coronavirus 229E
acaaatgggatgatttttgc

SEQ ID NO: 46930 - DNA, 20 bp, Human coronavirus 229E
ttgcagacaatatagtaacg

SEQ ID NO: 46931 - DNA, 20 bp, Human coronavirus 229E
tgcagacaatatagtaacga

SEQ ID NO: 46932 - DNA, 20 bp, Human coronavirus 229E
gcagacaatatagtaacgag

SEQ ID NO: 46933 - DNA, 20 bp, Human coronavirus 229E
cagacaatatagtaacgagt

SEQ ID NO: 46934 - DNA, 20 bp, Human coronavirus 229E
taaacgttggcttggcattt

SEQ ID NO: 46935 - DNA, 20 bp, Human coronavirus 229E
aaacgttggcttggcatttt

SEQ ID NO: 46936 - DNA, 20 bp, Human coronavirus 229E
aacgttggcttggcattttg

SEQ ID NO: 46937 - DNA, 20 bp, Human coronavirus 229E
gcttggcattttgctagagg

SEQ ID NO: 46938 - DNA, 20 bp, Human coronavirus 229E
gcattttgctagaggcctat

SEQ ID NO: 46939 - DNA, 20 bp, Human coronavirus 229E
cgagagtgcttacatgccaa

SEQ ID NO: 46940 - DNA, 20 bp, Human coronavirus 229E
gagagtgcttacatgccaat

SEQ ID NO: 46941 - DNA, 20 bp, Human coronavirus 229E
catgccaattgcagacccta

SEQ ID NO: 46942 - DNA, 20 bp, Human coronavirus 229E
cagaccctacacattttgac

SEQ ID NO: 46943 - DNA, 20 bp, Human coronavirus 229E
tgacattgaagaagttgaac

SEQ ID NO: 46944 - DNA, 20 bp, Human coronavirus 229E
tagatgtttgtgaaaaggca

SEQ ID NO: 46945 - DNA, 20 bp, Human coronavirus 229E
gtgaaaaggcaattggcaag

SEQ ID NO: 46946 - DNA, 20 bp, Human coronavirus 229E
tgaaaaggcaattggcaaga

SEQ ID NO: 46947 - DNA, 20 bp, Human coronavirus 229E
gcaagaaaattaaacatgaa

SEQ ID NO: 46948 - DNA, 20 bp, Human coronavirus 229E
aacatgaaggtgactgggat

SEQ ID NO: 46949 - DNA, 20 bp, Human coronavirus 229E
actcagttatgttacaaata

SEQ ID NO: 46950 - DNA, 20 bp, Human coronavirus 229E
tgttacaaatacaattaact

SEQ ID NO: 46951 - DNA, 20 bp, Human coronavirus 229E
caaatacaattaactggtat

SEQ ID NO: 46952 - DNA, 20 bp, Human coronavirus 229E
actggtatacttgatggtga

SEQ ID NO: 46953 - DNA, 20 bp, Human coronavirus 229E
atggtgactatgctatgcag

SEQ ID NO: 46954 - DNA, 20 bp, Human coronavirus 229E
aagaatcgggagctgttttg

SEQ ID NO: 46955 - DNA, 20 bp, Human coronavirus 229E
tgttttgtacgcccactaag

SEQ ID NO: 46956 - DNA, 20 bp, Human coronavirus 229E
gttttgtacgcccactaaga

SEQ ID NO: 46957 - DNA, 20 bp, Human coronavirus 229E
ttttgtacgcccactaagaa

SEQ ID NO: 46958 - DNA, 20 bp, Human coronavirus 229E
tgtacgcccactaagaaggc

SEQ ID NO: 46959 - DNA, 20 bp, Human coronavirus 229E
aaaatacagttgatacaaca

SEQ ID NO: 46960 - DNA, 20 bp, Human coronavirus 229E
atacaacacctaaggaagaa

SEQ ID NO: 46961 - DNA, 20 bp, Human coronavirus 229E
gttgttaaagagaagttgaa

SEQ ID NO: 46962 - DNA, 20 bp, Human coronavirus 229E
ttgttaaagagaagttgaac

SEQ ID NO: 46963 - DNA, 20 bp, Human coronavirus 229E
ttaaagagaagttgaacgcc

SEQ ID NO: 46964 - DNA, 20 bp, Human coronavirus 229E
agtgaatgttcaaaaagttg

SEQ ID NO: 46965 - DNA, 20 bp, Human coronavirus 229E
gtgaatgttcaaaaagttga

SEQ ID NO: 46966 - DNA, 20 bp, Human coronavirus 229E
aaaaagttgagcaacctaaa

SEQ ID NO: 46967 - DNA, 20 bp, Human coronavirus 229E
agcaacctaaaatagaacca

SEQ ID NO: 46968 - DNA, 20 bp, Human coronavirus 229E
aagttgcacccaagccttac

SEQ ID NO: 46969 - DNA, 20 bp, Human coronavirus 229E
tgccatccgaaaaggacaaa

SEQ ID NO: 46970 - DNA, 20 bp, Human coronavirus 229E
agataataatgttcaacgat

SEQ ID NO: 46971 - DNA, 20 bp, Human coronavirus 229E
gataataatgttcaacgatg

SEQ ID NO: 46972 - DNA, 20 bp, Human coronavirus 229E
aacgatgcacacgtaagttg

SEQ ID NO: 46973 - DNA, 20 bp, Human coronavirus 229E
aatagacttatgtgtgatat

SEQ ID NO: 46974 - DNA, 20 bp, Human coronavirus 229E
acacatctgaattgcttact

SEQ ID NO: 46975 - DNA, 20 bp, Human coronavirus 229E
cttactaaagcaatagatgt

SEQ ID NO: 46976 - DNA, 20 bp, Human coronavirus 229E
ctaaagcaatagatgttgat

SEQ ID NO: 46977 - DNA, 20 bp, Human coronavirus 229E
attgggtcgaattttatggc

SEQ ID NO: 46978 - DNA, 20 bp, Human coronavirus 229E
ggtcgaattttatggcttta

SEQ ID NO: 46979 - DNA, 20 bp, Human coronavirus 229E
gttattgtgtccatggtatt

SEQ ID NO: 46980 - DNA, 20 bp, Human coronavirus 229E
ttgtgtccatggtattaagt

SEQ ID NO: 46981 - DNA, 20 bp, Human coronavirus 229E
tgtccatggtattaagtact

SEQ ID NO: 46982 - DNA, 20 bp, Human coronavirus 229E
agtactattcacgtgttaga

SEQ ID NO: 46983 - DNA, 20 bp, Human coronavirus 229E
acgtgttagaagtgttagag

SEQ ID NO: 46984 - DNA, 20 bp, Human coronavirus 229E
ttttaaaacgtagtcttaaa

SEQ ID NO: 46985 - DNA, 20 bp, Human coronavirus 229E
taaaacgtagtcttaaatat

SEQ ID NO: 46986 - DNA, 20 bp, Human coronavirus 229E
aaaacgtagtcttaaatata

SEQ ID NO: 46987 - DNA, 20 bp, Human coronavirus 229E
aaacgtagtcttaaatataa

SEQ ID NO: 46988 - DNA, 20 bp, Human coronavirus 229E
aatataacttaaaagcgtca

SEQ ID NO: 46989 - DNA, 20 bp, Human coronavirus 229E
attgggctgcaagatgtgtc

SEQ ID NO: 46990 - DNA, 20 bp, Human coronavirus 229E
ggctgcaagatgtgtctttt

SEQ ID NO: 46991 - DNA, 20 bp, Human coronavirus 229E
ttggttaccaagagttaagt

SEQ ID NO: 46992 - DNA, 20 bp, Human coronavirus 229E
tggttaccaagagttaagtc

SEQ ID NO: 46993 - DNA, 20 bp, Human coronavirus 229E
ggttaccaagagttaagtca

SEQ ID NO: 46994 - DNA, 20 bp, Human coronavirus 229E
tattgcgtgttctaagagtg

SEQ ID NO: 46995 - DNA, 20 bp, Human coronavirus 229E
cgtgttctaagagtgctaga

SEQ ID NO: 46996 - DNA, 20 bp, Human coronavirus 229E
taagagtgctagacttaaga

SEQ ID NO: 46997 - DNA, 20 bp, Human coronavirus 229E
agagattccctgttaacaca

SEQ ID NO: 46998 - DNA, 20 bp, Human coronavirus 229E
cctgttaacacaattgtcaa

SEQ ID NO: 46999 - DNA, 20 bp, Human coronavirus 229E
aggcctgtctattagtgatc

SEQ ID NO: 47000 - DNA, 20 bp, Human coronavirus 229E
ggcctgtctattagtgatca

SEQ ID NO: 47001 - DNA, 20 bp, Human coronavirus 229E
gtgatcatgaatttactagt

SEQ ID NO: 47002 - DNA, 20 bp, Human coronavirus 229E
actagtgctatttctaatgc

SEQ ID NO: 47003 - DNA, 20 bp, Human coronavirus 229E
ctagtgctatttctaatgca

SEQ ID NO: 47004 - DNA, 20 bp, Human coronavirus 229E
gactttcttgttgacaatta

SEQ ID NO: 47005 - DNA, 20 bp, Human coronavirus 229E
actttcttgttgacaattaa

SEQ ID NO: 47006 - DNA, 20 bp, Human coronavirus 229E
cttgttgacaattaatgaaa

SEQ ID NO: 47007 - DNA, 20 bp, Human coronavirus 229E
ttgttgacaattaatgaaaa

SEQ ID NO: 47008 - DNA, 20 bp, Human coronavirus 229E
ttgacaattaatgaaaacca

SEQ ID NO: 47009 - DNA, 20 bp, Human coronavirus 229E
tagttggagtttctgaaatt

SEQ ID NO: 47010 - DNA, 20 bp, Human coronavirus 229E
gagtttctgaaattgttaat

SEQ ID NO: 47011 - DNA, 20 bp, Human coronavirus 229E
ctgaaattgttaatactgtc

SEQ ID NO: 47012 - DNA, 20 bp, Human coronavirus 229E
tgaaattgttaatactgtcg

SEQ ID NO: 47013 - DNA, 20 bp, Human coronavirus 229E
ttaatactgtcgctggcatt

SEQ ID NO: 47014 - DNA, 20 bp, Human coronavirus 229E
ccaccaaatactgccgcgta

SEQ ID NO: 47015 - DNA, 20 bp, Human coronavirus 229E
aatccaatgcaggtgtgtgt

SEQ ID NO: 47016 - DNA, 20 bp, Human coronavirus 229E
tggctttgacaagtggtttg

SEQ ID NO: 47017 - DNA, 20 bp, Human coronavirus 229E
ggctttgacaagtggtttgt

SEQ ID NO: 47018 - DNA, 20 bp, Human coronavirus 229E
gctttgacaagtggtttgtt

SEQ ID NO: 47019 - DNA, 20 bp, Human coronavirus 229E
cgctatgcatggatttggtg

SEQ ID NO: 47020 - DNA, 20 bp, Human coronavirus 229E
ggtgtgctgcatatttaatt

SEQ ID NO: 47021 - DNA, 20 bp, Human coronavirus 229E
gtgtgctgcatatttaattg

SEQ ID NO: 47022 - DNA, 20 bp, Human coronavirus 229E
aattgcgtatatttcttttg

SEQ ID NO: 47023 - DNA, 20 bp, Human coronavirus 229E
attgcgtatatttcttttgc

SEQ ID NO: 47024 - DNA, 20 bp, Human coronavirus 229E
tacacacctccgactgtcag

SEQ ID NO: 47025 - DNA, 20 bp, Human coronavirus 229E
tggttctacattacaggctg

SEQ ID NO: 47026 - DNA, 20 bp, Human coronavirus 229E
tacattacaggctggtttgc

SEQ ID NO: 47027 - DNA, 20 bp, Human coronavirus 229E
caggctggtttgcgcaaaat

SEQ ID NO: 47028 - DNA, 20 bp, Human coronavirus 229E
gcgcaaaatggcacaaccat

SEQ ID NO: 47029 - DNA, 20 bp, Human coronavirus 229E
aggtttcacagactaacatg

SEQ ID NO: 47030 - DNA, 20 bp, Human coronavirus 229E
cacagactaacatgcacaca

SEQ ID NO: 47031 - DNA, 20 bp, Human coronavirus 229E
acagactaacatgcacacac

SEQ ID NO: 47032 - DNA, 20 bp, Human coronavirus 229E
ttttagaacactaaaatctg

SEQ ID NO: 47033 - DNA, 20 bp, Human coronavirus 229E
tagaacactaaaatctggtg

SEQ ID NO: 47034 - DNA, 20 bp, Human coronavirus 229E
aagttgaatctgcaaaccag

SEQ ID NO: 47035 - DNA, 20 bp, Human coronavirus 229E
aatctgcaaaccagatgtta

SEQ ID NO: 47036 - DNA, 20 bp, Human coronavirus 229E
acagttaatgtggttgcatt

SEQ ID NO: 47037 - DNA, 20 bp, Human coronavirus 229E
atgtggttgcatttctttat

SEQ ID NO: 47038 - DNA, 20 bp, Human coronavirus 229E
catttctttatgctgctata

SEQ ID NO: 47039 - DNA, 20 bp, Human coronavirus 229E
tttgtcatgttctgggctga

SEQ ID NO: 47040 - DNA, 20 bp, Human coronavirus 229E
gtcatgttctgggctgaatt

SEQ ID NO: 47041 - DNA, 20 bp, Human coronavirus 229E
tcatgttctgggctgaatta

SEQ ID NO: 47042 - DNA, 20 bp, Human coronavirus 229E
tgggctgaattatttgttta

SEQ ID NO: 47043 - DNA, 20 bp, Human coronavirus 229E
tttgtttataccaccactat

SEQ ID NO: 47044 - DNA, 20 bp, Human coronavirus 229E
catacttggcgctttgctaa

SEQ ID NO: 47045 - DNA, 20 bp, Human coronavirus 229E
gcgctttgctaaagagcgtt

SEQ ID NO: 47046 - DNA, 20 bp, Human coronavirus 229E
gctaaagagcgttgtacaca

SEQ ID NO: 47047 - DNA, 20 bp, Human coronavirus 229E
ctaaagagcgttgtacacat

SEQ ID NO: 47048 - DNA, 20 bp, Human coronavirus 229E
tacacattggtgcacttatt

SEQ ID NO: 47049 - DNA, 20 bp, Human coronavirus 229E
tactggattaacaggttctg

SEQ ID NO: 47050 - DNA, 20 bp, Human coronavirus 229E
acaggttctgtaagtgcaca

SEQ ID NO: 47051 - DNA, 20 bp, Human coronavirus 229E
tgtaagtgcacattaggtgt

SEQ ID NO: 47052 - DNA, 20 bp, Human coronavirus 229E
ggtgtttatgatttctgtgt

SEQ ID NO: 47053 - DNA, 20 bp, Human coronavirus 229E
atgatttctgtgttagtcca

SEQ ID NO: 47054 - DNA, 20 bp, Human coronavirus 229E
tgtctaacatgaacatagct

SEQ ID NO: 47055 - DNA, 20 bp, Human coronavirus 229E
gtctaacatgaacatagctt

SEQ ID NO: 47056 - DNA, 20 bp, Human coronavirus 229E
tctaacatgaacatagcttc

SEQ ID NO: 47057 - DNA, 20 bp, Human coronavirus 229E
taattcaaaggagtgggcat

SEQ ID NO: 47058 - DNA, 20 bp, Human coronavirus 229E
aaaggagtgggcatattgtg

SEQ ID NO: 47059 - DNA, 20 bp, Human coronavirus 229E
caaaagctgagtttgacagg

SEQ ID NO: 47060 - DNA, 20 bp, Human coronavirus 229E
gacagggaatcatctgttca

SEQ ID NO: 47061 - DNA, 20 bp, Human coronavirus 229E
acagggaatcatctgttcaa

SEQ ID NO: 47062 - DNA, 20 bp, Human coronavirus 229E
aaaagaaaattaacagaatg

SEQ ID NO: 47063 - DNA, 20 bp, Human coronavirus 229E
acagaatggctgaacaagct

SEQ ID NO: 47064 - DNA, 20 bp, Human coronavirus 229E
tttggacattacaggaagtt

SEQ ID NO: 47065 - DNA, 20 bp, Human coronavirus 229E
ggacattacaggaagttaag

SEQ ID NO: 47066 - DNA, 20 bp, Human coronavirus 229E
gacattacaggaagttaagg

SEQ ID NO: 47067 - DNA, 20 bp, Human coronavirus 229E
caggaagttaaggataatga

SEQ ID NO: 47068 - DNA, 20 bp, Human coronavirus 229E
aggataatgatggtaagaat

SEQ ID NO: 47069 - DNA, 20 bp, Human coronavirus 229E
aatgggaacatgactctggt

SEQ ID NO: 47070 - DNA, 20 bp, Human coronavirus 229E
cagttgaattggaaccacct

SEQ ID NO: 47071 - DNA, 20 bp, Human coronavirus 229E
aattggaaccaccttgcaga

SEQ ID NO: 47072 - DNA, 20 bp, Human coronavirus 229E
gaaccaccttgcagatttgt

SEQ ID NO: 47073 - DNA, 20 bp, Human coronavirus 229E
cagatttgttatagacacac

SEQ ID NO: 47074 - DNA, 20 bp, Human coronavirus 229E
atgctgttaaacaaggcgca

SEQ ID NO: 47075 - DNA, 20 bp, Human coronavirus 229E
aacaaggcgcaaaacctgtt

SEQ ID NO: 47076 - DNA, 20 bp, Human coronavirus 229E
gcaattgtgtaaagatgttg

SEQ ID NO: 47077 - DNA, 20 bp, Human coronavirus 229E
tgtaaagatgttgactaatg

SEQ ID NO: 47078 - DNA, 20 bp, Human coronavirus 229E
actaatggttctggtagcgg

SEQ ID NO: 47079 - DNA, 20 bp, Human coronavirus 229E
tgataacagttatttaaacg

SEQ ID NO: 47080 - DNA, 20 bp, Human coronavirus 229E
gataacagttatttaaacga

SEQ ID NO: 47081 - DNA, 20 bp, Human coronavirus 229E
ataacagttatttaaacgag

SEQ ID NO: 47082 - DNA, 20 bp, Human coronavirus 229E
tttaaacgagtccggggctc

SEQ ID NO: 47083 - DNA, 20 bp, Human coronavirus 229E
aaacgagtccggggctctag

SEQ ID NO: 47084 - DNA, 20 bp, Human coronavirus 229E
ctaaatacaccatgatggat

SEQ ID NO: 47085 - DNA, 20 bp, Human coronavirus 229E
gtgcttcgctctgcgtaact

SEQ ID NO: 47086 - DNA, 20 bp, Human coronavirus 229E
tgcttcgctctgcgtaactt

SEQ ID NO: 47087 - DNA, 20 bp, Human coronavirus 229E
gctctgcgtaactttgatga

SEQ ID NO: 47088 - DNA, 20 bp, Human coronavirus 229E
gatgaaaaagactgtgaagt

SEQ ID NO: 47089 - DNA, 20 bp, Human coronavirus 229E
ggtgactttgtattgtgtcc

SEQ ID NO: 47090 - DNA, 20 bp, Human coronavirus 229E
gtattgtgtcctcctggaat

SEQ ID NO: 47091 - DNA, 20 bp, Human coronavirus 229E
tattgtgtcctcctggaatg

SEQ ID NO: 47092 - DNA, 20 bp, Human coronavirus 229E
tgtcctcctggaatgggaat

SEQ ID NO: 47093 - DNA, 20 bp, Human coronavirus 229E
ttatatgatgcctgttatgg

SEQ ID NO: 47094 - DNA, 20 bp, Human coronavirus 229E
caaacacggcttttggacct

SEQ ID NO: 47095 - DNA, 20 bp, Human coronavirus 229E
tggacctctatgcagaaaag

SEQ ID NO: 47096 - DNA, 20 bp, Human coronavirus 229E
ggacctctatgcagaaaagt

SEQ ID NO: 47097 - DNA, 20 bp, Human coronavirus 229E
gacctctatgcagaaaagtg

SEQ ID NO: 47098 - DNA, 20 bp, Human coronavirus 229E
attgatggtgtacccgtagt

SEQ ID NO: 47099 - DNA, 20 bp, Human coronavirus 229E
taataaggagttttatgact

SEQ ID NO: 47100 - DNA, 20 bp, Human coronavirus 229E
aataaggagttttatgactt

SEQ ID NO: 47101 - DNA, 20 bp, Human coronavirus 229E
ataaggagttttatgacttc

SEQ ID NO: 47102 - DNA, 20 bp, Human coronavirus 229E
tatgacttcttacgttctca

SEQ ID NO: 47103 - DNA, 20 bp, Human coronavirus 229E
atgacttcttacgttctcag

SEQ ID NO: 47104 - DNA, 20 bp, Human coronavirus 229E
attagctactatgactacaa

SEQ ID NO: 47105 - DNA, 20 bp, Human coronavirus 229E
ttagctactatgactacaag

SEQ ID NO: 47106 - DNA, 20 bp, Human coronavirus 229E
gctactatgactacaagaca

SEQ ID NO: 47107 - DNA, 20 bp, Human coronavirus 229E
catcagaaatgtctgaaatc

SEQ ID NO: 47108 - DNA, 20 bp, Human coronavirus 229E
atcagaaatgtctgaaatcc

SEQ ID NO: 47109 - DNA, 20 bp, Human coronavirus 229E
tttctgatgatagtgttgtg

SEQ ID NO: 47110 - DNA, 20 bp, Human coronavirus 229E
ctgatgatagtgttgtgtgc

SEQ ID NO: 47111 - DNA, 20 bp, Human coronavirus 229E
tgatgatagtgttgtgtgct

SEQ ID NO: 47112 - DNA, 20 bp, Human coronavirus 229E
tgtgctataataaaacttat

SEQ ID NO: 47113 - DNA, 20 bp, Human coronavirus 229E
tgctggacttggttacattg

SEQ ID NO: 47114 - DNA, 20 bp, Human coronavirus 229E
ttttggaacgctatgtttct

SEQ ID NO: 47115 - DNA, 20 bp, Human coronavirus 229E
tggaacgctatgtttctctg

SEQ ID NO: 47116 - DNA, 20 bp, Human coronavirus 229E
ggaacgctatgtttctctgg

SEQ ID NO: 47117 - DNA, 20 bp, Human coronavirus 229E
gaacgctatgtttctctggc

SEQ ID NO: 47118 - DNA, 20 bp, Human coronavirus 229E
ctctggctatagatgcctac

SEQ ID NO: 47119 - DNA, 20 bp, Human coronavirus 229E
attcccactgtgttcagctg

SEQ ID NO: 47120 - DNA, 20 bp, Human coronavirus 229E
ccactgtgttcagctggtaa

SEQ ID NO: 47121 - DNA, 20 bp, Human coronavirus 229E
agctggtaatgtctttggtt

SEQ ID NO: 47122 - DNA, 20 bp, Human coronavirus 229E
ggtttgtacaaaagttctgc

SEQ ID NO: 47123 - DNA, 20 bp, Human coronavirus 229E
gtttgtacaaaagttctgct

SEQ ID NO: 47124 - DNA, 20 bp, Human coronavirus 229E
caagttggtgagtttgtgtt

SEQ ID NO: 47125 - DNA, 20 bp, Human coronavirus 229E
aagttggtgagtttgtgttt

SEQ ID NO: 47126 - DNA, 20 bp, Human coronavirus 229E
gtgagtttgtgtttgagaaa

SEQ ID NO: 47127 - DNA, 20 bp, Human coronavirus 229E
gtgtttgagaaagtagatta

SEQ ID NO: 47128 - DNA, 20 bp, Human coronavirus 229E
tgtttgagaaagtagattac

SEQ ID NO: 47129 - DNA, 20 bp, Human coronavirus 229E
ttctattggtattggtgtgt

SEQ ID NO: 47130 - DNA, 20 bp, Human coronavirus 229E
tattggtattggtgtgtatt

SEQ ID NO: 47131 - DNA, 20 bp, Human coronavirus 229E
gtattggtgtgtattaccct

SEQ ID NO: 47132 - DNA, 20 bp, Human coronavirus 229E
gtgtgtattaccctggagcg

SEQ ID NO: 47133 - DNA, 20 bp, Human coronavirus 229E
ccctggagcgaggatcgtgt

SEQ ID NO: 47134 - DNA, 20 bp, Human coronavirus 229E
tctgtgattaaccagcgtat

SEQ ID NO: 47135 - DNA, 20 bp, Human coronavirus 229E
accagcgtatatcatataaa

SEQ ID NO: 47136 - DNA, 20 bp, Human coronavirus 229E
tatatgttggtgatcctcaa

SEQ ID NO: 47137 - DNA, 20 bp, Human coronavirus 229E
gtgatcctcaacagcttcca

SEQ ID NO: 47138 - DNA, 20 bp, Human coronavirus 229E
cagctcctagagttcttatc

SEQ ID NO: 47139 - DNA, 20 bp, Human coronavirus 229E
atctcaccttacaatagtca

SEQ ID NO: 47140 - DNA, 20 bp, Human coronavirus 229E
tctcaccttacaatagtcaa

SEQ ID NO: 47141 - DNA, 20 bp, Human coronavirus 229E
caatagtcaaaattatgtag

SEQ ID NO: 47142 - DNA, 20 bp, Human coronavirus 229E
tgtagctgccaggcttttag

SEQ ID NO: 47143 - DNA, 20 bp, Human coronavirus 229E
taggcttacaaactcagaca

SEQ ID NO: 47144 - DNA, 20 bp, Human coronavirus 229E
atttaccaccaagtcatgcc

SEQ ID NO: 47145 - DNA, 20 bp, Human coronavirus 229E
accaccaagtcatgccacta

SEQ ID NO: 47146 - DNA, 20 bp, Human coronavirus 229E
ccaccaagtcatgccactac

SEQ ID NO: 47147 - DNA, 20 bp, Human coronavirus 229E
tttgtcattgtctgatagat

SEQ ID NO: 47148 - DNA, 20 bp, Human coronavirus 229E
gtcattgtctgatagattta

SEQ ID NO: 47149 - DNA, 20 bp, Human coronavirus 229E
ggaatggatgtggaaggtgc

SEQ ID NO: 47150 - DNA, 20 bp, Human coronavirus 229E
gcactaatgtacctctacaa

SEQ ID NO: 47151 - DNA, 20 bp, Human coronavirus 229E
gtttttccaatggtgttgat

SEQ ID NO: 47152 - DNA, 20 bp, Human coronavirus 229E
ttccaatggtgttgattttg

SEQ ID NO: 47153 - DNA, 20 bp, Human coronavirus 229E
tccaatggtgttgattttgt

SEQ ID NO: 47154 - DNA, 20 bp, Human coronavirus 229E
agagttgaccactatgcgtt

SEQ ID NO: 47155 - DNA, 20 bp, Human coronavirus 229E
gagttgaccactatgcgtta

SEQ ID NO: 47156 - DNA, 20 bp, Human coronavirus 229E
accactatgcgttattttgt

SEQ ID NO: 47157 - DNA, 20 bp, Human coronavirus 229E
ttttgttaagattggagctg

SEQ ID NO: 47158 - DNA, 20 bp, Human coronavirus 229E
tgttaagattggagctgtta

SEQ ID NO: 47159 - DNA, 20 bp, Human coronavirus 229E
gtcaattacctaccctatga

SEQ ID NO: 47160 - DNA, 20 bp, Human coronavirus 229E
cctaccctatgatagctaat

SEQ ID NO: 47161 - DNA, 20 bp, Human coronavirus 229E
tgcgtgctgctattaaattg

SEQ ID NO: 47162 - DNA, 20 bp, Human coronavirus 229E
aatagcagcacgcataatat

SEQ ID NO: 47163 - DNA, 20 bp, Human coronavirus 229E
atagcagcacgcataatatg

SEQ ID NO: 47164 - DNA, 20 bp, Human coronavirus 229E
gacacacgtacacgatctac

SEQ ID NO: 47165 - DNA, 20 bp, Human coronavirus 229E
acacacgtacacgatctaca

SEQ ID NO: 47166 - DNA, 20 bp, Human coronavirus 229E
aaccttgaaggtgtaaatgg

SEQ ID NO: 47167 - DNA, 20 bp, Human coronavirus 229E
aaggtgtaaatggtgggtca

SEQ ID NO: 47168 - DNA, 20 bp, Human coronavirus 229E
tatgtcaataatcatgcatt

SEQ ID NO: 47169 - DNA, 20 bp, Human coronavirus 229E
taatatttgggttcctacca

SEQ ID NO: 47170 - DNA, 20 bp, Human coronavirus 229E
aatatttgggttcctaccac

SEQ ID NO: 47171 - DNA, 20 bp, Human coronavirus 229E
atatttgggttcctaccacg

SEQ ID NO: 47172 - DNA, 20 bp, Human coronavirus 229E
gggttcctaccacgtttgat

SEQ ID NO: 47173 - DNA, 20 bp, Human coronavirus 229E
ggttcctaccacgtttgatt

SEQ ID NO: 47174 - DNA, 20 bp, Human coronavirus 229E
gtcttgtgggattatgaagc

SEQ ID NO: 47175 - DNA, 20 bp, Human coronavirus 229E
tcttgtgggattatgaagct

SEQ ID NO: 47176 - DNA, 20 bp, Human coronavirus 229E
tgggattatgaagctgagcg

SEQ ID NO: 47177 - DNA, 20 bp, Human coronavirus 229E
tgaagctgagcgtcccttga

SEQ ID NO: 47178 - DNA, 20 bp, Human coronavirus 229E
acaagctttactaagtctgt

SEQ ID NO: 47179 - DNA, 20 bp, Human coronavirus 229E
atcattatgatggtttttat

SEQ ID NO: 47180 - DNA, 20 bp, Human coronavirus 229E
tgatggtttttatacccaag

SEQ ID NO: 47181 - DNA, 20 bp, Human coronavirus 229E
ttatacccaaggtcgtaatt

SEQ ID NO: 47182 - DNA, 20 bp, Human coronavirus 229E
tatacccaaggtcgtaattt

SEQ ID NO: 47183 - DNA, 20 bp, Human coronavirus 229E
atacccaaggtcgtaattta

SEQ ID NO: 47184 - DNA, 20 bp, Human coronavirus 229E
tacttacatggatttgttgt

SEQ ID NO: 47185 - DNA, 20 bp, Human coronavirus 229E
catggatttgttgttggatg

SEQ ID NO: 47186 - DNA, 20 bp, Human coronavirus 229E
gttgttggatgattttgttt

SEQ ID NO: 47187 - DNA, 20 bp, Human coronavirus 229E
ttgttggatgattttgtttc

SEQ ID NO: 47188 - DNA, 20 bp, Human coronavirus 229E
ttggatgattttgtttctgt

SEQ ID NO: 47189 - DNA, 20 bp, Human coronavirus 229E
tgtgttcctcataatatgag

SEQ ID NO: 47190 - DNA, 20 bp, Human coronavirus 229E
ctcataatatgagagtgtta

SEQ ID NO: 47191 - DNA, 20 bp, Human coronavirus 229E
cacttgggtgctggctctga

SEQ ID NO: 47192 - DNA, 20 bp, Human coronavirus 229E
ggtgctggctctgattatgg

SEQ ID NO: 47193 - DNA, 20 bp, Human coronavirus 229E
tggtgttgcaccaggaactg

SEQ ID NO: 47194 - DNA, 20 bp, Human coronavirus 229E
gtgatttcgcacaaggacct

SEQ ID NO: 47195 - DNA, 20 bp, Human coronavirus 229E
cgcacaaggaccttttatag

SEQ ID NO: 47196 - DNA, 20 bp, Human coronavirus 229E
gcacaaggaccttttataga

SEQ ID NO: 47197 - DNA, 20 bp, Human coronavirus 229E
tatagatggtaacataatac

SEQ ID NO: 47198 - DNA, 20 bp, Human coronavirus 229E
atagatggtaacataataca

SEQ ID NO: 47199 - DNA, 20 bp, Human coronavirus 229E
tcaaactacaaatgggctga

SEQ ID NO: 47200 - DNA, 20 bp, Human coronavirus 229E
ctctgtttgcaacggctgtg

SEQ ID NO: 47201 - DNA, 20 bp, Human coronavirus 229E
gcaacggctgtgttggttat

SEQ ID NO: 47202 - DNA, 20 bp, Human coronavirus 229E
caacggctgtgttggttatt

SEQ ID NO: 47203 - DNA, 20 bp, Human coronavirus 229E
gttattcagaaaatgtattt

SEQ ID NO: 47204 - DNA, 20 bp, Human coronavirus 229E
gtacagttttgggcaatttt

SEQ ID NO: 47205 - DNA, 20 bp, Human coronavirus 229E
tgggcaatttttattgcttt

SEQ ID NO: 47206 - DNA, 20 bp, Human coronavirus 229E
gggcaatttttattgctttg

SEQ ID NO: 47207 - DNA, 20 bp, Human coronavirus 229E
ggcaatttttattgctttgt

SEQ ID NO: 47208 - DNA, 20 bp, Human coronavirus 229E
ttattgctttgtaaatacta

SEQ ID NO: 47209 - DNA, 20 bp, Human coronavirus 229E
aatccgttgagctacctgtg

SEQ ID NO: 47210 - DNA, 20 bp, Human coronavirus 229E
agctacctgtgtctattgtg

SEQ ID NO: 47211 - DNA, 20 bp, Human coronavirus 229E
tgtcgctacctgtttatcat

SEQ ID NO: 47212 - DNA, 20 bp, Human coronavirus 229E
atcataaacatacgtttatt

SEQ ID NO: 47213 - DNA, 20 bp, Human coronavirus 229E
tcataaacatacgtttattg

SEQ ID NO: 47214 - DNA, 20 bp, Human coronavirus 229E
ttcgcgttagcaatgacacc

SEQ ID NO: 47215 - DNA, 20 bp, Human coronavirus 229E
gcgttagcaatgacaccttt

SEQ ID NO: 47216 - DNA, 20 bp, Human coronavirus 229E
gcaatgacacctttcttaat

SEQ ID NO: 47217 - DNA, 20 bp, Human coronavirus 229E
cttaatggaattacgtacac

SEQ ID NO: 47218 - DNA, 20 bp, Human coronavirus 229E
ttaatggaattacgtacaca

SEQ ID NO: 47219 - DNA, 20 bp, Human coronavirus 229E
gtgcagatggttctataatt

SEQ ID NO: 47220 - DNA, 20 bp, Human coronavirus 229E
tgcagatggttctataattg

SEQ ID NO: 47221 - DNA, 20 bp, Human coronavirus 229E
tataattgctgttcaaccac

SEQ ID NO: 47222 - DNA, 20 bp, Human coronavirus 229E
ctgttcaaccacgtaatgtt

SEQ ID NO: 47223 - DNA, 20 bp, Human coronavirus 229E
aaccacgtaatgtttcatat

SEQ ID NO: 47224 - DNA, 20 bp, Human coronavirus 229E
tgacaagaaagcgtttacac

SEQ ID NO: 47225 - DNA, 20 bp, Human coronavirus 229E
gacaagaaagcgtttacact

SEQ ID NO: 47226 - DNA, 20 bp, Human coronavirus 229E
acaagaaagcgtttacactt

SEQ ID NO: 47227 - DNA, 20 bp, Human coronavirus 229E
acacttgctaatgttagtag

SEQ ID NO: 47228 - DNA, 20 bp, Human coronavirus 229E
cacttgctaatgttagtagt

SEQ ID NO: 47229 - DNA, 20 bp, Human coronavirus 229E
aggaggtctaacatcagccg

SEQ ID NO: 47230 - DNA, 20 bp, Human coronavirus 229E
ggaggtctaacatcagccgt

SEQ ID NO: 47231 - DNA, 20 bp, Human coronavirus 229E
caataccattttcattagca

SEQ ID NO: 47232 - DNA, 20 bp, Human coronavirus 229E
aataccattttcattagcaa

SEQ ID NO: 47233 - DNA, 20 bp, Human coronavirus 229E
tcattagcaattcaggcacg

SEQ ID NO: 47234 - DNA, 20 bp, Human coronavirus 229E
aggctgatcaacaagtagat

SEQ ID NO: 47235 - DNA, 20 bp, Human coronavirus 229E
ctggtagattggctgctttg

SEQ ID NO: 47236 - DNA, 20 bp, Human coronavirus 229E
gctgctttgaatgtattcgt

SEQ ID NO: 47237 - DNA, 20 bp, Human coronavirus 229E
gaatgtattcgtttctcata

SEQ ID NO: 47238 - DNA, 20 bp, Human coronavirus 229E
aatgtattcgtttctcatac

SEQ ID NO: 47239 - DNA, 20 bp, Human coronavirus 229E
tgtgttgcgacaacctaatc

SEQ ID NO: 47240 - DNA, 20 bp, Human coronavirus 229E
cgacaacctaatcttgctct

SEQ ID NO: 47241 - DNA, 20 bp, Human coronavirus 229E
ctctttacaaagaaggcaat

SEQ ID NO: 47242 - DNA, 20 bp, Human coronavirus 229E
acaaagaaggcaattattat

SEQ ID NO: 47243 - DNA, 20 bp, Human coronavirus 229E
caaagaaggcaattattata

SEQ ID NO: 47244 - DNA, 20 bp, Human coronavirus 229E
cagacctagttgtcgaacag

SEQ ID NO: 47245 - DNA, 20 bp, Human coronavirus 229E
tcgaacagtacaaccagact

SEQ ID NO: 47246 - DNA, 20 bp, Human coronavirus 229E
tgaatttgaccagtgaaatt

SEQ ID NO: 47247 - DNA, 20 bp, Human coronavirus 229E
gaatttgaccagtgaaatta

SEQ ID NO: 47248 - DNA, 20 bp, Human coronavirus 229E
aatttgaccagtgaaattag

SEQ ID NO: 47249 - DNA, 20 bp, Human coronavirus 229E
catcttctattagaggttgt

SEQ ID NO: 47250 - DNA, 20 bp, Human coronavirus 229E
tattagaggttgttgtgaat

SEQ ID NO: 47251 - DNA, 20 bp, Human coronavirus 229E
gaggttgttgtgaatcaact

SEQ ID NO: 47252 - DNA, 20 bp, Human coronavirus 229E
ttgtgaatcaactaaacttc

SEQ ID NO: 47253 - DNA, 20 bp, Human coronavirus 229E
tgaatcaactaaacttcctt

SEQ ID NO: 47254 - DNA, 20 bp, Human coronavirus 229E
ctgtattggtctcaagcata

SEQ ID NO: 47255 - DNA, 20 bp, Human coronavirus 229E
gtctcaagcatatatttacg

SEQ ID NO: 47256 - DNA, 20 bp, Human coronavirus 229E
acgcaactttgattgctgta

SEQ ID NO: 47257 - DNA, 20 bp, Human coronavirus 229E
cgcaactttgattgctgtaa

SEQ ID NO: 47258 - DNA, 20 bp, Human coronavirus 229E
gattgctgtaattttgcttg

SEQ ID NO: 47259 - DNA, 20 bp, Human coronavirus 229E
ggttgttaatgtactactct

SEQ ID NO: 47260 - DNA, 20 bp, Human coronavirus 229E
gttgttaatgtactactctg

SEQ ID NO: 47261 - DNA, 20 bp, Human coronavirus 229E
ttaatgtactactctggtgt

SEQ ID NO: 47262 - DNA, 20 bp, Human coronavirus 229E
atgtactactctggtgtgtg

SEQ ID NO: 47263 - DNA, 20 bp, Human coronavirus 229E
tagtgatactactagtgtgt

SEQ ID NO: 47264 - DNA, 20 bp, Human coronavirus 229E
tttggccactcgtacttgct

SEQ ID NO: 47265 - DNA, 20 bp, Human coronavirus 229E
ggccactcgtacttgctttg

SEQ ID NO: 47266 - DNA, 20 bp, Human coronavirus 229E
gccactcgtacttgctttgt

SEQ ID NO: 47267 - DNA, 20 bp, Human coronavirus 229E
ctttgtcaatctttgacacc

SEQ ID NO: 47268 - DNA, 20 bp, Human coronavirus 229E
gtcaatctttgacacctggg

SEQ ID NO: 47269 - DNA, 20 bp, Human coronavirus 229E
acaaaatagcacaggctggg

SEQ ID NO: 47270 - DNA, 20 bp, Human coronavirus 229E
tctacgtacgagtaaaacac

SEQ ID NO: 47271 - DNA, 20 bp, Human coronavirus 229E
ctacgtacgagtaaaacacg

SEQ ID NO: 47272 - DNA, 20 bp, Human coronavirus 229E
tacgtacgagtaaaacacgg

SEQ ID NO: 47273 - DNA, 20 bp, Human coronavirus 229E
ttctgcagtgagctctccca

SEQ ID NO: 47274 - DNA, 20 bp, Human coronavirus 229E
taggctattggaatgttcaa

SEQ ID NO: 47275 - DNA, 20 bp, Human coronavirus 229E
gaatgttcaaaaacgtttca

SEQ ID NO: 47276 - DNA, 20 bp, Human coronavirus 229E
aaaaacgtttcagaactaga

SEQ ID NO: 47277 - DNA, 20 bp, Human coronavirus 229E
cagaactagaaagggcaaac

SEQ ID NO: 47278 - DNA, 20 bp, Human coronavirus 229E
agaactagaaagggcaaacg

SEQ ID NO: 47279 - DNA, 20 bp, Human coronavirus 229E
ctgcggctcttaaatcttta

SEQ ID NO: 47280 - DNA, 20 bp, Human coronavirus 229E
aatctttaggttttgacaag

SEQ ID NO: 47281 - DNA, 20 bp, Human coronavirus 229E
aggttttgacaagcctcagg

SEQ ID NO: 47282 - DNA, 20 bp, Human coronavirus 229E
ggttttgacaagcctcagga

SEQ ID NO: 47283 - DNA, 20 bp, Human coronavirus 229E
tgacaagcctcaggaaaaag

SEQ ID NO: 47284 - DNA, 20 bp, Human coronavirus 229E
tggccccagagaccttgacc

SEQ ID NO: 47285 - DNA, 20 bp, Human coronavirus 229E
ggccccagagaccttgacca

SEQ ID NO: 47286 - DNA, 20 bp, Human coronavirus 229E
gccccagagaccttgaccac

SEQ ID NO: 47287 - DNA, 20 bp, Human coronavirus 229E
accacaactttggaagtgca

SEQ ID NO: 47288 - DNA, 20 bp, Human coronavirus 229E
ggaagtgcaggtgttgtggc

SEQ ID NO: 47289 - DNA, 20 bp, Human coronavirus 229E
ttaaccctagtgcactagaa

SEQ ID NO: 47290 - DNA, 20 bp, Human coronavirus 229E
accctagtgcactagaattc

SEQ ID NO: 47291 - DNA, 20 bp, Human coronavirus 229E
aacccatctcaaacttcacc

SEQ ID NO: 47292 - DNA, 20 bp, Human coronavirus 229E
acctgcaactgctgaaccag

SEQ ID NO: 47293 - DNA, 20 bp, Human coronavirus 229E
ctattgaaactgacataatt

SEQ ID NO: 47294 - DNA, 20 bp, Human coronavirus 229E
ctttggcttgacaaggatct

SEQ ID NO: 47295 - DNA, 20 bp, Human coronavirus 229E
ggcttgacaaggatctagtc

SEQ ID NO: 47296 - DNA, 20 bp, Human coronavirus 229E
gcttgacaaggatctagtct

SEQ ID NO: 47297 - DNA, 20 bp, Human coronavirus 229E
acaaggatctagtcttatac

SEQ ID NO: 47298 - DNA, 20 bp, Human coronavirus 229E
tacacaatggtaagccagtg

SEQ ID NO: 47299 - DNA, 20 bp, Human papillomavirus type 108
attgtgactcattgcatgtc

SEQ ID NO: 47300 - DNA, 20 bp, Human papillomavirus type 108
ttgtgactcattgcatgtcc

SEQ ID NO: 47301 - DNA, 20 bp, Human papillomavirus type 108
tgactcattgcatgtccatt

SEQ ID NO: 47302 - DNA, 20 bp, Human papillomavirus type 108
catgtccatttgccacacct

SEQ ID NO: 47303 - DNA, 20 bp, Human papillomavirus type 108
gccacacctggcttttagta

SEQ ID NO: 47304 - DNA, 20 bp, Human papillomavirus type 108
gaagcattatttgaagaaag

SEQ ID NO: 47305 - DNA, 20 bp, Human papillomavirus type 108
tttgaagaaagcgatgggac

SEQ ID NO: 47306 - DNA, 20 bp, Human papillomavirus type 108
gaagaaagcgatgggacaga

SEQ ID NO: 47307 - DNA, 20 bp, Human papillomavirus type 108
aagaaagcgatgggacagat

SEQ ID NO: 47308 - DNA, 20 bp, Human papillomavirus type 108
ctgatttaattaataacatt

SEQ ID NO: 47309 - DNA, 20 bp, Human papillomavirus type 108
ggacatgaagctgaagattc

SEQ ID NO: 47310 - DNA, 20 bp, Human papillomavirus type 108
taatgaaagggtggaaaagg

SEQ ID NO: 47311 - DNA, 20 bp, Human papillomavirus type 108
tgcgttgcactcacagactg

SEQ ID NO: 47312 - DNA, 20 bp, Human papillomavirus type 108
gcgttgcactcacagactgc

SEQ ID NO: 47313 - DNA, 20 bp, Human papillomavirus type 108
cgttgcactcacagactgct

SEQ ID NO: 47314 - DNA, 20 bp, Human papillomavirus type 108
cagtagcattatttttctat

SEQ ID NO: 47315 - DNA, 20 bp, Human papillomavirus type 108
tttttctatagacatagctt

SEQ ID NO: 47316 - DNA, 20 bp, Human papillomavirus type 108
ttctatagacatagcttatc

SEQ ID NO: 47317 - DNA, 20 bp, Human papillomavirus type 108
tctatagacatagcttatca

SEQ ID NO: 47318 - DNA, 20 bp, Human papillomavirus type 108
ctatagacatagcttatcaa

SEQ ID NO: 47319 - DNA, 20 bp, Human papillomavirus type 108
cccatcaacagtttccccac

SEQ ID NO: 47320 - DNA, 20 bp, Human papillomavirus type 108
ccccacacttttttatccat

SEQ ID NO: 47321 - DNA, 20 bp, Human papillomavirus type 108
cccacacttttttatccatt

SEQ ID NO: 47322 - DNA, 20 bp, Human papillomavirus type 108
tttatccattgtcctataga

SEQ ID NO: 47323 - DNA, 20 bp, Human papillomavirus type 108
ttatccattgtcctatagac

SEQ ID NO: 47324 - DNA, 20 bp, Human papillomavirus type 108
aaaaaaggtggtgcacaagt

SEQ ID NO: 47325 - DNA, 20 bp, Human papillomavirus type 108
aaaaaggtggtgcacaagtg

SEQ ID NO: 47326 - DNA, 20 bp, Human papillomavirus type 108
ccactttgtatatggcatgg

SEQ ID NO: 47327 - DNA, 20 bp, Human papillomavirus type 108
cactttgtatatggcatggc

SEQ ID NO: 47328 - DNA, 20 bp, Human papillomavirus type 108
gtatatggcatggctttatt

SEQ ID NO: 47329 - DNA, 20 bp, Human papillomavirus type 108
tgacacttctgcatcagtgg

SEQ ID NO: 47330 - DNA, 20 bp, Human papillomavirus type 108
tgcatcagtgggatcaagac

SEQ ID NO: 47331 - DNA, 20 bp, Human papillomavirus type 108
caaggttacaagctgaggct

SEQ ID NO: 47332 - DNA, 20 bp, Human papillomavirus type 108
caagctgaggctagggatcc

SEQ ID NO: 47333 - DNA, 20 bp, Human papillomavirus type 108
ctattaatatggggggatcc

SEQ ID NO: 47334 - DNA, 20 bp, Human papillomavirus type 108
gctgataaaattttaaaatg

SEQ ID NO: 47335 - DNA, 20 bp, Human papillomavirus type 108
taaaatggattgccagtgtg

SEQ ID NO: 47336 - DNA, 20 bp, Human papillomavirus type 108
aaaatggattgccagtgtgg

SEQ ID NO: 47337 - DNA, 20 bp, Human papillomavirus type 108
aaatggattgccagtgtggt

SEQ ID NO: 47338 - DNA, 20 bp, Human papillomavirus type 108
ccagtgtggtgtactttggg

SEQ ID NO: 47339 - DNA, 20 bp, Human papillomavirus type 108
atcccattggcccccctgac

SEQ ID NO: 47340 - DNA, 20 bp, Human papillomavirus type 108
gcccccctgacattgttcct

SEQ ID NO: 47341 - DNA, 20 bp, Human papillomavirus type 108
ttcctgtagatgtggtaacc

SEQ ID NO: 47342 - DNA, 20 bp, Human papillomavirus type 108
ctgtagatgtggtaaccccc

SEQ ID NO: 47343 - DNA, 20 bp, Human papillomavirus type 108
cattgttcccctggaggtac

SEQ ID NO: 47344 - DNA, 20 bp, Human papillomavirus type 108
aatagtagtagacatgccac

SEQ ID NO: 47345 - DNA, 20 bp, Human papillomavirus type 108
ctgtgtatggtcatcctaca

SEQ ID NO: 47346 - DNA, 20 bp, Human papillomavirus type 108
tgtgtatggtcatcctacag

SEQ ID NO: 47347 - DNA, 20 bp, Human papillomavirus type 108
ttattggtgcagctgccacc

SEQ ID NO: 47348 - DNA, 20 bp, Human papillomavirus type 108
ttggtgcagctgccaccgat

SEQ ID NO: 47349 - DNA, 20 bp, Human papillomavirus type 108
gaactagaaatgtaaacttc

SEQ ID NO: 47350 - DNA, 20 bp, Human papillomavirus type 108
ttaaaccgcccacgtcaggc

SEQ ID NO: 47351 - DNA, 20 bp, Human papillomavirus type 108
aaccgcccacgtcaggcggt

SEQ ID NO: 47352 - DNA, 20 bp, Human papillomavirus type 108
caatttgaaaatcccgcctt

SEQ ID NO: 47353 - DNA, 20 bp, Human papillomavirus type 108
aatttgaaaatcccgccttt

SEQ ID NO: 47354 - DNA, 20 bp, Human papillomavirus type 108
acctcgtcccgcctacgctt

SEQ ID NO: 47355 - DNA, 20 bp, Human papillomavirus type 108
cctcgtcccgcctacgcttt

SEQ ID NO: 47356 - DNA, 20 bp, Human papillomavirus type 108
gcaggccttcagggtgtttc

SEQ ID NO: 47357 - DNA, 20 bp, Human papillomavirus type 108
caggccttcagggtgtttct

SEQ ID NO: 47358 - DNA, 20 bp, Human papillomavirus type 108
agggtgtttctatatctcct

SEQ ID NO: 47359 - DNA, 20 bp, Human papillomavirus type 108
tttaattgtttttcagatgt

SEQ ID NO: 47360 - DNA, 20 bp, Human papillomavirus type 108
aattgtttttcagatgtcac

SEQ ID NO: 47361 - DNA, 20 bp, Human papillomavirus type 108
attgtttttcagatgtcact

SEQ ID NO: 47362 - DNA, 20 bp, Human papillomavirus type 108
tttttcagatgtcactgtgg

SEQ ID NO: 47363 - DNA, 20 bp, Human papillomavirus type 108
ttcagatgtcactgtggtta

SEQ ID NO: 47364 - DNA, 20 bp, Human papillomavirus type 108
agggttttgcttccagatcc

SEQ ID NO: 47365 - DNA, 20 bp, Human papillomavirus type 108
gggttttgcttccagatcct

SEQ ID NO: 47366 - DNA, 20 bp, Human papillomavirus type 108
tgcttccagatcctaacaag

SEQ ID NO: 47367 - DNA, 20 bp, Human papillomavirus type 108
gcttccagatcctaacaagc

SEQ ID NO: 47368 - DNA, 20 bp, Human papillomavirus type 108
cttccagatcctaacaagct

SEQ ID NO: 47369 - DNA, 20 bp, Human papillomavirus type 108
atgcccgtcacttttttaca

SEQ ID NO: 47370 - DNA, 20 bp, Human papillomavirus type 108
tgcccgtcacttttttacac

SEQ ID NO: 47371 - DNA, 20 bp, Human papillomavirus type 108
tttacacgggatggcactat

SEQ ID NO: 47372 - DNA, 20 bp, Human papillomavirus type 108
ttacacgggatggcactatt

SEQ ID NO: 47373 - DNA, 20 bp, Human papillomavirus type 108
tacacgggatggcactattg

SEQ ID NO: 47374 - DNA, 20 bp, Human papillomavirus type 108
ttgatgattggcagttaggc

SEQ ID NO: 47375 - DNA, 20 bp, Human papillomavirus type 108
atgattggcagttaggcttt

SEQ ID NO: 47376 - DNA, 20 bp, Human papillomavirus type 108
gcagttaggctttgtacccc

SEQ ID NO: 47377 - DNA, 20 bp, Human papillomavirus type 108
ggctttgtaccccctcctgc

SEQ ID NO: 47378 - DNA, 20 bp, Human papillomavirus type 108
gtaccccctcctgcaccatc

SEQ ID NO: 47379 - DNA, 20 bp, Human gammaherpesvirus 4
ctgcgactcctgggcgccac

SEQ ID NO: 47380 - DNA, 20 bp, Human gammaherpesvirus 4
gcgtggagatgggcaggcag

SEQ ID NO: 47381 - DNA, 20 bp, Human gammaherpesvirus 4
ggcttcgaggtgcatagaag

SEQ ID NO: 47382 - DNA, 20 bp, Human gammaherpesvirus 4
gcttcgaggtgcatagaagc

SEQ ID NO: 47383 - DNA, 20 bp, Human gammaherpesvirus 4
gaggtgcatagaagccggcc

SEQ ID NO: 47384 - DNA, 20 bp, Human gammaherpesvirus 4
cgagttgccctggctctcgc

SEQ ID NO: 47385 - DNA, 20 bp, Human gammaherpesvirus 4
ccctggctctcgctggagtc

SEQ ID NO: 47386 - DNA, 20 bp, Human gammaherpesvirus 4
cttcccacggtggggtgtga

SEQ ID NO: 47387 - DNA, 20 bp, Human gammaherpesvirus 4
ccacggtggggtgtgacagg

SEQ ID NO: 47388 - DNA, 20 bp, Human gammaherpesvirus 4
tgaggcatgactccagcgag

SEQ ID NO: 47389 - DNA, 20 bp, Human gammaherpesvirus 4
gatccggaagacgtcttgct

SEQ ID NO: 47390 - DNA, 20 bp, Human gammaherpesvirus 4
cggatccaagattggggcac

SEQ ID NO: 47391 - DNA, 20 bp, Human gammaherpesvirus 4
gggcacatgctgcgttcagc

SEQ ID NO: 47392 - DNA, 20 bp, Human gammaherpesvirus 4
agcagcgcctcagccattgc

SEQ ID NO: 47393 - DNA, 20 bp, Human gammaherpesvirus 4
gcagagcaccccggcctggt

SEQ ID NO: 47394 - DNA, 20 bp, Human gammaherpesvirus 4
cagagcaccccggcctggtg

SEQ ID NO: 47395 - DNA, 20 bp, Human gammaherpesvirus 4
gaggtgcagcacggcccaga

SEQ ID NO: 47396 - DNA, 20 bp, Human gammaherpesvirus 4
aggtgcagcacggcccagag

SEQ ID NO: 47397 - DNA, 20 bp, Human gammaherpesvirus 4
cgccagtcgctgcgcctgct

SEQ ID NO: 47398 - DNA, 20 bp, Human gammaherpesvirus 4
ccagcagcaggcgcagcgac

SEQ ID NO: 47399 - DNA, 20 bp, Human gammaherpesvirus 4
gatctggaccttgctcgccc

SEQ ID NO: 47400 - DNA, 20 bp, Human gammaherpesvirus 4
ttgggtgcaaggctcgtgcc

SEQ ID NO: 47401 - DNA, 20 bp, Human gammaherpesvirus 4
ggtgcaaggctcgtgcctgg

SEQ ID NO: 47402 - DNA, 20 bp, Human gammaherpesvirus 4
gtaaattgcaggcccaggca

SEQ ID NO: 47403 - DNA, 20 bp, Human gammaherpesvirus 4
caggcccaggcacgagcctt

SEQ ID NO: 47404 - DNA, 20 bp, Human gammaherpesvirus 4
cacccaacaaggcaggacgc

SEQ ID NO: 47405 - DNA, 20 bp, Human gammaherpesvirus 4
tgtgacagggtttcctggac

SEQ ID NO: 47406 - DNA, 20 bp, Human gammaherpesvirus 4
cctggacacccagtcttagt

SEQ ID NO: 47407 - DNA, 20 bp, Human gammaherpesvirus 4
ctggacacccagtcttagtt

SEQ ID NO: 47408 - DNA, 20 bp, Human gammaherpesvirus 4
gttcaggtagacacccagtt

SEQ ID NO: 47409 - DNA, 20 bp, Human gammaherpesvirus 4
aggtagacacccagttatgc

SEQ ID NO: 47410 - DNA, 20 bp, Human gammaherpesvirus 4
ggcctggctccccatagact

SEQ ID NO: 47411 - DNA, 20 bp, Human gammaherpesvirus 4
tgcccccctggcggcccagc

SEQ ID NO: 47412 - DNA, 20 bp, Human gammaherpesvirus 4
gcccccctggcggcccagcc

SEQ ID NO: 47413 - DNA, 20 bp, Human gammaherpesvirus 4
cccccctggcggcccagccc

SEQ ID NO: 47414 - DNA, 20 bp, Human gammaherpesvirus 4
catgggagtctatggggagc

SEQ ID NO: 47415 - DNA, 20 bp, Human gammaherpesvirus 4
gcagaaaaaattaaagtcca

SEQ ID NO: 47416 - DNA, 20 bp, Human gammaherpesvirus 4
aagtccacttacctctggcc

SEQ ID NO: 47417 - DNA, 20 bp, Human gammaherpesvirus 4
cctctggcccgataccgggg

SEQ ID NO: 47418 - DNA, 20 bp, Human gammaherpesvirus 4
gtccagggccttcacttcgg

SEQ ID NO: 47419 - DNA, 20 bp, Human gammaherpesvirus 4
acttcggtctcccctaggct

SEQ ID NO: 47420 - DNA, 20 bp, Human gammaherpesvirus 4
ccacctcctcttcttgctgg

SEQ ID NO: 47421 - DNA, 20 bp, Human gammaherpesvirus 4
ttgctggacgaggacccttc

SEQ ID NO: 47422 - DNA, 20 bp, Human gammaherpesvirus 4
ctggacgaggacccttctac

SEQ ID NO: 47423 - DNA, 20 bp, Human gammaherpesvirus 4
tacggactcgtctgggttct

SEQ ID NO: 47424 - DNA, 20 bp, Human gammaherpesvirus 4
ttggccccctctggtaggac

SEQ ID NO: 47425 - DNA, 20 bp, Human gammaherpesvirus 4
gggccctcaagtccagcccc

SEQ ID NO: 47426 - DNA, 20 bp, Human gammaherpesvirus 4
ggccctcaagtccagcccca

SEQ ID NO: 47427 - DNA, 20 bp, Human gammaherpesvirus 4
agggcccaaagaggcccctc

SEQ ID NO: 47428 - DNA, 20 bp, Human gammaherpesvirus 4
tacggactcgtctgggttct

SEQ ID NO: 47429 - DNA, 20 bp, Human gammaherpesvirus 4
ttggccccctctggtaggac

SEQ ID NO: 47430 - DNA, 20 bp, Human gammaherpesvirus 4
gccccctctggtaggactgg

SEQ ID NO: 47431 - DNA, 20 bp, Human gammaherpesvirus 4
ttaggagctgtccgagggga

SEQ ID NO: 47432 - DNA, 20 bp, Human gammaherpesvirus 4
ggagctgtccgaggggaccc

SEQ ID NO: 47433 - DNA, 20 bp, Human gammaherpesvirus 4
gcgttgctaggccaccttct

SEQ ID NO: 47434 - DNA, 20 bp, Human gammaherpesvirus 4
ctaggccaccttctcagtcc

SEQ ID NO: 47435 - DNA, 20 bp, Human gammaherpesvirus 4
tcagtccagcgcgtttacgt

SEQ ID NO: 47436 - DNA, 20 bp, Human gammaherpesvirus 4
acgtaagccagacagcagcc

SEQ ID NO: 47437 - DNA, 20 bp, Human gammaherpesvirus 4
cgtaagccagacagcagcca

SEQ ID NO: 47438 - DNA, 20 bp, Human gammaherpesvirus 4
ttggccccctctggtaggac

SEQ ID NO: 47439 - DNA, 20 bp, Human gammaherpesvirus 4
gccccctctggtaggactgg

SEQ ID NO: 47440 - DNA, 20 bp, Human gammaherpesvirus 4
ttaggagctgtccgagggga

SEQ ID NO: 47441 - DNA, 20 bp, Human gammaherpesvirus 4
ggagctgtccgaggggaccc

SEQ ID NO: 47442 - DNA, 20 bp, Human gammaherpesvirus 4
gccagcaacttatagcatgg

SEQ ID NO: 47443 - DNA, 20 bp, Human gammaherpesvirus 4
ccagcaacttatagcatggt

SEQ ID NO: 47444 - DNA, 20 bp, Human gammaherpesvirus 4
tagcatggtaggcagctcaa

SEQ ID NO: 47445 - DNA, 20 bp, Human gammaherpesvirus 4
ctgcccagcctactctccac

SEQ ID NO: 47446 - DNA, 20 bp, Human gammaherpesvirus 4
agctgcctaccatgctataa

SEQ ID NO: 47447 - DNA, 20 bp, Human gammaherpesvirus 4
ggacttggataacttttcag

SEQ ID NO: 47448 - DNA, 20 bp, Human gammaherpesvirus 4
gataacttttcagaagctga

SEQ ID NO: 47449 - DNA, 20 bp, Human gammaherpesvirus 4
tcagaagctgagaccgaaga

SEQ ID NO: 47450 - DNA, 20 bp, Human gammaherpesvirus 4
cagaagctgagaccgaagac

SEQ ID NO: 47451 - DNA, 20 bp, Human gammaherpesvirus 4
agaagctgagaccgaagacg

SEQ ID NO: 47452 - DNA, 20 bp, Human gammaherpesvirus 4
tccgctgggccaggtcacag

SEQ ID NO: 47453 - DNA, 20 bp, Human gammaherpesvirus 4
gcccgtccctcttgtccctt

SEQ ID NO: 47454 - DNA, 20 bp, Human gammaherpesvirus 4
tccctttcagtggtcaccgg

SEQ ID NO: 47455 - DNA, 20 bp, Human gammaherpesvirus 4
gccatcaagaattatgtccc

SEQ ID NO: 47456 - DNA, 20 bp, Human gammaherpesvirus 4
ccatcaagaattatgtcccg

SEQ ID NO: 47457 - DNA, 20 bp, Human gammaherpesvirus 4
tgtcccgggcctggactcac

SEQ ID NO: 47458 - DNA, 20 bp, Human gammaherpesvirus 4
tcccgctgggcccagtctca

SEQ ID NO: 47459 - DNA, 20 bp, Human gammaherpesvirus 4
gtgagtccaggcccgggaca

SEQ ID NO: 47460 - DNA, 20 bp, Human gammaherpesvirus 4
gggagcttcccggagaccgg

SEQ ID NO: 47461 - DNA, 20 bp, Human gammaherpesvirus 4
ccggagaccggtctgggctc

SEQ ID NO: 47462 - DNA, 20 bp, Human gammaherpesvirus 4
cggccccgaaatagggcctt

SEQ ID NO: 47463 - DNA, 20 bp, Human gammaherpesvirus 4
ggccccgaaatagggccttg

SEQ ID NO: 47464 - DNA, 20 bp, Human gammaherpesvirus 4
atggcaaggccctatttcgg

SEQ ID NO: 47465 - DNA, 20 bp, Human gammaherpesvirus 4
gggggaaaccggagaacagc

SEQ ID NO: 47466 - DNA, 20 bp, Human gammaherpesvirus 4
cgtggattcgggggaagctg

SEQ ID NO: 47467 - DNA, 20 bp, Human gammaherpesvirus 4
gggggaagctggtatccaac

SEQ ID NO: 47468 - DNA, 20 bp, Human gammaherpesvirus 4
gataccagcttcccccgaat

SEQ ID NO: 47469 - DNA, 20 bp, Human gammaherpesvirus 4
ccccgaatccacgcaacgtc

SEQ ID NO: 47470 - DNA, 20 bp, Human gammaherpesvirus 4
agctggcgcgggtcggtgtg

SEQ ID NO: 47471 - DNA, 20 bp, Human gammaherpesvirus 4
gggcctcggctggctcccag

SEQ ID NO: 47472 - DNA, 20 bp, Human gammaherpesvirus 4
tccagtctgcgacggtctcc

SEQ ID NO: 47473 - DNA, 20 bp, Human gammaherpesvirus 4
ccagtctgcgacggtctcct

SEQ ID NO: 47474 - DNA, 20 bp, Human gammaherpesvirus 4
cagtctgcgacggtctcctt

SEQ ID NO: 47475 - DNA, 20 bp, Human gammaherpesvirus 4
ccccccgcgacccgcttggg

SEQ ID NO: 47476 - DNA, 20 bp, Human gammaherpesvirus 4
gggtccaacgtggccagagc

SEQ ID NO: 47477 - DNA, 20 bp, Human gammaherpesvirus 4
cgcggcctccattctctccg

SEQ ID NO: 47478 - DNA, 20 bp, Human gammaherpesvirus 4
tctccgccgcaccaccatcg

SEQ ID NO: 47479 - DNA, 20 bp, Human gammaherpesvirus 4
tccctgatgtccgccgtaca

SEQ ID NO: 47480 - DNA, 20 bp, Human gammaherpesvirus 4
ttggaccggacggccacgtt

SEQ ID NO: 47481 - DNA, 20 bp, Human gammaherpesvirus 4
gaccggacggccacgttgtg

SEQ ID NO: 47482 - DNA, 20 bp, Human gammaherpesvirus 4
tggacaaaggggggcactga

SEQ ID NO: 47483 - DNA, 20 bp, Human gammaherpesvirus 4
gtccacaacgtggccgtccg

SEQ ID NO: 47484 - DNA, 20 bp, Human gammaherpesvirus 4
gggcggcctccgccagggat

SEQ ID NO: 47485 - DNA, 20 bp, Human gammaherpesvirus 4
cagctttcgtcgtccaggac

SEQ ID NO: 47486 - DNA, 20 bp, Human gammaherpesvirus 4
cgtcgtccaggaccaagggg

SEQ ID NO: 47487 - DNA, 20 bp, Human gammaherpesvirus 4
gtcgtccaggaccaagggga

SEQ ID NO: 47488 - DNA, 20 bp, Human gammaherpesvirus 4
catctacaggggcccgcacg

SEQ ID NO: 47489 - DNA, 20 bp, Human gammaherpesvirus 4
gggcagcagccctcctttgg

SEQ ID NO: 47490 - DNA, 20 bp, Human gammaherpesvirus 4
ggggatgatgcatctggggg

SEQ ID NO: 47491 - DNA, 20 bp, Human gammaherpesvirus 4
gggatgatgcatctgggggt

SEQ ID NO: 47492 - DNA, 20 bp, Human gammaherpesvirus 4
tttggcggggaggatgcgga

SEQ ID NO: 47493 - DNA, 20 bp, Human gammaherpesvirus 4
ttggcggggaggatgcggaa

SEQ ID NO: 47494 - DNA, 20 bp, Human gammaherpesvirus 4
tggcggggaggatgcggaat

SEQ ID NO: 47495 - DNA, 20 bp, Human gammaherpesvirus 4
ggcggggaggatgcggaatg

SEQ ID NO: 47496 - DNA, 20 bp, Human gammaherpesvirus 4
gcggggaggatgcggaatgg

SEQ ID NO: 47497 - DNA, 20 bp, Human gammaherpesvirus 4
agcgtctggaggtccgtgga

SEQ ID NO: 47498 - DNA, 20 bp, Human gammaherpesvirus 4
gcgtctggaggtccgtggag

SEQ ID NO: 47499 - DNA, 20 bp, Human gammaherpesvirus 4
tccttcaccgctaccaccgc

SEQ ID NO: 47500 - DNA, 20 bp, Human gammaherpesvirus 4
ccttcaccgctaccaccgcc

SEQ ID NO: 47501 - DNA, 20 bp, Human gammaherpesvirus 4
cttcaccgctaccaccgcct

SEQ ID NO: 47502 - DNA, 20 bp, Human gammaherpesvirus 4
accctgagatacagcacgac

SEQ ID NO: 47503 - DNA, 20 bp, Human gammaherpesvirus 4
ggcctggccacccgccgctt

SEQ ID NO: 47504 - DNA, 20 bp, Human gammaherpesvirus 4
ctggtctcgggtgagaccct

SEQ ID NO: 47505 - DNA, 20 bp, Human gammaherpesvirus 4
tggtctcgggtgagaccctc

SEQ ID NO: 47506 - DNA, 20 bp, Human gammaherpesvirus 4
ggaactcgatgaaggcggcc

SEQ ID NO: 47507 - DNA, 20 bp, Human gammaherpesvirus 4
gaactcgatgaaggcggccg

SEQ ID NO: 47508 - DNA, 20 bp, Human gammaherpesvirus 4
ttcccggccgccttcatcga

SEQ ID NO: 47509 - DNA, 20 bp, Human gammaherpesvirus 4
ccggccgccttcatcgagtt

SEQ ID NO: 47510 - DNA, 20 bp, Human gammaherpesvirus 4
atcgagttccaaatctggcc

SEQ ID NO: 47511 - DNA, 20 bp, Human gammaherpesvirus 4
acggggctctttgtccccga

SEQ ID NO: 47512 - DNA, 20 bp, Human gammaherpesvirus 4
cggggctctttgtccccgag

SEQ ID NO: 47513 - DNA, 20 bp, Human gammaherpesvirus 4
gtccccgagctcttcttcaa

SEQ ID NO: 47514 - DNA, 20 bp, Human gammaherpesvirus 4
tccccgagctcttcttcaag

SEQ ID NO: 47515 - DNA, 20 bp, Human gammaherpesvirus 4
ttcaagctttttagggacac

SEQ ID NO: 47516 - DNA, 20 bp, Human gammaherpesvirus 4
tctatcgtcaactgcgccgt

SEQ ID NO: 47517 - DNA, 20 bp, Human gammaherpesvirus 4
atccttttgaaggaggcctg

SEQ ID NO: 47518 - DNA, 20 bp, Human gammaherpesvirus 4
tgaaggaggcctgcaacgcc

SEQ ID NO: 47519 - DNA, 20 bp, Human gammaherpesvirus 4
gaaggaggcctgcaacgccc

SEQ ID NO: 47520 - DNA, 20 bp, Human gammaherpesvirus 4
aaggaggcctgcaacgccca

SEQ ID NO: 47521 - DNA, 20 bp, Human gammaherpesvirus 4
accaggcagcgcgggaggca

SEQ ID NO: 47522 - DNA, 20 bp, Human gammaherpesvirus 4
gccagattgcaggtggccac

SEQ ID NO: 47523 - DNA, 20 bp, Human gammaherpesvirus 4
caggtggccacagacttcct

SEQ ID NO: 47524 - DNA, 20 bp, Human gammaherpesvirus 4
aggcccacgttgtctgctcg

SEQ ID NO: 47525 - DNA, 20 bp, Human gammaherpesvirus 4
tctgctcggtagcagcggac

SEQ ID NO: 47526 - DNA, 20 bp, Human gammaherpesvirus 4
ggagagtccggcaaggccag

SEQ ID NO: 47527 - DNA, 20 bp, Human gammaherpesvirus 4
ccagccactccagcaacacc

SEQ ID NO: 47528 - DNA, 20 bp, Human gammaherpesvirus 4
ctggagtggctgggaatggc

SEQ ID NO: 47529 - DNA, 20 bp, Human gammaherpesvirus 4
ccggactctcccaagtaggg

SEQ ID NO: 47530 - DNA, 20 bp, Human gammaherpesvirus 4
gtcttctggcacagctgttg

SEQ ID NO: 47531 - DNA, 20 bp, Human gammaherpesvirus 4
tcttctggcacagctgttgc

SEQ ID NO: 47532 - DNA, 20 bp, Human gammaherpesvirus 4
tggcacagctgttgccaggg

SEQ ID NO: 47533 - DNA, 20 bp, Human gammaherpesvirus 4
ccagggtgctcatgagcgag

SEQ ID NO: 47534 - DNA, 20 bp, Human gammaherpesvirus 4
tcagctgctggacacgcaca

SEQ ID NO: 47535 - DNA, 20 bp, Human gammaherpesvirus 4
cagctgctggacacgcacat

SEQ ID NO: 47536 - DNA, 20 bp, Human gammaherpesvirus 4
agctgctggacacgcacatg

SEQ ID NO: 47537 - DNA, 20 bp, Human gammaherpesvirus 4
cctggctgagcatgtgcgtg

SEQ ID NO: 47538 - DNA, 20 bp, Human gammaherpesvirus 4
cacgagagaacccgccacgt

SEQ ID NO: 47539 - DNA, 20 bp, Human gammaherpesvirus 4
tggcacaaacaaaacaggcg

SEQ ID NO: 47540 - DNA, 20 bp, Human gammaherpesvirus 4
cgcctgttttgtttgtgcca

SEQ ID NO: 47541 - DNA, 20 bp, Human gammaherpesvirus 4
tgtttgtgccacaacgcctc

SEQ ID NO: 47542 - DNA, 20 bp, Human gammaherpesvirus 4
gtttgtgccacaacgcctcg

SEQ ID NO: 47543 - DNA, 20 bp, Human gammaherpesvirus 4
atgggacccttgtcctcctc

SEQ ID NO: 47544 - DNA, 20 bp, Human gammaherpesvirus 4
tcctcctccatctggggggt

SEQ ID NO: 47545 - DNA, 20 bp, Human gammaherpesvirus 4
tgagctccgatggacgcagc

SEQ ID NO: 47546 - DNA, 20 bp, Human gammaherpesvirus 4
gagctccgatggacgcagcg

SEQ ID NO: 47547 - DNA, 20 bp, Human gammaherpesvirus 4
agctccgatggacgcagcgt

SEQ ID NO: 47548 - DNA, 20 bp, Human gammaherpesvirus 4
tggtcttcatcgggcgcagc

SEQ ID NO: 47549 - DNA, 20 bp, Human gammaherpesvirus 4
cagtcccacaaacgcggcgg

SEQ ID NO: 47550 - DNA, 20 bp, Human gammaherpesvirus 4
cctgactgaagcccaggacc

SEQ ID NO: 47551 - DNA, 20 bp, Human gammaherpesvirus 4
tactcctacacatgtaatgc

SEQ ID NO: 47552 - DNA, 20 bp, Human gammaherpesvirus 4
catgtgtaggagtagaactg

SEQ ID NO: 47553 - DNA, 20 bp, Human gammaherpesvirus 4
agtcagggaagccgccgccg

SEQ ID NO: 47554 - DNA, 20 bp, Human gammaherpesvirus 4
aacaagtttgtgaacacgct

SEQ ID NO: 47555 - DNA, 20 bp, Human gammaherpesvirus 4
acaagtttgtgaacacgctg

SEQ ID NO: 47556 - DNA, 20 bp, Human gammaherpesvirus 4
gtgaacacgctgctgacgga

SEQ ID NO: 47557 - DNA, 20 bp, Human gammaherpesvirus 4
tgaacacgctgctgacggat

SEQ ID NO: 47558 - DNA, 20 bp, Human gammaherpesvirus 4
gatggggatatttaaaaggg

SEQ ID NO: 47559 - DNA, 20 bp, Human gammaherpesvirus 4
catgaacaacacggcatggc

SEQ ID NO: 47560 - DNA, 20 bp, Human gammaherpesvirus 4
ccccctgtatctccagggga

SEQ ID NO: 47561 - DNA, 20 bp, Human gammaherpesvirus 4
atcccctggagatacagggg

SEQ ID NO: 47562 - DNA, 20 bp, Human gammaherpesvirus 4
ttcatgtaatgggtatgcca

SEQ ID NO: 47563 - DNA, 20 bp, Human gammaherpesvirus 4
gaggcccgcaccttggacgc

SEQ ID NO: 47564 - DNA, 20 bp, Human gammaherpesvirus 4
gacgccaaatccaccccgtt

SEQ ID NO: 47565 - DNA, 20 bp, Human gammaherpesvirus 4
tcccagtcagatgtccgtgc

SEQ ID NO: 47566 - DNA, 20 bp, Human gammaherpesvirus 4
ggcgtccaaggtgcgggcct

SEQ ID NO: 47567 - DNA, 20 bp, Human gammaherpesvirus 4
gcgtccaaggtgcgggcctc

SEQ ID NO: 47568 - DNA, 20 bp, Human gammaherpesvirus 4
tgagtcagggggggacaatg

SEQ ID NO: 47569 - DNA, 20 bp, Human gammaherpesvirus 4
gagtcagggggggacaatgt

SEQ ID NO: 47570 - DNA, 20 bp, Human gammaherpesvirus 4
agtcagggggggacaatgtc

SEQ ID NO: 47571 - DNA, 20 bp, Human gammaherpesvirus 4
tgactgctacgctaggatgt

SEQ ID NO: 47572 - DNA, 20 bp, Human gammaherpesvirus 4
tccccccctgactcaaaact

SEQ ID NO: 47573 - DNA, 20 bp, Human gammaherpesvirus 4
agccaagtcagactccagat

SEQ ID NO: 47574 - DNA, 20 bp, Human gammaherpesvirus 4
ccggtggccgggactgtttc

SEQ ID NO: 47575 - DNA, 20 bp, Human gammaherpesvirus 4
cggtggccgggactgtttcg

SEQ ID NO: 47576 - DNA, 20 bp, Human gammaherpesvirus 4
cgttgggtcatctggagtct

SEQ ID NO: 47577 - DNA, 20 bp, Human gammaherpesvirus 4
gttgggtcatctggagtctg

SEQ ID NO: 47578 - DNA, 20 bp, Human gammaherpesvirus 4
gggcaccgggcttcaggggc

SEQ ID NO: 47579 - DNA, 20 bp, Human gammaherpesvirus 4
ggcaccgggcttcaggggca

SEQ ID NO: 47580 - DNA, 20 bp, Human gammaherpesvirus 4
aggggcatggtcgggctcgg

SEQ ID NO: 47581 - DNA, 20 bp, Human gammaherpesvirus 4
cgagttcatctgtaaaagca

SEQ ID NO: 47582 - DNA, 20 bp, Human gammaherpesvirus 4
gagttcatctgtaaaagcat

SEQ ID NO: 47583 - DNA, 20 bp, Human gammaherpesvirus 4
ttttggttcctgaacatctg

SEQ ID NO: 47584 - DNA, 20 bp, Human gammaherpesvirus 4
tggttcctgaacatctggct

SEQ ID NO: 47585 - DNA, 20 bp, Human gammaherpesvirus 4
ggttcctgaacatctggctg

SEQ ID NO: 47586 - DNA, 20 bp, Human gammaherpesvirus 4
gttcctgaacatctggctgg

SEQ ID NO: 47587 - DNA, 20 bp, Human gammaherpesvirus 4
ctgaacatctggctggggca

SEQ ID NO: 47588 - DNA, 20 bp, Human gammaherpesvirus 4
ggccagcccggggggacctc

SEQ ID NO: 47589 - DNA, 20 bp, Human gammaherpesvirus 4
ccccagtttgccccatcgtt

SEQ ID NO: 47590 - DNA, 20 bp, Human gammaherpesvirus 4
gccccatcgtttccctgacg

SEQ ID NO: 47591 - DNA, 20 bp, Human gammaherpesvirus 4
ccccatcgtttccctgacgg

SEQ ID NO: 47592 - DNA, 20 bp, Human gammaherpesvirus 4
ccctgacggcctcaggggcc

SEQ ID NO: 47593 - DNA, 20 bp, Human gammaherpesvirus 4
agattcagacgagtctgact

SEQ ID NO: 47594 - DNA, 20 bp, Human gammaherpesvirus 4
agacgagtctgactacagcg

SEQ ID NO: 47595 - DNA, 20 bp, Human gammaherpesvirus 4
aagatcgtgaggcctgagag

SEQ ID NO: 47596 - DNA, 20 bp, Human gammaherpesvirus 4
cttcatcctcgtcgctctcg

SEQ ID NO: 47597 - DNA, 20 bp, Human gammaherpesvirus 4
atcctcgtcgctctcgctgt

SEQ ID NO: 47598 - DNA, 20 bp, Human gammaherpesvirus 4
cccgttttcacagagagaat

SEQ ID NO: 47599 - DNA, 20 bp, Human gammaherpesvirus 4
tcacagagagaatgtcctcc

SEQ ID NO: 47600 - DNA, 20 bp, Human gammaherpesvirus 4
cacagagagaatgtcctccg

SEQ ID NO: 47601 - DNA, 20 bp, Human gammaherpesvirus 4
acagagagaatgtcctccgt

SEQ ID NO: 47602 - DNA, 20 bp, Human gammaherpesvirus 4
tctctgtgaaaacggggaat

SEQ ID NO: 47603 - DNA, 20 bp, Human gammaherpesvirus 4
gtggtccatagctgcccctg

SEQ ID NO: 47604 - DNA, 20 bp, Human gammaherpesvirus 4
gaggtcctgagagacatgca

SEQ ID NO: 47605 - DNA, 20 bp, Human gammaherpesvirus 4
aggtcctgagagacatgcac

SEQ ID NO: 47606 - DNA, 20 bp, Human gammaherpesvirus 4
atgtggcggctcttgaaccc

SEQ ID NO: 47607 - DNA, 20 bp, Human gammaherpesvirus 4
tgtggcggctcttgaaccca

SEQ ID NO: 47608 - DNA, 20 bp, Human gammaherpesvirus 4
aacccaaaggcgctatagac

SEQ ID NO: 47609 - DNA, 20 bp, Human gammaherpesvirus 4
gggttcaagagccgccacat

SEQ ID NO: 47610 - DNA, 20 bp, Human gammaherpesvirus 4
ggttcaagagccgccacata

SEQ ID NO: 47611 - DNA, 20 bp, Human gammaherpesvirus 4
cccccggccatctttgccgg

SEQ ID NO: 47612 - DNA, 20 bp, Human gammaherpesvirus 4
gccggaacggtgaccttcga

SEQ ID NO: 47613 - DNA, 20 bp, Human gammaherpesvirus 4
ccggaacggtgaccttcgac

SEQ ID NO: 47614 - DNA, 20 bp, Human gammaherpesvirus 4
cggcaaagatggccgggggg

SEQ ID NO: 47615 - DNA, 20 bp, Human gammaherpesvirus 4
ctttttgcatggtcaggctc

SEQ ID NO: 47616 - DNA, 20 bp, Human gammaherpesvirus 4
ttgcatggtcaggctccgtg

SEQ ID NO: 47617 - DNA, 20 bp, Human gammaherpesvirus 4
tgcatggtcaggctccgtgt

SEQ ID NO: 47618 - DNA, 20 bp, Human gammaherpesvirus 4
gcatggtcaggctccgtgtc

SEQ ID NO: 47619 - DNA, 20 bp, Human gammaherpesvirus 4
catggtcaggctccgtgtcc

SEQ ID NO: 47620 - DNA, 20 bp, Human gammaherpesvirus 4
acatccgagacctccgggcc

SEQ ID NO: 47621 - DNA, 20 bp, Human gammaherpesvirus 4
tgcggctacgtcctcgtgag

SEQ ID NO: 47622 - DNA, 20 bp, Human gammaherpesvirus 4
gcggctacgtcctcgtgagt

SEQ ID NO: 47623 - DNA, 20 bp, Human gammaherpesvirus 4
cggctacgtcctcgtgagtc

SEQ ID NO: 47624 - DNA, 20 bp, Human gammaherpesvirus 4
acgtgggcccggaggtctcg

SEQ ID NO: 47625 - DNA, 20 bp, Human gammaherpesvirus 4
gcgtagcaggaggcatagat

SEQ ID NO: 47626 - DNA, 20 bp, Human gammaherpesvirus 4
acaagccaggactcgaatcc

SEQ ID NO: 47627 - DNA, 20 bp, Human gammaherpesvirus 4
gagtcctggcttgtcaactc

SEQ ID NO: 47628 - DNA, 20 bp, Human gammaherpesvirus 4
tcaactcttggagtatggcc

SEQ ID NO: 47629 - DNA, 20 bp, Human gammaherpesvirus 4
gagtatggccgggggcgggc

SEQ ID NO: 47630 - DNA, 20 bp, Human gammaherpesvirus 4
ttggtcccgcccatcatccc

SEQ ID NO: 47631 - DNA, 20 bp, Human gammaherpesvirus 4
gtcccgcccatcatcccccg

SEQ ID NO: 47632 - DNA, 20 bp, Human gammaherpesvirus 4
ggcagaccacctgtgctgga

SEQ ID NO: 47633 - DNA, 20 bp, Human gammaherpesvirus 4
atggcttcgggtccgagatg

SEQ ID NO: 47634 - DNA, 20 bp, Human gammaherpesvirus 4
gcaaattatttaaaaggtga

SEQ ID NO: 47635 - DNA, 20 bp, Human gammaherpesvirus 4
caaattatttaaaaggtgaa

SEQ ID NO: 47636 - DNA, 20 bp, Human gammaherpesvirus 4
tttaaaaggtgaatgctcaa

SEQ ID NO: 47637 - DNA, 20 bp, Human gammaherpesvirus 4
aaaaggtgaatgctcaactg

SEQ ID NO: 47638 - DNA, 20 bp, Human gammaherpesvirus 4
aaaggtgaatgctcaactga

SEQ ID NO: 47639 - DNA, 20 bp, Human gammaherpesvirus 4
caggagccagccgcggtgct

SEQ ID NO: 47640 - DNA, 20 bp, Human gammaherpesvirus 4
cggatgacagagtccggcag

SEQ ID NO: 47641 - DNA, 20 bp, Human gammaherpesvirus 4
ccgtggcggtgctggtgaca

SEQ ID NO: 47642 - DNA, 20 bp, Human gammaherpesvirus 4
agcaccgcggctggctcctg

SEQ ID NO: 47643 - DNA, 20 bp, Human gammaherpesvirus 4
ggggctgcaaattgcaaaaa

SEQ ID NO: 47644 - DNA, 20 bp, Human gammaherpesvirus 4
gggctgcaaattgcaaaaag

SEQ ID NO: 47645 - DNA, 20 bp, Human gammaherpesvirus 4
caaaaagtagagcgggtcgg

SEQ ID NO: 47646 - DNA, 20 bp, Human gammaherpesvirus 4
gggtaggggattttgtgggt

SEQ ID NO: 47647 - DNA, 20 bp, Human gammaherpesvirus 4
gaccgatccgacccgctcta

SEQ ID NO: 47648 - DNA, 20 bp, Human gammaherpesvirus 4
tgccccgtgccgcagcgtaa

SEQ ID NO: 47649 - DNA, 20 bp, Human gammaherpesvirus 4
gccccgtgccgcagcgtaaa

SEQ ID NO: 47650 - DNA, 20 bp, Human gammaherpesvirus 4
ccccgtgccgcagcgtaaac

SEQ ID NO: 47651 - DNA, 20 bp, Human gammaherpesvirus 4
acgctgcggcacggggcaaa

SEQ ID NO: 47652 - DNA, 20 bp, Human gammaherpesvirus 4
cgctgcggcacggggcaaaa

SEQ ID NO: 47653 - DNA, 20 bp, Human gammaherpesvirus 4
agggtgtcaacccggcagag

SEQ ID NO: 47654 - DNA, 20 bp, Human gammaherpesvirus 4
atggcatcgtcacgcacagt

SEQ ID NO: 47655 - DNA, 20 bp, Human gammaherpesvirus 4
tcggtgacaataaacacccc

SEQ ID NO: 47656 - DNA, 20 bp, Human gammaherpesvirus 4
attgtcaccgacaacgttct

SEQ ID NO: 47657 - DNA, 20 bp, Human gammaherpesvirus 4
ttgtcaccgacaacgttctg

SEQ ID NO: 47658 - DNA, 20 bp, Human gammaherpesvirus 4
tcaccgacaacgttctgcgc

SEQ ID NO: 47659 - DNA, 20 bp, Human gammaherpesvirus 4
tgcgccagctcttgaccttc

SEQ ID NO: 47660 - DNA, 20 bp, Human gammaherpesvirus 4
ggacacccccgggggcccgg

SEQ ID NO: 47661 - DNA, 20 bp, Human gammaherpesvirus 4
gacacccccgggggcccggc

SEQ ID NO: 47662 - DNA, 20 bp, Human gammaherpesvirus 4
aggtgccccatcttcccttc

SEQ ID NO: 47663 - DNA, 20 bp, Human gammaherpesvirus 4
ggtgccccatcttcccttcg

SEQ ID NO: 47664 - DNA, 20 bp, Human gammaherpesvirus 4
ccttcgcaggagggccacca

SEQ ID NO: 47665 - DNA, 20 bp, Human gammaherpesvirus 4
attcacggggccgtgcacct

SEQ ID NO: 47666 - DNA, 20 bp, Human gammaherpesvirus 4
acggggccgtgcacctgcca

SEQ ID NO: 47667 - DNA, 20 bp, Human gammaherpesvirus 4
tcttccacaccatccacagc

SEQ ID NO: 47668 - DNA, 20 bp, Human gammaherpesvirus 4
cacaccatccacagccccac

SEQ ID NO: 47669 - DNA, 20 bp, Human gammaherpesvirus 4
gatgccaccccctatgcccg

SEQ ID NO: 47670 - DNA, 20 bp, Human gammaherpesvirus 4
gggctccggaggtgggggct

SEQ ID NO: 47671 - DNA, 20 bp, Human gammaherpesvirus 4
ttcaggatggacttggtggg

SEQ ID NO: 47672 - DNA, 20 bp, Human gammaherpesvirus 4
tcaggatggacttggtggga

SEQ ID NO: 47673 - DNA, 20 bp, Human gammaherpesvirus 4
caggatggacttggtgggag

SEQ ID NO: 47674 - DNA, 20 bp, Human gammaherpesvirus 4
ttgccaaaacaacgtgtgct

SEQ ID NO: 47675 - DNA, 20 bp, Human gammaherpesvirus 4
ccaaaacaacgtgtgctctt

SEQ ID NO: 47676 - DNA, 20 bp, Human gammaherpesvirus 4
cttcatacaggcccgcaatt

SEQ ID NO: 47677 - DNA, 20 bp, Human gammaherpesvirus 4
ttcatacaggcccgcaattt

SEQ ID NO: 47678 - DNA, 20 bp, Human gammaherpesvirus 4
atacaggcccgcaatttcca

SEQ ID NO: 47679 - DNA, 20 bp, Human gammaherpesvirus 4
gaaacggccgcctggtccag

SEQ ID NO: 47680 - DNA, 20 bp, Human gammaherpesvirus 4
aaacggccgcctggtccagc

SEQ ID NO: 47681 - DNA, 20 bp, Human gammaherpesvirus 4
cctcctggggggccatgctc

SEQ ID NO: 47682 - DNA, 20 bp, Human gammaherpesvirus 4
caaatgctgtggatgggttt

SEQ ID NO: 47683 - DNA, 20 bp, Human gammaherpesvirus 4
aaatgctgtggatgggtttc

SEQ ID NO: 47684 - DNA, 20 bp, Human gammaherpesvirus 4
gtatagggcaaggttgggcc

SEQ ID NO: 47685 - DNA, 20 bp, Human gammaherpesvirus 4
ggcccctgggtagtcacgtt

SEQ ID NO: 47686 - DNA, 20 bp, Human gammaherpesvirus 4
cggctgaacgtgactaccca

SEQ ID NO: 47687 - DNA, 20 bp, Human gammaherpesvirus 4
ccctataccaactgctgtcc

SEQ ID NO: 47688 - DNA, 20 bp, Human gammaherpesvirus 4
taggccgagagaagcacaga

SEQ ID NO: 47689 - DNA, 20 bp, Human gammaherpesvirus 4
gggtagccgacggtggctaa

SEQ ID NO: 47690 - DNA, 20 bp, Human gammaherpesvirus 4
gccaccgtcggctaccccaa

SEQ ID NO: 47691 - DNA, 20 bp, Human gammaherpesvirus 4
acagtggcctcattggaggc

SEQ ID NO: 47692 - DNA, 20 bp, Human gammaherpesvirus 4
cagtggcctcattggaggcg

SEQ ID NO: 47693 - DNA, 20 bp, Human gammaherpesvirus 4
agaacattcatcacactccc

SEQ ID NO: 47694 - DNA, 20 bp, Human gammaherpesvirus 4
atcacactcccacttagccg

SEQ ID NO: 47695 - DNA, 20 bp, Human gammaherpesvirus 4
gccgcttcagctgggcagca

SEQ ID NO: 47696 - DNA, 20 bp, Human gammaherpesvirus 4
agctgggcagcatgcttgga

SEQ ID NO: 47697 - DNA, 20 bp, Human gammaherpesvirus 4
gataacttactaaactcgcg

SEQ ID NO: 47698 - DNA, 20 bp, Human gammaherpesvirus 4
cggcctcccgctctgccagc

SEQ ID NO: 47699 - DNA, 20 bp, Human gammaherpesvirus 4
ggcctcccgctctgccagct

SEQ ID NO: 47700 - DNA, 20 bp, Human gammaherpesvirus 4
gggggacacgcgcagtgagt

SEQ ID NO: 47701 - DNA, 20 bp, Human gammaherpesvirus 4
gggaggacactgccaaggtt

SEQ ID NO: 47702 - DNA, 20 bp, Human gammaherpesvirus 4
aagagcagatttccgtcagc

SEQ ID NO: 47703 - DNA, 20 bp, Human gammaherpesvirus 4
ccgtcagccagggtgacctg

SEQ ID NO: 47704 - DNA, 20 bp, Human gammaherpesvirus 4
cgtcagccagggtgacctgg

SEQ ID NO: 47705 - DNA, 20 bp, Human gammaherpesvirus 4
gactgcgcagggcgccggac

SEQ ID NO: 47706 - DNA, 20 bp, Human gammaherpesvirus 4
gtggagcgcccggacgcccc

SEQ ID NO: 47707 - DNA, 20 bp, Human gammaherpesvirus 4
acctggatcccctcaccgtc

SEQ ID NO: 47708 - DNA, 20 bp, Human gammaherpesvirus 4
ttcagagggagctggctctt

SEQ ID NO: 47709 - DNA, 20 bp, Human gammaherpesvirus 4
agagggagctggctcttgac

SEQ ID NO: 47710 - DNA, 20 bp, Human gammaherpesvirus 4
acggtgaggggatccaggtg

SEQ ID NO: 47711 - DNA, 20 bp, Human gammaherpesvirus 4
ggagcagggcccagtgcacc

SEQ ID NO: 47712 - DNA, 20 bp, Human gammaherpesvirus 4
gggcgccagggatcgattgg

SEQ ID NO: 47713 - DNA, 20 bp, Human gammaherpesvirus 4
gaaaagggcccagggtcact

SEQ ID NO: 47714 - DNA, 20 bp, Human gammaherpesvirus 4
tccaatcgatccctggcgcc

SEQ ID NO: 47715 - DNA, 20 bp, Human gammaherpesvirus 4
ccaatcgatccctggcgccc

SEQ ID NO: 47716 - DNA, 20 bp, Human gammaherpesvirus 4
agaaatgggggcgtgtgctg

SEQ ID NO: 47717 - DNA, 20 bp, Human gammaherpesvirus 4
gaaatgggggcgtgtgctgc

SEQ ID NO: 47718 - DNA, 20 bp, Human gammaherpesvirus 4
cctgctggcgcagcacacgc

SEQ ID NO: 47719 - DNA, 20 bp, Human gammaherpesvirus 4
ctaaagtcatacgcccgtat

SEQ ID NO: 47720 - DNA, 20 bp, Human gammaherpesvirus 4
taaagtcatacgcccgtatt

SEQ ID NO: 47721 - DNA, 20 bp, Human gammaherpesvirus 4
gctccactggggatctttgc

SEQ ID NO: 47722 - DNA, 20 bp, Human gammaherpesvirus 4
gccagccttcatactagatt

SEQ ID NO: 47723 - DNA, 20 bp, Human gammaherpesvirus 4
ccagccttcatactagattc

SEQ ID NO: 47724 - DNA, 20 bp, Human gammaherpesvirus 4
atactagattcagcgatccc

SEQ ID NO: 47725 - DNA, 20 bp, Human gammaherpesvirus 4
agcgatcccccggttgggaa

SEQ ID NO: 47726 - DNA, 20 bp, Human gammaherpesvirus 4
tggtagacggccaggtgagg

SEQ ID NO: 47727 - DNA, 20 bp, Human gammaherpesvirus 4
taggctgagagcttgcggct

SEQ ID NO: 47728 - DNA, 20 bp, Human gammaherpesvirus 4
cggctgagctccgttgaaaa

SEQ ID NO: 47729 - DNA, 20 bp, Human gammaherpesvirus 4
aaaagcagagctcccccatg

SEQ ID NO: 47730 - DNA, 20 bp, Human gammaherpesvirus 4
tcaacggagctcagccgcaa

SEQ ID NO: 47731 - DNA, 20 bp, Human gammaherpesvirus 4
tttgtaatcagcatcaggca

SEQ ID NO: 47732 - DNA, 20 bp, Human gammaherpesvirus 4
gtaatcagcatcaggcagga

SEQ ID NO: 47733 - DNA, 20 bp, Human gammaherpesvirus 4
taatcagcatcaggcaggag

SEQ ID NO: 47734 - DNA, 20 bp, Human gammaherpesvirus 4
tcggcctccagggagatggg

SEQ ID NO: 47735 - DNA, 20 bp, Human gammaherpesvirus 4
gtggcccccatctccctgga

SEQ ID NO: 47736 - DNA, 20 bp, Human gammaherpesvirus 4
cacgtgcacttgatggccag

SEQ ID NO: 47737 - DNA, 20 bp, Human gammaherpesvirus 4
atggccagctgctgcttgtc

SEQ ID NO: 47738 - DNA, 20 bp, Human gammaherpesvirus 4
tcgaggatggtcctttggcg

SEQ ID NO: 47739 - DNA, 20 bp, Human gammaherpesvirus 4
ggcgcggatcctcgcaggcc

SEQ ID NO: 47740 - DNA, 20 bp, Human gammaherpesvirus 4
gcgcggatcctcgcaggccg

SEQ ID NO: 47741 - DNA, 20 bp, Human gammaherpesvirus 4
tagtctgagaggctgagctt

SEQ ID NO: 47742 - DNA, 20 bp, Human gammaherpesvirus 4
tcccggcacacggcgtacat

SEQ ID NO: 47743 - DNA, 20 bp, Human gammaherpesvirus 4
cgcatgcgggccagctccca

SEQ ID NO: 47744 - DNA, 20 bp, Human gammaherpesvirus 4
ccgtggttgggcagaaccat

SEQ ID NO: 47745 - DNA, 20 bp, Human gammaherpesvirus 4
ggcagaaccatcagctcgcc

SEQ ID NO: 47746 - DNA, 20 bp, Human gammaherpesvirus 4
tgcccaaccacggcaaccct

SEQ ID NO: 47747 - DNA, 20 bp, Human gammaherpesvirus 4
aacatcttgacaaagtcacg

SEQ ID NO: 47748 - DNA, 20 bp, Human gammaherpesvirus 4
acaaagtcacgcgggccatg

SEQ ID NO: 47749 - DNA, 20 bp, Human gammaherpesvirus 4
tctagctttccttcagcgtc

SEQ ID NO: 47750 - DNA, 20 bp, Human gammaherpesvirus 4
ccttcagcgtctatgcccag

SEQ ID NO: 47751 - DNA, 20 bp, Human gammaherpesvirus 4
cttcagcgtctatgcccagc

SEQ ID NO: 47752 - DNA, 20 bp, Human gammaherpesvirus 4
tatcggtgtaacgcagccac

SEQ ID NO: 47753 - DNA, 20 bp, Human gammaherpesvirus 4
gccgactgtgagggtccaga

SEQ ID NO: 47754 - DNA, 20 bp, Human gammaherpesvirus 4
ccgactgtgagggtccagag

SEQ ID NO: 47755 - DNA, 20 bp, Human gammaherpesvirus 4
caccgatataatgccagcct

SEQ ID NO: 47756 - DNA, 20 bp, Human gammaherpesvirus 4
taccccctggccacctaccc

SEQ ID NO: 47757 - DNA, 20 bp, Human gammaherpesvirus 4
accccctggccacctaccct

SEQ ID NO: 47758 - DNA, 20 bp, Human gammaherpesvirus 4
ccccctggccacctaccctc

SEQ ID NO: 47759 - DNA, 20 bp, Human gammaherpesvirus 4
gggaggtggccacactgggg

SEQ ID NO: 47760 - DNA, 20 bp, Human gammaherpesvirus 4
ctatccttcctcagggaggc

SEQ ID NO: 47761 - DNA, 20 bp, Human gammaherpesvirus 4
ctcagggaggccttgatgag

SEQ ID NO: 47762 - DNA, 20 bp, Human gammaherpesvirus 4
atgagccggcagaggaccag

SEQ ID NO: 47763 - DNA, 20 bp, Human gammaherpesvirus 4
gccagccctggtcctctgcc

SEQ ID NO: 47764 - DNA, 20 bp, Human gammaherpesvirus 4
ccagccctggtcctctgccg

SEQ ID NO: 47765 - DNA, 20 bp, Human gammaherpesvirus 4
aggggggttcaggtgaggca

SEQ ID NO: 47766 - DNA, 20 bp, Human gammaherpesvirus 4
ggggggttcaggtgaggcaa

SEQ ID NO: 47767 - DNA, 20 bp, Human gammaherpesvirus 4
aggtgaggcaaggctgtggg

SEQ ID NO: 47768 - DNA, 20 bp, Human gammaherpesvirus 4
gtcacccgccgacccttagc

SEQ ID NO: 47769 - DNA, 20 bp, Human gammaherpesvirus 4
gccctcttagccgcctcacc

SEQ ID NO: 47770 - DNA, 20 bp, Human papillomavirus type 156
cagcaaatccgtcttttctt

SEQ ID NO: 47771 - DNA, 20 bp, Human papillomavirus type 156
agcaaatccgtcttttcttc

SEQ ID NO: 47772 - DNA, 20 bp, Human papillomavirus type 156
tcttcttccatggctgactc

SEQ ID NO: 47773 - DNA, 20 bp, Human papillomavirus type 156
cttcttccatggctgactcg

SEQ ID NO: 47774 - DNA, 20 bp, Human papillomavirus type 156
ttcttccatggctgactcgt

SEQ ID NO: 47775 - DNA, 20 bp, Human papillomavirus type 156
aattagatttgcatgcttta

SEQ ID NO: 47776 - DNA, 20 bp, Human papillomavirus type 156
gatttgcatgctttagtact

SEQ ID NO: 47777 - DNA, 20 bp, Human papillomavirus type 156
gcatgctttagtactacctg

SEQ ID NO: 47778 - DNA, 20 bp, Human papillomavirus type 156
catgctttagtactacctgc

SEQ ID NO: 47779 - DNA, 20 bp, Human papillomavirus type 156
agtactacctgcaaatttac

SEQ ID NO: 47780 - DNA, 20 bp, Human papillomavirus type 156
cagccctaaaacgaaagtta

SEQ ID NO: 47781 - DNA, 20 bp, Human papillomavirus type 156
gttggttctccagtacaaac

SEQ ID NO: 47782 - DNA, 20 bp, Human papillomavirus type 156
gttctccagtacaaacggta

SEQ ID NO: 47783 - DNA, 20 bp, Human papillomavirus type 156
tccagtacaaacggtagcag

SEQ ID NO: 47784 - DNA, 20 bp, Human papillomavirus type 156
agcccgcgattggaagctgt

SEQ ID NO: 47785 - DNA, 20 bp, Human papillomavirus type 156
gcaatcctcctagaactcgt

SEQ ID NO: 47786 - DNA, 20 bp, Human papillomavirus type 156
caatcctcctagaactcgta

SEQ ID NO: 47787 - DNA, 20 bp, Human papillomavirus type 156
ccattttcttctttcaaaaa

SEQ ID NO: 47788 - DNA, 20 bp, Human papillomavirus type 156
tcttctttcaaaaaggtttt

SEQ ID NO: 47789 - DNA, 20 bp, Human papillomavirus type 156
cttctttcaaaaaggttttt

SEQ ID NO: 47790 - DNA, 20 bp, Human papillomavirus type 156
ttttagaaaactcgccacac

SEQ ID NO: 47791 - DNA, 20 bp, Human papillomavirus type 156
tttagaaaactcgccacaca

SEQ ID NO: 47792 - DNA, 20 bp, Human papillomavirus type 156
ttagaaaactcgccacacaa

SEQ ID NO: 47793 - DNA, 20 bp, Human papillomavirus type 156
tagaaaactcgccacacaaa

SEQ ID NO: 47794 - DNA, 20 bp, Human papillomavirus type 156
agaaaactcgccacacaaat

SEQ ID NO: 47795 - DNA, 20 bp, Human papillomavirus type 156
ttttgttgtgtttgcatcag

SEQ ID NO: 47796 - DNA, 20 bp, Human papillomavirus type 156
tgttgtgtttgcatcagatg

SEQ ID NO: 47797 - DNA, 20 bp, Human papillomavirus type 156
gttgtgtttgcatcagatgc

SEQ ID NO: 47798 - DNA, 20 bp, Human papillomavirus type 156
ttgtgtttgcatcagatgcc

SEQ ID NO: 47799 - DNA, 20 bp, Human papillomavirus type 156
tgtttgcatcagatgcccaa

SEQ ID NO: 47800 - DNA, 20 bp, Human papillomavirus type 156
gacctagcacaagacctaca

SEQ ID NO: 47801 - DNA, 20 bp, Human papillomavirus type 156
tcggttcctttagatcctat

SEQ ID NO: 47802 - DNA, 20 bp, Human papillomavirus type 156
cggttcctttagatcctata

SEQ ID NO: 47803 - DNA, 20 bp, Human papillomavirus type 156
ggttcctttagatcctatag

SEQ ID NO: 47804 - DNA, 20 bp, Human papillomavirus type 156
ctttagatcctataggatca

SEQ ID NO: 47805 - DNA, 20 bp, Human papillomavirus type 156
atcccagggcacaatttgaa

SEQ ID NO: 47806 - DNA, 20 bp, Human papillomavirus type 156
gaaattgaagaaccccaacc

SEQ ID NO: 47807 - DNA, 20 bp, Human papillomavirus type 156
aaattgaagaaccccaacct

SEQ ID NO: 47808 - DNA, 20 bp, Human papillomavirus type 156
aagaaccccaacctacaagt

SEQ ID NO: 47809 - DNA, 20 bp, Human papillomavirus type 156
agacagagttcagagagtac

SEQ ID NO: 47810 - DNA, 20 bp, Human papillomavirus type 156
ctaaagtgctgaatacggat

SEQ ID NO: 47811 - DNA, 20 bp, Human papillomavirus type 156
tattaaaagaactggatatt

SEQ ID NO: 47812 - DNA, 20 bp, Human papillomavirus type 156
attaaaagaactggatatta

SEQ ID NO: 47813 - DNA, 20 bp, Human papillomavirus type 156
ttaaaagaactggatattac

SEQ ID NO: 47814 - DNA, 20 bp, Human papillomavirus type 156
aaagaactggatattacttt

SEQ ID NO: 47815 - DNA, 20 bp, Human papillomavirus type 156
tttcacacttacattcaaga

SEQ ID NO: 47816 - DNA, 20 bp, Human papillomavirus type 156
cacacttacattcaagatgg

SEQ ID NO: 47817 - DNA, 20 bp, Human papillomavirus type 156
acacttacattcaagatggt

SEQ ID NO: 47818 - DNA, 20 bp, Human papillomavirus type 156
cattcaagatggtgatatgt

SEQ ID NO: 47819 - DNA, 20 bp, Human papillomavirus type 156
aagatggtgatatgtgtgaa

SEQ ID NO: 47820 - DNA, 20 bp, Human papillomavirus type 156
cagatatattttatcattag

SEQ ID NO: 47821 - DNA, 20 bp, Human papillomavirus type 156
tatcattagctacaaaatgt

SEQ ID NO: 47822 - DNA, 20 bp, Human papillomavirus type 156
atcattagctacaaaatgtc

SEQ ID NO: 47823 - DNA, 20 bp, Human papillomavirus type 156
tcattagctacaaaatgtcc

SEQ ID NO: 47824 - DNA, 20 bp, Human papillomavirus type 156
gctacaaaatgtcctgcaga

SEQ ID NO: 47825 - DNA, 20 bp, Human papillomavirus type 156
atcattttgagagtataaag

SEQ ID NO: 47826 - DNA, 20 bp, Human papillomavirus type 156
tgagagtataaagccaagcc

SEQ ID NO: 47827 - DNA, 20 bp, Human papillomavirus type 156
gagagtataaagccaagcca

SEQ ID NO: 47828 - DNA, 20 bp, Human papillomavirus type 156
agagtataaagccaagccaa

SEQ ID NO: 47829 - DNA, 20 bp, Human papillomavirus type 156
gcacttatcttctgtcagta

SEQ ID NO: 47830 - DNA, 20 bp, Influenza A virus
cagctgcagatgcagacaca

SEQ ID NO: 47831 - DNA, 20 bp, Influenza A virus
aaccgacactgttgacacag

SEQ ID NO: 47832 - DNA, 20 bp, Influenza A virus
acacagtgctcgagaagaat

SEQ ID NO: 47833 - DNA, 20 bp, Influenza A virus
ttctcgagcactgtgtcaac

SEQ ID NO: 47834 - DNA, 20 bp, Influenza A virus
tcgagcactgtgtcaacagt

SEQ ID NO: 47835 - DNA, 20 bp, Influenza A virus
tagaaacaccaaactctgag

SEQ ID NO: 47836 - DNA, 20 bp, Influenza A virus
tccaggagatttcatcgact

SEQ ID NO: 47837 - DNA, 20 bp, Influenza A virus
catcgactatgaggagctga

SEQ ID NO: 47838 - DNA, 20 bp, Influenza A virus
atcgactatgaggagctgag

SEQ ID NO: 47839 - DNA, 20 bp, Influenza A virus
agctcagtgtcatcattcga

SEQ ID NO: 47840 - DNA, 20 bp, Influenza A virus
ttatgtgaacaagaaaggga

SEQ ID NO: 47841 - DNA, 20 bp, Influenza A virus
tgtgaacaagaaagggaaag

SEQ ID NO: 47842 - DNA, 20 bp, Influenza A virus
tactgtggggtattcatcac

SEQ ID NO: 47843 - DNA, 20 bp, Influenza A virus
atcacccgtctaacagtaag

SEQ ID NO: 47844 - DNA, 20 bp, Influenza A virus
ctgttagacgggtgatgaat

SEQ ID NO: 47845 - DNA, 20 bp, Influenza A virus
gaggcaaatggaaatctaat

SEQ ID NO: 47846 - DNA, 20 bp, Influenza A virus
aggcaaatggaaatctaata

SEQ ID NO: 47847 - DNA, 20 bp, Influenza A virus
cgcactgagtagaggctttg

SEQ ID NO: 47848 - DNA, 20 bp, Influenza A virus
gcactgagtagaggctttgg

SEQ ID NO: 47849 - DNA, 20 bp, Influenza A virus
gggtccggcatcatcacctc

SEQ ID NO: 47850 - DNA, 20 bp, Influenza A virus
cgtccattcaatccagaggt

SEQ ID NO: 47851 - DNA, 20 bp, Influenza A virus
aatccagaggtctatttgga

SEQ ID NO: 47852 - DNA, 20 bp, Influenza A virus
ggagccattgccggttttat

SEQ ID NO: 47853 - DNA, 20 bp, Influenza A virus
gagccattgccggttttatt

SEQ ID NO: 47854 - DNA, 20 bp, Influenza A virus
ccggttttattgaaggggga

SEQ ID NO: 47855 - DNA, 20 bp, Influenza A virus
aacagggaaaaggtagatgg

SEQ ID NO: 47856 - DNA, 20 bp, Influenza A virus
gaatcaatggggatctatca

SEQ ID NO: 47857 - DNA, 20 bp, Influenza A virus
tggcgatctactcaactgtc

SEQ ID NO: 47858 - DNA, 20 bp, Influenza A virus
actggtgcttttggtctccc

SEQ ID NO: 47859 - DNA, 20 bp, Influenza A virus
agtagatcgccagaatctga

SEQ ID NO: 47860 - DNA, 20 bp, Human papillomavirus type 9
aaaacgaccgataacggtaa

SEQ ID NO: 47861 - DNA, 20 bp, Human papillomavirus type 9
gcacgtaggtggttatttga

SEQ ID NO: 47862 - DNA, 20 bp, Human papillomavirus type 9
tttgatcgttgggatgattg

SEQ ID NO: 47863 - DNA, 20 bp, Human papillomavirus type 9
gatcgttgggatgattgtgg

SEQ ID NO: 47864 - DNA, 20 bp, Human papillomavirus type 9
atcgttgggatgattgtggt

SEQ ID NO: 47865 - DNA, 20 bp, Human papillomavirus type 9
acagcttatttggacagagg

SEQ ID NO: 47866 - DNA, 20 bp, Human papillomavirus type 9
cagcttatttggacagagga

SEQ ID NO: 47867 - DNA, 20 bp, Human papillomavirus type 9
tttggacagaggaggatttg

SEQ ID NO: 47868 - DNA, 20 bp, Human papillomavirus type 9
ggacagaggaggatttggtg

SEQ ID NO: 47869 - DNA, 20 bp, Human papillomavirus type 9
gacagaggaggatttggtgt

SEQ ID NO: 47870 - DNA, 20 bp, Human papillomavirus type 9
gctacatgctataagtttga

SEQ ID NO: 47871 - DNA, 20 bp, Human papillomavirus type 9
gagcagttttataaggtcag

SEQ ID NO: 47872 - DNA, 20 bp, Human papillomavirus type 9
agcagttttataaggtcaga

SEQ ID NO: 47873 - DNA, 20 bp, Human papillomavirus type 9
tataaggtcagaaacagctg

SEQ ID NO: 47874 - DNA, 20 bp, Human papillomavirus type 9
ataaggtcagaaacagctgg

SEQ ID NO: 47875 - DNA, 20 bp, Human papillomavirus type 9
gagcgcaacaggaacttttg

SEQ ID NO: 47876 - DNA, 20 bp, Human papillomavirus type 9
tgctgggtgatatacaactg

SEQ ID NO: 47877 - DNA, 20 bp, Human papillomavirus type 9
gctgggtgatatacaactgg

SEQ ID NO: 47878 - DNA, 20 bp, Human papillomavirus type 9
ctgggtgatatacaactggt

SEQ ID NO: 47879 - DNA, 20 bp, Human papillomavirus type 9
gccatgagtgacaataaagg

SEQ ID NO: 47880 - DNA, 20 bp, Human papillomavirus type 9
cagacctaatagatgatgga

SEQ ID NO: 47881 - DNA, 20 bp, Human papillomavirus type 9
agacctaatagatgatggag

SEQ ID NO: 47882 - DNA, 20 bp, Human papillomavirus type 9
tgccagcaagagagtgagga

SEQ ID NO: 47883 - DNA, 20 bp, Human papillomavirus type 9
gccagcaagagagtgaggaa

SEQ ID NO: 47884 - DNA, 20 bp, Human papillomavirus type 9
ccagcaagagagtgaggaaa

SEQ ID NO: 47885 - DNA, 20 bp, Human papillomavirus type 9
ggaattgttaaagatttact

SEQ ID NO: 47886 - DNA, 20 bp, Human papillomavirus type 9
ttaaagatttacttaaacat

SEQ ID NO: 47887 - DNA, 20 bp, Human papillomavirus type 9
aagtaaatctttaacaattc

SEQ ID NO: 47888 - DNA, 20 bp, Human papillomavirus type 9
agtaaatctttaacaattcc

SEQ ID NO: 47889 - DNA, 20 bp, Human papillomavirus type 9
aacaattcccaagcccttag

SEQ ID NO: 47890 - DNA, 20 bp, Human papillomavirus type 9
ttattgcagcattgtgctta

SEQ ID NO: 47891 - DNA, 20 bp, Human papillomavirus type 9
ttgcagcattgtgcttatat

SEQ ID NO: 47892 - DNA, 20 bp, Human papillomavirus type 9
cagcattgtgcttatatttg

SEQ ID NO: 47893 - DNA, 20 bp, Human papillomavirus type 9
tgcttatatttggctacatt

SEQ ID NO: 47894 - DNA, 20 bp, Human papillomavirus type 9
tatttggctacattatatgc

SEQ ID NO: 47895 - DNA, 20 bp, Human papillomavirus type 9
atcaccaatctgcaaatgct

SEQ ID NO: 47896 - DNA, 20 bp, Human papillomavirus type 9
gacttatcgacaatgataca

SEQ ID NO: 47897 - DNA, 20 bp, Human papillomavirus type 9
acttatcgacaatgatacaa

SEQ ID NO: 47898 - DNA, 20 bp, Human papillomavirus type 9
tcgacaatgatacaatttgc

SEQ ID NO: 47899 - DNA, 20 bp, Human papillomavirus type 9
gcctatgatcatgaatattt

SEQ ID NO: 47900 - DNA, 20 bp, Human papillomavirus type 9
ctttcaataacaaatttcca

SEQ ID NO: 47901 - DNA, 20 bp, Human papillomavirus type 9
caataacaaatttccacttg

SEQ ID NO: 47902 - DNA, 20 bp, Human papillomavirus type 9
aataacaaatttccacttga

SEQ ID NO: 47903 - DNA, 20 bp, Human papillomavirus type 9
ccacttgatgctaatcacaa

SEQ ID NO: 47904 - DNA, 20 bp, Human papillomavirus type 9
cacttgatgctaatcacaaa

SEQ ID NO: 47905 - DNA, 20 bp, Human papillomavirus type 9
tgcattatgccaggaaaaat

SEQ ID NO: 47906 - DNA, 20 bp, Human papillomavirus type 9
gcattatgccaggaaaaatg

SEQ ID NO: 47907 - DNA, 20 bp, Human papillomavirus type 9
cattatgccaggaaaaatgg

SEQ ID NO: 47908 - DNA, 20 bp, Human papillomavirus type 9
tgccaggaaaaatggagtta

SEQ ID NO: 47909 - DNA, 20 bp, Human papillomavirus type 9
tgcgattggggtaccaacct

SEQ ID NO: 47910 - DNA, 20 bp, Human papillomavirus type 9
ccaggtcggggtcgccaaca

SEQ ID NO: 47911 - DNA, 20 bp, Human papillomavirus type 9
caggtcggggtcgccaacaa

SEQ ID NO: 47912 - DNA, 20 bp, Human papillomavirus type 9
ttggcgaccccgacctggaa

SEQ ID NO: 47913 - DNA, 20 bp, Human papillomavirus type 9
gcgaccccgacctggaaagg

SEQ ID NO: 47914 - DNA, 20 bp, Human papillomavirus type 9
gaggtctctcccccgtctcc

SEQ ID NO: 47915 - DNA, 20 bp, Human papillomavirus type 9
cacctccccttccccttcgc

SEQ ID NO: 47916 - DNA, 20 bp, Human papillomavirus type 9
cccttcgcctgtcggtgggg

SEQ ID NO: 47917 - DNA, 20 bp, Human papillomavirus type 9
gcctgtcggtgggggtagtg

SEQ ID NO: 47918 - DNA, 20 bp, Human papillomavirus type 9
atgctgttgcgtggcgacgc

SEQ ID NO: 47919 - DNA, 20 bp, Human papillomavirus type 9
cgtggcgacgccaatgtgct

SEQ ID NO: 47920 - DNA, 20 bp, Human papillomavirus type 9
agtgctatcgctttcgggaa

SEQ ID NO: 47921 - DNA, 20 bp, Human papillomavirus type 9
cgggaacgcaaaaaaaaaag

SEQ ID NO: 47922 - DNA, 20 bp, Human papillomavirus type 9
gggaacgcaaaaaaaaaaga

SEQ ID NO: 47923 - DNA, 20 bp, Human papillomavirus type 9
ctactaacccatactaacta

SEQ ID NO: 47924 - DNA, 20 bp, Human papillomavirus type 9
gtgcaaaacgtactaaacgt

SEQ ID NO: 47925 - DNA, 20 bp, Human papillomavirus type 9
cagatatatacagaggctgc

SEQ ID NO: 47926 - DNA, 20 bp, Human papillomavirus type 9
gcagcctctgtatatatctg

SEQ ID NO: 47927 - DNA, 20 bp, Human papillomavirus type 9
cagcctctgtatatatctgt

SEQ ID NO: 47928 - DNA, 20 bp, Human papillomavirus type 9
cattaggggaagggccagga

SEQ ID NO: 47929 - DNA, 20 bp, Human papillomavirus type 9
ggggaagggccaggagtccg

SEQ ID NO: 47930 - DNA, 20 bp, Human papillomavirus type 9
gccctggggtgatacctgaa

SEQ ID NO: 47931 - DNA, 20 bp, Human papillomavirus type 9
gcccaactgatctaattcct

SEQ ID NO: 47932 - DNA, 20 bp, Human papillomavirus type 9
gatcagttgggccaattatt

SEQ ID NO: 47933 - DNA, 20 bp, Human papillomavirus type 9
taacagaaggtagaagaggc

SEQ ID NO: 47934 - DNA, 20 bp, Human papillomavirus type 9
tagaggtggctgacccaagc

SEQ ID NO: 47935 - DNA, 20 bp, Human papillomavirus type 9
agaggtggctgacccaagcc

SEQ ID NO: 47936 - DNA, 20 bp, Human papillomavirus type 9
gaggtggctgacccaagccc

SEQ ID NO: 47937 - DNA, 20 bp, Human papillomavirus type 9
gcataggagggcttgggtca

SEQ ID NO: 47938 - DNA, 20 bp, Human papillomavirus type 9
aggagcctccagataggcaa

SEQ ID NO: 47939 - DNA, 20 bp, Human papillomavirus type 9
ttagatgtacaacgccttag

SEQ ID NO: 47940 - DNA, 20 bp, Human papillomavirus type 9
tagatgtacaacgccttagt

SEQ ID NO: 47941 - DNA, 20 bp, Human papillomavirus type 9
agatgtacaacgccttagta

SEQ ID NO: 47942 - DNA, 20 bp, Human papillomavirus type 9
gatgtacaacgccttagtag

SEQ ID NO: 47943 - DNA, 20 bp, Human papillomavirus type 9
aaagttcaattgttgatgtt

SEQ ID NO: 47944 - DNA, 20 bp, Human papillomavirus type 9
aattgttgatgttaatattg

SEQ ID NO: 47945 - DNA, 20 bp, Human papillomavirus type 9
ttgatgttaatattgatgaa

SEQ ID NO: 47946 - DNA, 20 bp, Human papillomavirus type 9
atgttaatattgatgaacct

SEQ ID NO: 47947 - DNA, 20 bp, Human papillomavirus type 9
atattgatgaacctgatggt

SEQ ID NO: 47948 - DNA, 20 bp, Human papillomavirus type 9
tttatcatgcaattagtgac

SEQ ID NO: 47949 - DNA, 20 bp, Human papillomavirus type 9
ttatcatgcaattagtgacc

SEQ ID NO: 47950 - DNA, 20 bp, Human papillomavirus type 9
tatcatgcaattagtgaccg

SEQ ID NO: 47951 - DNA, 20 bp, Human papillomavirus type 9
atcatgcaattagtgaccgt

SEQ ID NO: 47952 - DNA, 20 bp, Human papillomavirus type 9
tcatgcaattagtgaccgtt

SEQ ID NO: 47953 - DNA, 20 bp, Human papillomavirus type 9
aaataggcagaggacaacct

SEQ ID NO: 47954 - DNA, 20 bp, Human papillomavirus type 9
aggggttggaacatcaggtc

SEQ ID NO: 47955 - DNA, 20 bp, Human papillomavirus type 9
ggggttggaacatcaggtca

SEQ ID NO: 47956 - DNA, 20 bp, Human papillomavirus type 9
gaacatcaggtcacccatta

SEQ ID NO: 47957 - DNA, 20 bp, Human papillomavirus type 9
tttaataaggttagagacac

SEQ ID NO: 47958 - DNA, 20 bp, Human papillomavirus type 9
gtgacgctgttcctgatggt

SEQ ID NO: 47959 - DNA, 20 bp, Human papillomavirus type 9
ctgatggtgcagtaaaccag

SEQ ID NO: 47960 - DNA, 20 bp, Human papillomavirus type 9
ctttttgccagcaaaaagtg

SEQ ID NO: 47961 - DNA, 20 bp, Human papillomavirus type 9
tttttgccagcaaaaagtga

SEQ ID NO: 47962 - DNA, 20 bp, Human papillomavirus type 9
ttgccagcaaaaagtgatca

SEQ ID NO: 47963 - DNA, 20 bp, Chlamydia trachomatis
taacagaattggggaaaaat

SEQ ID NO: 47964 - DNA, 20 bp, Chlamydia trachomatis
gggaaaaatttcgataaaaa

SEQ ID NO: 47965 - DNA, 20 bp, Chlamydia trachomatis
cgataaaaaacggcccctcc

SEQ ID NO: 47966 - DNA, 20 bp, Chlamydia trachomatis
gataaaaaacggcccctcct

SEQ ID NO: 47967 - DNA, 20 bp, Chlamydia trachomatis
tgtatgcctcttggggaact

SEQ ID NO: 47968 - DNA, 20 bp, Chlamydia trachomatis
gactcttgtttcaaatatgg

SEQ ID NO: 47969 - DNA, 20 bp, Chlamydia trachomatis
tttcaaatatggcgctagct

SEQ ID NO: 47970 - DNA, 20 bp, Chlamydia trachomatis
caaatatggcgctagctgtg

SEQ ID NO: 47971 - DNA, 20 bp, Chlamydia trachomatis
aaatatggcgctagctgtgc

SEQ ID NO: 47972 - DNA, 20 bp, Chlamydia trachomatis
tttgtctttaatacggacat

SEQ ID NO: 47973 - DNA, 20 bp, Chlamydia trachomatis
ataggccagaagatcccaac

SEQ ID NO: 47974 - DNA, 20 bp, Chlamydia trachomatis
tcaacgggaacaaaaccaaa

SEQ ID NO: 47975 - DNA, 20 bp, Chlamydia trachomatis
caacgggaacaaaaccaaaa

SEQ ID NO: 47976 - DNA, 20 bp, Chlamydia trachomatis
aacgggaacaaaaccaaaat

SEQ ID NO: 47977 - DNA, 20 bp, Chlamydia trachomatis
tggttttgttcccgttgaaa

SEQ ID NO: 47978 - DNA, 20 bp, Chlamydia trachomatis
ataagttcttgaaacgatac

SEQ ID NO: 47979 - DNA, 20 bp, Chlamydia trachomatis
ttgaaacgatacagtggcat

SEQ ID NO: 47980 - DNA, 20 bp, Chlamydia trachomatis
aaacgatacagtggcattaa

SEQ ID NO: 47981 - DNA, 20 bp, Chlamydia trachomatis
agcagtctgctcctaagcct

SEQ ID NO: 47982 - DNA, 20 bp, Chlamydia trachomatis
cacaacggtttcaggcttag

SEQ ID NO: 47983 - DNA, 20 bp, Chlamydia trachomatis
taccaatttagaaggacagg

SEQ ID NO: 47984 - DNA, 20 bp, Chlamydia trachomatis
agaaggacaggaatcgagta

SEQ ID NO: 47985 - DNA, 20 bp, Chlamydia trachomatis
gaaggacaggaatcgagtac

SEQ ID NO: 47986 - DNA, 20 bp, Chlamydia trachomatis
acgtgtcttccctgaaggtt

SEQ ID NO: 47987 - DNA, 20 bp, Chlamydia trachomatis
cctgaaggttgagacaattt

SEQ ID NO: 47988 - DNA, 20 bp, Chlamydia trachomatis
tggatctctagagaagactg

SEQ ID NO: 47989 - DNA, 20 bp, Chlamydia trachomatis
cctgtacccagtaccgcaaa

SEQ ID NO: 47990 - DNA, 20 bp, Chlamydia trachomatis
ctgtacccagtaccgcaaag

SEQ ID NO: 47991 - DNA, 20 bp, Chlamydia trachomatis
gcggtactgggtacaggaaa

SEQ ID NO: 47992 - DNA, 20 bp, Chlamydia trachomatis
cggtactgggtacaggaaat

SEQ ID NO: 47993 - DNA, 20 bp, Chlamydia trachomatis
tcgtccagcgctgatatcag

SEQ ID NO: 47994 - DNA, 20 bp, Chlamydia trachomatis
gccatttcacaacggtttca

SEQ ID NO: 47995 - DNA, 20 bp, Chlamydia trachomatis
cacaacggtttcaataaaaa

SEQ ID NO: 47996 - DNA, 20 bp, Chlamydia trachomatis
acaacggtttcaataaaaag

SEQ ID NO: 47997 - DNA, 20 bp, Chlamydia trachomatis
caataaaaagctgtgcaaaa

SEQ ID NO: 47998 - DNA, 20 bp, Chlamydia trachomatis
gcgcttctgcagctaaaaga

SEQ ID NO: 47999 - DNA, 20 bp, Chlamydia trachomatis
cgcttctgcagctaaaagaa

SEQ ID NO: 48000 - DNA, 20 bp, Chlamydia trachomatis
tgcagctaaaagaaaaacga

SEQ ID NO: 48001 - DNA, 20 bp, Chlamydia trachomatis
tcgtacagctcacagttggc

SEQ ID NO: 48002 - DNA, 20 bp, Chlamydia trachomatis
gcgtcaacaattaatgaaat

SEQ ID NO: 48003 - DNA, 20 bp, Chlamydia trachomatis
tctccattatatcacttgtc

SEQ ID NO: 48004 - DNA, 20 bp, Chlamydia trachomatis
tatcacttgtctccgagtca

SEQ ID NO: 48005 - DNA, 20 bp, Chlamydia trachomatis
tctccgagtcaaggcagcgt

SEQ ID NO: 48006 - DNA, 20 bp, Chlamydia trachomatis
tacaattcccctctatctga

SEQ ID NO: 48007 - DNA, 20 bp, Chlamydia trachomatis
ccctctatctgaatacgccg

SEQ ID NO: 48008 - DNA, 20 bp, Chlamydia trachomatis
cttcaggaatgccttctcat

SEQ ID NO: 48009 - DNA, 20 bp, Chlamydia trachomatis
aggaatgccttctcatgtaa

SEQ ID NO: 48010 - DNA, 20 bp, Chlamydia trachomatis
tcatgtaaagatggaagatc

SEQ ID NO: 48011 - DNA, 20 bp, Chlamydia trachomatis
atgctctgggggttgaaggg

SEQ ID NO: 48012 - DNA, 20 bp, Chlamydia trachomatis
tgctctgggggttgaagggt

SEQ ID NO: 48013 - DNA, 20 bp, Chlamydia trachomatis
gccgtgatgggcaaaaacct

SEQ ID NO: 48014 - DNA, 20 bp, Chlamydia trachomatis
tattgaacatggtggatcat

SEQ ID NO: 48015 - DNA, 20 bp, Chlamydia trachomatis
aacatggtggatcatggttt

SEQ ID NO: 48016 - DNA, 20 bp, Chlamydia trachomatis
ttctgtttctgtctataacc

SEQ ID NO: 48017 - DNA, 20 bp, Chlamydia trachomatis
tctgtttctgtctataaccg

SEQ ID NO: 48018 - DNA, 20 bp, Chlamydia trachomatis
tgccgcttagctttttcttt

SEQ ID NO: 48019 - DNA, 20 bp, Chlamydia trachomatis
gctttttcttttctaaagga

SEQ ID NO: 48020 - DNA, 20 bp, Chlamydia trachomatis
ttcttttctaaaggatttgt

SEQ ID NO: 48021 - DNA, 20 bp, Chlamydia trachomatis
tcttttctaaaggatttgtc

SEQ ID NO: 48022 - DNA, 20 bp, Chlamydia trachomatis
cttttctaaaggatttgtca

SEQ ID NO: 48023 - DNA, 20 bp, Chlamydia trachomatis
cgtcctccaacaatcgcctg

SEQ ID NO: 48024 - DNA, 20 bp, Chlamydia trachomatis
tggctcatcagttgatgctt

SEQ ID NO: 48025 - DNA, 20 bp, Chlamydia trachomatis
atgctttgcctgaatgagag

SEQ ID NO: 48026 - DNA, 20 bp, Chlamydia trachomatis
gcctgaatgagagtggactt

SEQ ID NO: 48027 - DNA, 20 bp, Chlamydia trachomatis
cctgaatgagagtggactta

SEQ ID NO: 48028 - DNA, 20 bp, Chlamydia trachomatis
ctaaatgcgctaccgctgca

SEQ ID NO: 48029 - DNA, 20 bp, Chlamydia trachomatis
gtcttcaaacagcatgatgt

SEQ ID NO: 48030 - DNA, 20 bp, Chlamydia trachomatis
tcttcaaacagcatgatgtc

SEQ ID NO: 48031 - DNA, 20 bp, Chlamydia trachomatis
aaacagcatgatgtccgata

SEQ ID NO: 48032 - DNA, 20 bp, Chlamydia trachomatis
acccgactatcggacatcat

SEQ ID NO: 48033 - DNA, 20 bp, Chlamydia trachomatis
cgttcattttgtacagcata

SEQ ID NO: 48034 - DNA, 20 bp, Chlamydia trachomatis
attttgtacagcatatcgac

SEQ ID NO: 48035 - DNA, 20 bp, Chlamydia trachomatis
tgtacagcatatcgacaagg

SEQ ID NO: 48036 - DNA, 20 bp, Chlamydia trachomatis
gtacagcatatcgacaaggg

SEQ ID NO: 48037 - DNA, 20 bp, Chlamydia trachomatis
tacagcatatcgacaaggga

SEQ ID NO: 48038 - DNA, 20 bp, Chlamydia trachomatis
cattgcaaaaagctcctaag

SEQ ID NO: 48039 - DNA, 20 bp, Chlamydia trachomatis
caaaaagctcctaagactag

SEQ ID NO: 48040 - DNA, 20 bp, Chlamydia trachomatis
ttgtagagggtgatgcagac

SEQ ID NO: 48041 - DNA, 20 bp, Chlamydia trachomatis
tgtagagggtgatgcagact

SEQ ID NO: 48042 - DNA, 20 bp, Chlamydia trachomatis
gtagagggtgatgcagactt

SEQ ID NO: 48043 - DNA, 20 bp, Chlamydia trachomatis
gcccgtttgagagggaatga

SEQ ID NO: 48044 - DNA, 20 bp, Chlamydia trachomatis
gagagggaatgaaccttcaa

SEQ ID NO: 48045 - DNA, 20 bp, Chlamydia trachomatis
agagggaatgaaccttcaac

SEQ ID NO: 48046 - DNA, 20 bp, Chlamydia trachomatis
aacttgcgatactgtgatga

SEQ ID NO: 48047 - DNA, 20 bp, Chlamydia trachomatis
cgatactgtgatgatgagtt

SEQ ID NO: 48048 - DNA, 20 bp, Chlamydia trachomatis
cgaaaggtgtgtacattatc

SEQ ID NO: 48049 - DNA, 20 bp, Chlamydia trachomatis
tcaacgtaggagttgggaag

SEQ ID NO: 48050 - DNA, 20 bp, Chlamydia trachomatis
ccaactcctacgttgataat

SEQ ID NO: 48051 - DNA, 20 bp, Chlamydia trachomatis
ataatgtacacacctttcgc

SEQ ID NO: 48052 - DNA, 20 bp, Chlamydia trachomatis
cgcaagcatttgcaggcctg

SEQ ID NO: 48053 - DNA, 20 bp, Chlamydia trachomatis
aagaaggaatgggacatgtg

SEQ ID NO: 48054 - DNA, 20 bp, Chlamydia trachomatis
tcgggggcataaaggagaac

SEQ ID NO: 48055 - DNA, 20 bp, Chlamydia trachomatis
cgggggcataaaggagaacc

SEQ ID NO: 48056 - DNA, 20 bp, Chlamydia trachomatis
gggggcataaaggagaacct

SEQ ID NO: 48057 - DNA, 20 bp, Chlamydia trachomatis
tctcagtatatcgcgtattc

SEQ ID NO: 48058 - DNA, 20 bp, Chlamydia trachomatis
gagagcggttgagtgctatt

SEQ ID NO: 48059 - DNA, 20 bp, Chlamydia trachomatis
agtgctatttcggataagca

SEQ ID NO: 48060 - DNA, 20 bp, Chlamydia trachomatis
cggataagcaatggttggct

SEQ ID NO: 48061 - DNA, 20 bp, Chlamydia trachomatis
ggataagcaatggttggcta

SEQ ID NO: 48062 - DNA, 20 bp, Chlamydia trachomatis
gctattagctcccaggttac

SEQ ID NO: 48063 - DNA, 20 bp, Chlamydia trachomatis
ccatggaagaggtagcaaag

SEQ ID NO: 48064 - DNA, 20 bp, Chlamydia trachomatis
catggaagaggtagcaaagg

SEQ ID NO: 48065 - DNA, 20 bp, Chlamydia trachomatis
ctcgcttaacagaagaggat

SEQ ID NO: 48066 - DNA, 20 bp, Chlamydia trachomatis
tcgcttaacagaagaggata

SEQ ID NO: 48067 - DNA, 20 bp, Chlamydia trachomatis
acagaagaggataagacaaa

SEQ ID NO: 48068 - DNA, 20 bp, Chlamydia trachomatis
ctccgaatgttcgggagact

SEQ ID NO: 48069 - DNA, 20 bp, Chlamydia trachomatis
gggagactcaggaaattgga

SEQ ID NO: 48070 - DNA, 20 bp, Chlamydia trachomatis
gatagcaaaaccgctttcct

SEQ ID NO: 48071 - DNA, 20 bp, Chlamydia trachomatis
cctgtgtgtaatcataacgc

SEQ ID NO: 48072 - DNA, 20 bp, Chlamydia trachomatis
ctgtgtgtaatcataacgct

SEQ ID NO: 48073 - DNA, 20 bp, Chlamydia trachomatis
cccaaatccattatcacaca

SEQ ID NO: 48074 - DNA, 20 bp, Chlamydia trachomatis
ccaaatccattatcacacac

SEQ ID NO: 48075 - DNA, 20 bp, Chlamydia trachomatis
tcacacacaactagaacgct

SEQ ID NO: 48076 - DNA, 20 bp, Chlamydia trachomatis
gatcttcagttacaacttga

SEQ ID NO: 48077 - DNA, 20 bp, Chlamydia trachomatis
atcttcagttacaacttgac

SEQ ID NO: 48078 - DNA, 20 bp, Chlamydia trachomatis
tccgaaatagaaatacctcc

SEQ ID NO: 48079 - DNA, 20 bp, Chlamydia trachomatis
caatatgcgaacaacgacct

SEQ ID NO: 48080 - DNA, 20 bp, Chlamydia trachomatis
cctcatcgatactgttatcc

SEQ ID NO: 48081 - DNA, 20 bp, Chlamydia trachomatis
ttgtaccgaggtcgttgttc

SEQ ID NO: 48082 - DNA, 20 bp, Chlamydia trachomatis
tgtaccgaggtcgttgttcg

SEQ ID NO: 48083 - DNA, 20 bp, Chlamydia trachomatis
taaacaaagaagctcttgcc

SEQ ID NO: 48084 - DNA, 20 bp, Chlamydia trachomatis
aaacaaagaagctcttgcct

SEQ ID NO: 48085 - DNA, 20 bp, Chlamydia trachomatis
aacaaagaagctcttgcctc

SEQ ID NO: 48086 - DNA, 20 bp, Chlamydia trachomatis
cctccttggcttttgttaaa

SEQ ID NO: 48087 - DNA, 20 bp, Chlamydia trachomatis
gcttttgttaaacctgcaaa

SEQ ID NO: 48088 - DNA, 20 bp, Chlamydia trachomatis
ctctactccgtgaagctgac

SEQ ID NO: 48089 - DNA, 20 bp, Chlamydia trachomatis
tctactccgtgaagctgact

SEQ ID NO: 48090 - DNA, 20 bp, Chlamydia trachomatis
gccgatctttatgtagtagc

SEQ ID NO: 48091 - DNA, 20 bp, Chlamydia trachomatis
atgtagtagcccctttagaa

SEQ ID NO: 48092 - DNA, 20 bp, Chlamydia trachomatis
tgtagtagcccctttagaag

SEQ ID NO: 48093 - DNA, 20 bp, Chlamydia trachomatis
ccttttcttcttgctgcact

SEQ ID NO: 48094 - DNA, 20 bp, Chlamydia trachomatis
cttttcttcttgctgcactt

SEQ ID NO: 48095 - DNA, 20 bp, Chlamydia trachomatis
tcttcttgctgcacttaaca

SEQ ID NO: 48096 - DNA, 20 bp, Chlamydia trachomatis
cttcttgctgcacttaacac

SEQ ID NO: 48097 - DNA, 20 bp, Chlamydia trachomatis
ttcttgctgcacttaacacc

SEQ ID NO: 48098 - DNA, 20 bp, Chlamydia trachomatis
tcaatacactgaaaaagaca

SEQ ID NO: 48099 - DNA, 20 bp, Chlamydia trachomatis
actgaacactctagctgccc

SEQ ID NO: 48100 - DNA, 20 bp, Chlamydia trachomatis
ctgaacactctagctgccct

SEQ ID NO: 48101 - DNA, 20 bp, Chlamydia trachomatis
agtaaagcttgtgcagcttg

SEQ ID NO: 48102 - DNA, 20 bp, Chlamydia trachomatis
tgcagcttgtgtgtcttttg

SEQ ID NO: 48103 - DNA, 20 bp, Chlamydia trachomatis
ctgtcagcgaacggttcttc

SEQ ID NO: 48104 - DNA, 20 bp, Chlamydia trachomatis
ttcttaggaggtgaaaccac

SEQ ID NO: 48105 - DNA, 20 bp, Chlamydia trachomatis
ttaggaggtgaaaccactgt

SEQ ID NO: 48106 - DNA, 20 bp, Chlamydia trachomatis
ggaggtgaaaccactgttcg

SEQ ID NO: 48107 - DNA, 20 bp, Chlamydia trachomatis
gcggttacaaaccttttatt

SEQ ID NO: 48108 - DNA, 20 bp, Chlamydia trachomatis
gtaaagctgaacaggatgtc

SEQ ID NO: 48109 - DNA, 20 bp, Chlamydia trachomatis
ggcctccaccattcggaaaa

SEQ ID NO: 48110 - DNA, 20 bp, Chlamydia trachomatis
gcctccaccattcggaaaaa

SEQ ID NO: 48111 - DNA, 20 bp, Chlamydia trachomatis
ggaaaaatcactccccaagg

SEQ ID NO: 48112 - DNA, 20 bp, Chlamydia trachomatis
gggagtgatttttccgaatg

SEQ ID NO: 48113 - DNA, 20 bp, Chlamydia trachomatis
cttagaacaacttcaaaatt

SEQ ID NO: 48114 - DNA, 20 bp, Chlamydia trachomatis
gaacaacttcaaaattttgt

SEQ ID NO: 48115 - DNA, 20 bp, Chlamydia trachomatis
aaaattttgtaactactccg

SEQ ID NO: 48116 - DNA, 20 bp, Chlamydia trachomatis
tgtaactactccgataaccg

SEQ ID NO: 48117 - DNA, 20 bp, Chlamydia trachomatis
gtaactactccgataaccga

SEQ ID NO: 48118 - DNA, 20 bp, Chlamydia trachomatis
ctctaaattatctgcttccc

SEQ ID NO: 48119 - DNA, 20 bp, Chlamydia trachomatis
tctgcttcccaagtagcgaa

SEQ ID NO: 48120 - DNA, 20 bp, Chlamydia trachomatis
ccaagtagcgaaaaatccaa

SEQ ID NO: 48121 - DNA, 20 bp, Chlamydia trachomatis
tatagctgttggatttttcg

SEQ ID NO: 48122 - DNA, 20 bp, Chlamydia trachomatis
gatttttcgctacttgggaa

SEQ ID NO: 48123 - DNA, 20 bp, Chlamydia trachomatis
tggatcaacaatcaaccttt

SEQ ID NO: 48124 - DNA, 20 bp, Chlamydia trachomatis
gatcgctatcttaggtatct

SEQ ID NO: 48125 - DNA, 20 bp, Chlamydia trachomatis
atcgctatcttaggtatctg

SEQ ID NO: 48126 - DNA, 20 bp, Chlamydia trachomatis
ggtatctgctcagctcttgc

SEQ ID NO: 48127 - DNA, 20 bp, Chlamydia trachomatis
cggttacgactacggtgact

SEQ ID NO: 48128 - DNA, 20 bp, Chlamydia trachomatis
acaggaattgatatttccaa

SEQ ID NO: 48129 - DNA, 20 bp, Chlamydia trachomatis
atatttccaaacccacaaca

SEQ ID NO: 48130 - DNA, 20 bp, Chlamydia trachomatis
ccaaacccacaacatctaaa

SEQ ID NO: 48131 - DNA, 20 bp, Chlamydia trachomatis
caaacccacaacatctaaac

SEQ ID NO: 48132 - DNA, 20 bp, Chlamydia trachomatis
gtcacgaatatagccactga

SEQ ID NO: 48133 - DNA, 20 bp, Chlamydia trachomatis
taaatccacatcccctttag

SEQ ID NO: 48134 - DNA, 20 bp, Chlamydia trachomatis
agaacattgaagatcctcta

SEQ ID NO: 48135 - DNA, 20 bp, Chlamydia trachomatis
gaacattgaagatcctctaa

SEQ ID NO: 48136 - DNA, 20 bp, Chlamydia trachomatis
aagatcctctaaatttgaac

SEQ ID NO: 48137 - DNA, 20 bp, Chlamydia trachomatis
gaacctccgataaaaatgta

SEQ ID NO: 48138 - DNA, 20 bp, Chlamydia trachomatis
cttctttaagagataagcaa

SEQ ID NO: 48139 - DNA, 20 bp, Chlamydia trachomatis
tttaagagataagcaacaac

SEQ ID NO: 48140 - DNA, 20 bp, Chlamydia trachomatis
aagagataagcaacaaccga

SEQ ID NO: 48141 - DNA, 20 bp, Chlamydia trachomatis
agagataagcaacaaccgag

SEQ ID NO: 48142 - DNA, 20 bp, Chlamydia trachomatis
tacgcacaatgaacccagaa

SEQ ID NO: 48143 - DNA, 20 bp, Chlamydia trachomatis
gcaacaacggtatcgacagt

SEQ ID NO: 48144 - DNA, 20 bp, Chlamydia trachomatis
ccagaagaaatcacccatgt

SEQ ID NO: 48145 - DNA, 20 bp, Chlamydia trachomatis
cttcctcaaaacaagagaaa

SEQ ID NO: 48146 - DNA, 20 bp, Chlamydia trachomatis
ctcaaaacaagagaaaggca

SEQ ID NO: 48147 - DNA, 20 bp, Chlamydia trachomatis
tgatcacaagattatggtgc

SEQ ID NO: 48148 - DNA, 20 bp, Chlamydia trachomatis
tagaggcagcagttcttcag

SEQ ID NO: 48149 - DNA, 20 bp, Chlamydia trachomatis
agaggcagcagttcttcaga

SEQ ID NO: 48150 - DNA, 20 bp, Chlamydia trachomatis
gaggcagcagttcttcagaa

SEQ ID NO: 48151 - DNA, 20 bp, Chlamydia trachomatis
ttcagaaccctgacggattg

SEQ ID NO: 48152 - DNA, 20 bp, Chlamydia trachomatis
agaaccctgacggattgtcg

SEQ ID NO: 48153 - DNA, 20 bp, Chlamydia trachomatis
ctaacttatcaaacagccct

SEQ ID NO: 48154 - DNA, 20 bp, Chlamydia trachomatis
taacttatcaaacagccctt

SEQ ID NO: 48155 - DNA, 20 bp, Chlamydia trachomatis
tcaaacagcccttcttttac

SEQ ID NO: 48156 - DNA, 20 bp, Chlamydia trachomatis
ttttaccagggctgcatcgt

SEQ ID NO: 48157 - DNA, 20 bp, Chlamydia trachomatis
taccagggctgcatcgtctc

SEQ ID NO: 48158 - DNA, 20 bp, Chlamydia trachomatis
aatagcctctgcagccttat

SEQ ID NO: 48159 - DNA, 20 bp, Chlamydia trachomatis
tctccagcagcaaaaactaa

SEQ ID NO: 48160 - DNA, 20 bp, Chlamydia trachomatis
gcaaaactttacctgtaccg

SEQ ID NO: 48161 - DNA, 20 bp, Chlamydia trachomatis
tgcgaattttagtttttgct

SEQ ID NO: 48162 - DNA, 20 bp, Chlamydia trachomatis
gcgaattttagtttttgctg

SEQ ID NO: 48163 - DNA, 20 bp, Chlamydia trachomatis
cctcaggcagagttaccaca

SEQ ID NO: 48164 - DNA, 20 bp, Chlamydia trachomatis
ccacacctgtgacgtctgtt

SEQ ID NO: 48165 - DNA, 20 bp, Chlamydia trachomatis
tacggaagaagaattgaggt

SEQ ID NO: 48166 - DNA, 20 bp, Chlamydia trachomatis
aggtctatatcctgtgaaga

SEQ ID NO: 48167 - DNA, 20 bp, Chlamydia trachomatis
cttcacaggatatagacctc

SEQ ID NO: 48168 - DNA, 20 bp, Chlamydia trachomatis
ctctttccacatcgttctta

SEQ ID NO: 48169 - DNA, 20 bp, Chlamydia trachomatis
ccacatcgttcttaccaata

SEQ ID NO: 48170 - DNA, 20 bp, Chlamydia trachomatis
cacatcgttcttaccaatac

SEQ ID NO: 48171 - DNA, 20 bp, Chlamydia trachomatis
ttaccaatacctctgaggag

SEQ ID NO: 48172 - DNA, 20 bp, Chlamydia trachomatis
ccaatacctctgaggagcaa

SEQ ID NO: 48173 - DNA, 20 bp, Chlamydia trachomatis
ctctgcccgaagaaatggaa

SEQ ID NO: 48174 - DNA, 20 bp, Chlamydia trachomatis
tctgcccgaagaaatggaac

SEQ ID NO: 48175 - DNA, 20 bp, Chlamydia trachomatis
ggcaagaaaccacaagtagt

SEQ ID NO: 48176 - DNA, 20 bp, Chlamydia trachomatis
ctatgctcgacaataaaatt

SEQ ID NO: 48177 - DNA, 20 bp, Chlamydia trachomatis
gttgagctgagcaattttat

SEQ ID NO: 48178 - DNA, 20 bp, Chlamydia trachomatis
cggaacgcacccccattctt

SEQ ID NO: 48179 - DNA, 20 bp, Chlamydia trachomatis
tttacggaggatctgtgaaa

SEQ ID NO: 48180 - DNA, 20 bp, Chlamydia trachomatis
acggaggatctgtgaaagcc

SEQ ID NO: 48181 - DNA, 20 bp, Chlamydia trachomatis
cggaggatctgtgaaagccg

SEQ ID NO: 48182 - DNA, 20 bp, Chlamydia trachomatis
ccctctgccctgatgttaat

SEQ ID NO: 48183 - DNA, 20 bp, Chlamydia trachomatis
cataacctgtccttcctgtt

SEQ ID NO: 48184 - DNA, 20 bp, Chlamydia trachomatis
ctgtttagggaaacgattcc

SEQ ID NO: 48185 - DNA, 20 bp, Chlamydia trachomatis
agggaaacgattcctccctc

SEQ ID NO: 48186 - DNA, 20 bp, Chlamydia trachomatis
gggaaacgattcctccctca

SEQ ID NO: 48187 - DNA, 20 bp, Chlamydia trachomatis
taatacttgagggaggaatc

SEQ ID NO: 48188 - DNA, 20 bp, Chlamydia trachomatis
tcgcgatagaaaaaacgagc

SEQ ID NO: 48189 - DNA, 20 bp, Chlamydia trachomatis
caatcattctgtggcttctg

SEQ ID NO: 48190 - DNA, 20 bp, Chlamydia trachomatis
tgtggcttctgcattagaaa

SEQ ID NO: 48191 - DNA, 20 bp, Chlamydia trachomatis
tgcattagaaatctcagaaa

SEQ ID NO: 48192 - DNA, 20 bp, Chlamydia trachomatis
gaaatctcagaaatgctaga

SEQ ID NO: 48193 - DNA, 20 bp, Chlamydia trachomatis
cgaagaaacaccacaacttt

SEQ ID NO: 48194 - DNA, 20 bp, Chlamydia trachomatis
ctgtctcagtatccacttct

SEQ ID NO: 48195 - DNA, 20 bp, Chlamydia trachomatis
tgtctcagtatccacttcta

SEQ ID NO: 48196 - DNA, 20 bp, Chlamydia trachomatis
tacgatccaaattgagaacc

SEQ ID NO: 48197 - DNA, 20 bp, Chlamydia trachomatis
agaaccttgctttcccttta

SEQ ID NO: 48198 - DNA, 20 bp, Chlamydia trachomatis
tgccgcctcctcgaaggaca

SEQ ID NO: 48199 - DNA, 20 bp, Chlamydia trachomatis
gccgcctcctcgaaggacag

SEQ ID NO: 48200 - DNA, 20 bp, Chlamydia trachomatis
ccgcctcctcgaaggacagc

SEQ ID NO: 48201 - DNA, 20 bp, Chlamydia trachomatis
ttactagctccttgtcgaga

SEQ ID NO: 48202 - DNA, 20 bp, Chlamydia trachomatis
ctagctccttgtcgagaact

SEQ ID NO: 48203 - DNA, 20 bp, Chlamydia trachomatis
ttcaaagaattggctaacag

SEQ ID NO: 48204 - DNA, 20 bp, Chlamydia trachomatis
tcaaagaattggctaacagc

SEQ ID NO: 48205 - DNA, 20 bp, Chlamydia trachomatis
caaagaattggctaacagct

SEQ ID NO: 48206 - DNA, 20 bp, Chlamydia trachomatis
aaagaattggctaacagctt

SEQ ID NO: 48207 - DNA, 20 bp, Chlamydia trachomatis
gctaacagcttgcgtctttg

SEQ ID NO: 48208 - DNA, 20 bp, Chlamydia trachomatis
cttcggatcttccaaactta

SEQ ID NO: 48209 - DNA, 20 bp, Chlamydia trachomatis
ggatcttccaaacttaccat

SEQ ID NO: 48210 - DNA, 20 bp, Chlamydia trachomatis
tatggtaagtttggaagatc

SEQ ID NO: 48211 - DNA, 20 bp, Chlamydia trachomatis
ggaagatccgaagcaagatc

SEQ ID NO: 48212 - DNA, 20 bp, Chlamydia trachomatis
gaagatccgaagcaagatcg

SEQ ID NO: 48213 - DNA, 20 bp, Chlamydia trachomatis
tgtgtagagcctcaaagact

SEQ ID NO: 48214 - DNA, 20 bp, Chlamydia trachomatis
gctcccactaatgcaactaa

SEQ ID NO: 48215 - DNA, 20 bp, Chlamydia trachomatis
tgaggggcctttatctttag

SEQ ID NO: 48216 - DNA, 20 bp, Chlamydia trachomatis
atctttagttgcattagtgg

SEQ ID NO: 48217 - DNA, 20 bp, Chlamydia trachomatis
tctttagttgcattagtggg

SEQ ID NO: 48218 - DNA, 20 bp, Chlamydia trachomatis
tagcgaggtctgagatcttc

SEQ ID NO: 48219 - DNA, 20 bp, Chlamydia trachomatis
ttgaaaacccctttcccaaa

SEQ ID NO: 48220 - DNA, 20 bp, Chlamydia trachomatis
aaaacccctttcccaaaaaa

SEQ ID NO: 48221 - DNA, 20 bp, Chlamydia trachomatis
cccaaaaaacagtgaggacg

SEQ ID NO: 48222 - DNA, 20 bp, Chlamydia trachomatis
ccaaaaaacagtgaggacga

SEQ ID NO: 48223 - DNA, 20 bp, Chlamydia trachomatis
ttaacgtggtaactccaccg

SEQ ID NO: 48224 - DNA, 20 bp, Chlamydia trachomatis
acgtggtaactccaccgaca

SEQ ID NO: 48225 - DNA, 20 bp, Chlamydia trachomatis
ctgaaaaagcaatcgctaaa

SEQ ID NO: 48226 - DNA, 20 bp, Chlamydia trachomatis
cggaactccaggagctagta

SEQ ID NO: 48227 - DNA, 20 bp, Chlamydia trachomatis
cgcaatcgattgttttagcg

SEQ ID NO: 48228 - DNA, 20 bp, Chlamydia trachomatis
gacactaccaagcagatttt

SEQ ID NO: 48229 - DNA, 20 bp, Chlamydia trachomatis
tcctttgcggtcttccttct

SEQ ID NO: 48230 - DNA, 20 bp, Chlamydia trachomatis
cctttgcggtcttccttctg

SEQ ID NO: 48231 - DNA, 20 bp, Chlamydia trachomatis
ctttgcggtcttccttctgt

SEQ ID NO: 48232 - DNA, 20 bp, Chlamydia trachomatis
gcggtcttccttctgtaggt

SEQ ID NO: 48233 - DNA, 20 bp, Chlamydia trachomatis
ggttttactgactgctctgc

SEQ ID NO: 48234 - DNA, 20 bp, Chlamydia trachomatis
tactgactgctctgctctcc

SEQ ID NO: 48235 - DNA, 20 bp, Chlamydia trachomatis
actgactgctctgctctccc

SEQ ID NO: 48236 - DNA, 20 bp, Chlamydia trachomatis
ctgactgctctgctctccct

SEQ ID NO: 48237 - DNA, 20 bp, Chlamydia trachomatis
cttttacgactaccatgcag

SEQ ID NO: 48238 - DNA, 20 bp, Chlamydia trachomatis
ttctttagaagatctcttct

SEQ ID NO: 48239 - DNA, 20 bp, Chlamydia trachomatis
tctttagaagatctcttctc

SEQ ID NO: 48240 - DNA, 20 bp, Chlamydia trachomatis
ctttagaagatctcttctct

SEQ ID NO: 48241 - DNA, 20 bp, Chlamydia trachomatis
tttagaagatctcttctctc

SEQ ID NO: 48242 - DNA, 20 bp, Chlamydia trachomatis
agaagatctcttctctccat

SEQ ID NO: 48243 - DNA, 20 bp, Chlamydia trachomatis
ttgctttgctgtactgagct

SEQ ID NO: 48244 - DNA, 20 bp, Chlamydia trachomatis
tgctttgctgtactgagctg

SEQ ID NO: 48245 - DNA, 20 bp, Chlamydia trachomatis
gctttgctgtactgagctgc

SEQ ID NO: 48246 - DNA, 20 bp, Chlamydia trachomatis
ctttgctgtactgagctgca

SEQ ID NO: 48247 - DNA, 20 bp, Chlamydia trachomatis
gctgtactgagctgcaacta

SEQ ID NO: 48248 - DNA, 20 bp, Chlamydia trachomatis
ctcctcccaaagagaagaaa

SEQ ID NO: 48249 - DNA, 20 bp, Chlamydia trachomatis
tcctcccaaagagaagaaat

SEQ ID NO: 48250 - DNA, 20 bp, Chlamydia trachomatis
tcctgccatgctaacggacg

SEQ ID NO: 48251 - DNA, 20 bp, Chlamydia trachomatis
ccttttccatgacttgtttc

SEQ ID NO: 48252 - DNA, 20 bp, Chlamydia trachomatis
cttttccatgacttgtttca

SEQ ID NO: 48253 - DNA, 20 bp, Chlamydia trachomatis
gtacgcttctcttccttagg

SEQ ID NO: 48254 - DNA, 20 bp, Chlamydia trachomatis
tacgcttctcttccttaggg

SEQ ID NO: 48255 - DNA, 20 bp, Chlamydia trachomatis
tcttccttagggaaacgtga

SEQ ID NO: 48256 - DNA, 20 bp, Chlamydia trachomatis
cttagggaaacgtgaagaca

SEQ ID NO: 48257 - DNA, 20 bp, Chlamydia trachomatis
gggaaacgtgaagacatatt

SEQ ID NO: 48258 - DNA, 20 bp, Chlamydia trachomatis
cctggaaaagtcatccctat

SEQ ID NO: 48259 - DNA, 20 bp, Chlamydia trachomatis
agccctttctgacaatctgt

SEQ ID NO: 48260 - DNA, 20 bp, Chlamydia trachomatis
ctgacaatctgtgcagctta

SEQ ID NO: 48261 - DNA, 20 bp, Chlamydia trachomatis
tgacaatctgtgcagcttaa

SEQ ID NO: 48262 - DNA, 20 bp, Chlamydia trachomatis
aaacctaatgtggatcgctt

SEQ ID NO: 48263 - DNA, 20 bp, Chlamydia trachomatis
ctgagcatttgcgtcctgga

SEQ ID NO: 48264 - DNA, 20 bp, Chlamydia trachomatis
gcgtcctggagctgttattt

SEQ ID NO: 48265 - DNA, 20 bp, Chlamydia trachomatis
cgtcctggagctgttatttc

SEQ ID NO: 48266 - DNA, 20 bp, Chlamydia trachomatis
tttctgtgcaactggcttct

SEQ ID NO: 48267 - DNA, 20 bp, Chlamydia trachomatis
ctgtgcaactggcttctgtc

SEQ ID NO: 48268 - DNA, 20 bp, Chlamydia trachomatis
tttcttactatatttccctt

SEQ ID NO: 48269 - DNA, 20 bp, Chlamydia trachomatis
ttcttactatatttcccttt

SEQ ID NO: 48270 - DNA, 20 bp, Chlamydia trachomatis
tcttactatatttccctttg

SEQ ID NO: 48271 - DNA, 20 bp, Chlamydia trachomatis
cttactatatttccctttgt

SEQ ID NO: 48272 - DNA, 20 bp, Chlamydia trachomatis
ttactatatttccctttgta

SEQ ID NO: 48273 - DNA, 20 bp, Chlamydia trachomatis
ttcagaatgtcggtttaacc

SEQ ID NO: 48274 - DNA, 20 bp, Chlamydia trachomatis
agaatgtcggtttaacccat

SEQ ID NO: 48275 - DNA, 20 bp, Chlamydia trachomatis
aacccatgtctggggacccc

SEQ ID NO: 48276 - DNA, 20 bp, Chlamydia trachomatis
acccatgtctggggacccct

SEQ ID NO: 48277 - DNA, 20 bp, Chlamydia trachomatis
ctgtcaattctacattatgt

SEQ ID NO: 48278 - DNA, 20 bp, Chlamydia trachomatis
tacaacagaaactcttactt

SEQ ID NO: 48279 - DNA, 20 bp, Chlamydia trachomatis
aagtaagagtttctgttgta

SEQ ID NO: 48280 - DNA, 20 bp, Chlamydia trachomatis
ctgttgtagaaccagcttct

SEQ ID NO: 48281 - DNA, 20 bp, Chlamydia trachomatis
tgttgtagaaccagcttctg

SEQ ID NO: 48282 - DNA, 20 bp, Chlamydia trachomatis
tagaaccagcttctggctca

SEQ ID NO: 48283 - DNA, 20 bp, Chlamydia trachomatis
ggttattttatgacacgaat

SEQ ID NO: 48284 - DNA, 20 bp, Chlamydia trachomatis
ttttatgacacgaatgagta

SEQ ID NO: 48285 - DNA, 20 bp, Chlamydia trachomatis
tatgacacgaatgagtaaac

SEQ ID NO: 48286 - DNA, 20 bp, Chlamydia trachomatis
atgacacgaatgagtaaaca

SEQ ID NO: 48287 - DNA, 20 bp, Chlamydia trachomatis
tgacacgaatgagtaaacaa

SEQ ID NO: 48288 - DNA, 20 bp, Chlamydia trachomatis
gtgatgactgcgcgttaaac

SEQ ID NO: 48289 - DNA, 20 bp, Chlamydia trachomatis
aacttttttgcaacatcctc

SEQ ID NO: 48290 - DNA, 20 bp, Chlamydia trachomatis
tttgcaacatcctctttcga

SEQ ID NO: 48291 - DNA, 20 bp, Chlamydia trachomatis
ttgcaacatcctctttcgaa

SEQ ID NO: 48292 - DNA, 20 bp, Chlamydia trachomatis
tgcaacatcctctttcgaaa

SEQ ID NO: 48293 - DNA, 20 bp, Chlamydia trachomatis
aggaattacccctccgacga

SEQ ID NO: 48294 - DNA, 20 bp, Chlamydia trachomatis
ggaattacccctccgacgat

SEQ ID NO: 48295 - DNA, 20 bp, Chlamydia trachomatis
cccctccgacgatcttactg

SEQ ID NO: 48296 - DNA, 20 bp, Chlamydia trachomatis
ctgacaacctcgtttccttt

SEQ ID NO: 48297 - DNA, 20 bp, Chlamydia trachomatis
ccttttccaggttcatttgg

SEQ ID NO: 48298 - DNA, 20 bp, Chlamydia trachomatis
actttgactgtatacattct

SEQ ID NO: 48299 - DNA, 20 bp, Chlamydia trachomatis
gactgtatacattctgccaa

SEQ ID NO: 48300 - DNA, 20 bp, Chlamydia trachomatis
actgtatacattctgccaaa

SEQ ID NO: 48301 - DNA, 20 bp, Chlamydia trachomatis
tgccaaagcaagaatcctgt

SEQ ID NO: 48302 - DNA, 20 bp, Chlamydia trachomatis
aggtcctgtagctttagact

SEQ ID NO: 48303 - DNA, 20 bp, Chlamydia trachomatis
gttgcacccaattcattgac

SEQ ID NO: 48304 - DNA, 20 bp, Chlamydia trachomatis
cacccaattcattgactgta

SEQ ID NO: 48305 - DNA, 20 bp, Chlamydia trachomatis
ggtgcaacgaatagtgcctt

SEQ ID NO: 48306 - DNA, 20 bp, Chlamydia trachomatis
attgatcgttttgctaggga

SEQ ID NO: 48307 - DNA, 20 bp, Chlamydia trachomatis
atcgttttgctagggatttc

SEQ ID NO: 48308 - DNA, 20 bp, Chlamydia trachomatis
cctgtagaatagcgacacga

SEQ ID NO: 48309 - DNA, 20 bp, Chlamydia trachomatis
gcactcaaacactcgtgaaa

SEQ ID NO: 48310 - DNA, 20 bp, Chlamydia trachomatis
ttaccaaacctttcaaatac

SEQ ID NO: 48311 - DNA, 20 bp, Chlamydia trachomatis
taccaaacctttcaaatacc

SEQ ID NO: 48312 - DNA, 20 bp, Chlamydia trachomatis
accaaacctttcaaataccc

SEQ ID NO: 48313 - DNA, 20 bp, Chlamydia trachomatis
aagagcagcattcttaataa

SEQ ID NO: 48314 - DNA, 20 bp, Chlamydia trachomatis
ttaataatcgttcgtccttg

SEQ ID NO: 48315 - DNA, 20 bp, Chlamydia trachomatis
ataatcgttcgtccttgagc

SEQ ID NO: 48316 - DNA, 20 bp, Chlamydia trachomatis
gtccttgagcccctacagaa

SEQ ID NO: 48317 - DNA, 20 bp, Chlamydia trachomatis
agcccctacagaagcaagga

SEQ ID NO: 48318 - DNA, 20 bp, Chlamydia trachomatis
caatcacttgcgcttgctga

SEQ ID NO: 48319 - DNA, 20 bp, Chlamydia trachomatis
aatcacttgcgcttgctgat

SEQ ID NO: 48320 - DNA, 20 bp, Chlamydia trachomatis
cgcttgctgatcccactcta

SEQ ID NO: 48321 - DNA, 20 bp, Chlamydia trachomatis
ctgatcccactctacaatcg

SEQ ID NO: 48322 - DNA, 20 bp, Chlamydia trachomatis
ggcaaacggtagatctttgt

SEQ ID NO: 48323 - DNA, 20 bp, Chlamydia trachomatis
ctccataatcaaccaggtag

SEQ ID NO: 48324 - DNA, 20 bp, Chlamydia trachomatis
tccataatcaaccaggtagg

SEQ ID NO: 48325 - DNA, 20 bp, Chlamydia trachomatis
gataaaagcatctaggagct

SEQ ID NO: 48326 - DNA, 20 bp, Chlamydia trachomatis
ataaaagcatctaggagctc

SEQ ID NO: 48327 - DNA, 20 bp, Chlamydia trachomatis
tatcaaagcctacctggttg

SEQ ID NO: 48328 - DNA, 20 bp, Chlamydia trachomatis
gttagaatctgagtttttcg

SEQ ID NO: 48329 - DNA, 20 bp, Chlamydia trachomatis
ttagaatctgagtttttcgg

SEQ ID NO: 48330 - DNA, 20 bp, Chlamydia trachomatis
gaatctgagtttttcgggca

SEQ ID NO: 48331 - DNA, 20 bp, Chlamydia trachomatis
ttcgggcacgaaaaaggagc

SEQ ID NO: 48332 - DNA, 20 bp, Chlamydia trachomatis
tcgggcacgaaaaaggagct

SEQ ID NO: 48333 - DNA, 20 bp, Chlamydia trachomatis
acaatcacgcaccataatac

SEQ ID NO: 48334 - DNA, 20 bp, Chlamydia trachomatis
acacggatttgtcagtattt

SEQ ID NO: 48335 - DNA, 20 bp, Chlamydia trachomatis
cacggatttgtcagtatttg

SEQ ID NO: 48336 - DNA, 20 bp, Chlamydia trachomatis
gtcagtatttgcttacagag

SEQ ID NO: 48337 - DNA, 20 bp, Chlamydia trachomatis
tcagtatttgcttacagaga

SEQ ID NO: 48338 - DNA, 20 bp, Chlamydia trachomatis
gtaacctgctccaaaggaac

SEQ ID NO: 48339 - DNA, 20 bp, Chlamydia trachomatis
aacacttgcgaagcggtgaa

SEQ ID NO: 48340 - DNA, 20 bp, Chlamydia trachomatis
cgaagcggtgaatgcatgaa

SEQ ID NO: 48341 - DNA, 20 bp, Chlamydia trachomatis
taattctggcgaggatattc

SEQ ID NO: 48342 - DNA, 20 bp, Chlamydia trachomatis
aattctggcgaggatattca

SEQ ID NO: 48343 - DNA, 20 bp, Chlamydia trachomatis
acaagaagttctagcacgca

SEQ ID NO: 48344 - DNA, 20 bp, Chlamydia trachomatis
caagaagttctagcacgcac

SEQ ID NO: 48345 - DNA, 20 bp, Chlamydia trachomatis
tagcacgcacgactggaaaa

SEQ ID NO: 48346 - DNA, 20 bp, Chlamydia trachomatis
tatgttaaagttctaaaaaa

SEQ ID NO: 48347 - DNA, 20 bp, Chlamydia trachomatis
tttttagaactttaacatac

SEQ ID NO: 48348 - DNA, 20 bp, Chlamydia trachomatis
ctattgcttcaagcatttta

SEQ ID NO: 48349 - DNA, 20 bp, Chlamydia trachomatis
cttcaagcattttactatgc

SEQ ID NO: 48350 - DNA, 20 bp, Chlamydia trachomatis
aagcattttactatgctcga

SEQ ID NO: 48351 - DNA, 20 bp, Chlamydia trachomatis
tactatgctcgatatcaacg

SEQ ID NO: 48352 - DNA, 20 bp, Chlamydia trachomatis
actatgctcgatatcaacgt

SEQ ID NO: 48353 - DNA, 20 bp, Chlamydia trachomatis
ccctttacgttttaaatatc

SEQ ID NO: 48354 - DNA, 20 bp, Chlamydia trachomatis
cctttacgttttaaatatct

SEQ ID NO: 48355 - DNA, 20 bp, Chlamydia trachomatis
acgttttaaatatctgttga

SEQ ID NO: 48356 - DNA, 20 bp, Chlamydia trachomatis
cgttttaaatatctgttgat

SEQ ID NO: 48357 - DNA, 20 bp, Chlamydia trachomatis
taaatatctgttgatagcaa

SEQ ID NO: 48358 - DNA, 20 bp, Chlamydia trachomatis
ttataccattccgaccgagc

SEQ ID NO: 48359 - DNA, 20 bp, Chlamydia trachomatis
taccattccgaccgagcaat

SEQ ID NO: 48360 - DNA, 20 bp, Chlamydia trachomatis
cgaccgagcaatctcagctc

SEQ ID NO: 48361 - DNA, 20 bp, Chlamydia trachomatis
ctggtcgtttagctggagct

SEQ ID NO: 48362 - DNA, 20 bp, Chlamydia trachomatis
tggtcgtttagctggagctg

SEQ ID NO: 48363 - DNA, 20 bp, Chlamydia trachomatis
tatattttcattggactctg

SEQ ID NO: 48364 - DNA, 20 bp, Chlamydia trachomatis
atattttcattggactctgc

SEQ ID NO: 48365 - DNA, 20 bp, Chlamydia trachomatis
tattttcattggactctgca

SEQ ID NO: 48366 - DNA, 20 bp, Chlamydia trachomatis
tcattggactctgcatttgc

SEQ ID NO: 48367 - DNA, 20 bp, Chlamydia trachomatis
cattggactctgcatttgca

SEQ ID NO: 48368 - DNA, 20 bp, Chlamydia trachomatis
tgattggagttttcttctcc

SEQ ID NO: 48369 - DNA, 20 bp, Chlamydia trachomatis
gattggagttttcttctcca

SEQ ID NO: 48370 - DNA, 20 bp, Chlamydia trachomatis
attggagttttcttctccaa

SEQ ID NO: 48371 - DNA, 20 bp, Chlamydia trachomatis
gagttttcttctccaaagcg

SEQ ID NO: 48372 - DNA, 20 bp, Chlamydia trachomatis
tcttctccaaagcgttcata

SEQ ID NO: 48373 - DNA, 20 bp, Chlamydia trachomatis
ggaccgaaaacaatccctcc

SEQ ID NO: 48374 - DNA, 20 bp, Chlamydia trachomatis
aggagctgccaagcaacctt

SEQ ID NO: 48375 - DNA, 20 bp, Chlamydia trachomatis
acgggcattccccgtccctt

SEQ ID NO: 48376 - DNA, 20 bp, Chlamydia trachomatis
cccgtccctttttgtctaaa

SEQ ID NO: 48377 - DNA, 20 bp, Chlamydia trachomatis
tagacaaaaagggacgggga

SEQ ID NO: 48378 - DNA, 20 bp, Chlamydia trachomatis
taagcgcaaagctcttctct

SEQ ID NO: 48379 - DNA, 20 bp, Chlamydia trachomatis
aagcgcaaagctcttctctg

SEQ ID NO: 48380 - DNA, 20 bp, Chlamydia trachomatis
agcgcaaagctcttctctgg

SEQ ID NO: 48381 - DNA, 20 bp, Chlamydia trachomatis
tctggtctgcttccctaaac

SEQ ID NO: 48382 - DNA, 20 bp, Chlamydia trachomatis
cctaaaccggcgtatttctt

SEQ ID NO: 48383 - DNA, 20 bp, Chlamydia trachomatis
taggacacattgcaaagaaa

SEQ ID NO: 48384 - DNA, 20 bp, Chlamydia trachomatis
caaagaaattccctggggaa

SEQ ID NO: 48385 - DNA, 20 bp, Chlamydia trachomatis
cctggggaagaccctcttac

SEQ ID NO: 48386 - DNA, 20 bp, Chlamydia trachomatis
cgctggttaaagaacgtctc

SEQ ID NO: 48387 - DNA, 20 bp, Chlamydia trachomatis
aagaacgtctcaaattggaa

SEQ ID NO: 48388 - DNA, 20 bp, Chlamydia trachomatis
aaaatgcttttgagatcgga

SEQ ID NO: 48389 - DNA, 20 bp, Chlamydia trachomatis
tgagatcggagtcttgattt

SEQ ID NO: 48390 - DNA, 20 bp, Chlamydia trachomatis
gagatcggagtcttgattta

SEQ ID NO: 48391 - DNA, 20 bp, Chlamydia trachomatis
agatcggagtcttgatttac

SEQ ID NO: 48392 - DNA, 20 bp, Chlamydia trachomatis
atttacctccctttctttgt

SEQ ID NO: 48393 - DNA, 20 bp, Chlamydia trachomatis
gatgggattgctgctacctc

SEQ ID NO: 48394 - DNA, 20 bp, Chlamydia trachomatis
ctgctacctcaggtgataca

SEQ ID NO: 48395 - DNA, 20 bp, Chlamydia trachomatis
tctatatccttcttattaag

SEQ ID NO: 48396 - DNA, 20 bp, Chlamydia trachomatis
ctatatccttcttattaagg

SEQ ID NO: 48397 - DNA, 20 bp, Chlamydia trachomatis
ataagaaggatatagaaaat

SEQ ID NO: 48398 - DNA, 20 bp, Chlamydia trachomatis
ttaataggcccgtttttagc

SEQ ID NO: 48399 - DNA, 20 bp, Chlamydia trachomatis
taataggcccgtttttagcg

SEQ ID NO: 48400 - DNA, 20 bp, Chlamydia trachomatis
aataggcccgtttttagcgt

SEQ ID NO: 48401 - DNA, 20 bp, Chlamydia trachomatis
ataggcccgtttttagcgta

SEQ ID NO: 48402 - DNA, 20 bp, Chlamydia trachomatis
ttagcgtaatagctctgcag

SEQ ID NO: 48403 - DNA, 20 bp, Chlamydia trachomatis
ctacatcgccgatagcttga

SEQ ID NO: 48404 - DNA, 20 bp, Chlamydia trachomatis
atgaagctaaaccaacccga

SEQ ID NO: 48405 - DNA, 20 bp, Chlamydia trachomatis
agattcttcgggttggttta

SEQ ID NO: 48406 - DNA, 20 bp, Chlamydia trachomatis
ttcgggttggtttagcttca

SEQ ID NO: 48407 - DNA, 20 bp, Chlamydia trachomatis
gggttggtttagcttcatca

SEQ ID NO: 48408 - DNA, 20 bp, Chlamydia trachomatis
tcccagacaaagaagctgct

SEQ ID NO: 48409 - DNA, 20 bp, Chlamydia trachomatis
cccagacaaagaagctgctc

SEQ ID NO: 48410 - DNA, 20 bp, Chlamydia trachomatis
ccagacaaagaagctgctct

SEQ ID NO: 48411 - DNA, 20 bp, Chlamydia trachomatis
cctatttttctcaaaatccc

SEQ ID NO: 48412 - DNA, 20 bp, Chlamydia trachomatis
ttctcaaaatccctttaaag

SEQ ID NO: 48413 - DNA, 20 bp, Chlamydia trachomatis
ttttcatcgtgtaatttatg

SEQ ID NO: 48414 - DNA, 20 bp, Chlamydia trachomatis
tcatcgtgtaatttatgtat

SEQ ID NO: 48415 - DNA, 20 bp, Chlamydia trachomatis
catcgtgtaatttatgtatc

SEQ ID NO: 48416 - DNA, 20 bp, Chlamydia trachomatis
atcgtgtaatttatgtatcc

SEQ ID NO: 48417 - DNA, 20 bp, Chlamydia trachomatis
atgtatccgcaactcctgga

SEQ ID NO: 48418 - DNA, 20 bp, Chlamydia trachomatis
gagacgacctatttgtgacg

SEQ ID NO: 48419 - DNA, 20 bp, Chlamydia trachomatis
gtgacgaattctgcattgat

SEQ ID NO: 48420 - DNA, 20 bp, Chlamydia trachomatis
tgacgaattctgcattgatt

SEQ ID NO: 48421 - DNA, 20 bp, Chlamydia trachomatis
tgcattgattgctgaaggaa

SEQ ID NO: 48422 - DNA, 20 bp, Chlamydia trachomatis
attgctgaaggaatcgctca

SEQ ID NO: 48423 - DNA, 20 bp, Chlamydia trachomatis
cggcaatccacttcgatagc

SEQ ID NO: 48424 - DNA, 20 bp, Chlamydia trachomatis
ggcaatccacttcgatagcc

SEQ ID NO: 48425 - DNA, 20 bp, Chlamydia trachomatis
gatagcctggtggaggggcc

SEQ ID NO: 48426 - DNA, 20 bp, Chlamydia trachomatis
cgtaatctatgggattcgga

SEQ ID NO: 48427 - DNA, 20 bp, Chlamydia trachomatis
ggcgttgtatccgaatccca

SEQ ID NO: 48428 - DNA, 20 bp, Chlamydia trachomatis
acgaagaacctgggagacaa

SEQ ID NO: 48429 - DNA, 20 bp, Chlamydia trachomatis
aatggttgtcttgcggtgca

SEQ ID NO: 48430 - DNA, 20 bp, Chlamydia trachomatis
tcttgcggtgcatcttgtct

SEQ ID NO: 48431 - DNA, 20 bp, Chlamydia trachomatis
cggtgcatcttgtctcccag

SEQ ID NO: 48432 - DNA, 20 bp, Chlamydia trachomatis
tctcccaggttcttcgtcaa

SEQ ID NO: 48433 - DNA, 20 bp, Chlamydia trachomatis
cgctcgcaactaacagtcat

SEQ ID NO: 48434 - DNA, 20 bp, Chlamydia trachomatis
cgctgctcttacaagacggt

SEQ ID NO: 48435 - DNA, 20 bp, Chlamydia trachomatis
taagagcagcggaactatat

SEQ ID NO: 48436 - DNA, 20 bp, Chlamydia trachomatis
gggtgttgcgcatggatgac

SEQ ID NO: 48437 - DNA, 20 bp, Chlamydia trachomatis
cgcatggatgactgttagtt

SEQ ID NO: 48438 - DNA, 20 bp, Chlamydia trachomatis
ggacgatccagaacaattaa

SEQ ID NO: 48439 - DNA, 20 bp, Chlamydia trachomatis
attccttcttgctgctcgca

SEQ ID NO: 48440 - DNA, 20 bp, Chlamydia trachomatis
cttcttgctgctcgcagatg

SEQ ID NO: 48441 - DNA, 20 bp, Chlamydia trachomatis
ttgctgctcgcagatgcttt

SEQ ID NO: 48442 - DNA, 20 bp, Chlamydia trachomatis
ctgctcgcagatgcttttac

SEQ ID NO: 48443 - DNA, 20 bp, Chlamydia trachomatis
cctagaagatctagctctaa

SEQ ID NO: 48444 - DNA, 20 bp, Chlamydia trachomatis
ctagaagatctagctctaaa

SEQ ID NO: 48445 - DNA, 20 bp, Chlamydia trachomatis
cgcagatgaaacagcaagtt

SEQ ID NO: 48446 - DNA, 20 bp, Chlamydia trachomatis
ccatgatcgcctcaagctca

SEQ ID NO: 48447 - DNA, 20 bp, Chlamydia trachomatis
actgttatggatcgtcatga

SEQ ID NO: 48448 - DNA, 20 bp, Chlamydia trachomatis
ggcttgaataaagacttctc

SEQ ID NO: 48449 - DNA, 20 bp, Chlamydia trachomatis
gcttgaataaagacttctcg

SEQ ID NO: 48450 - DNA, 20 bp, Chlamydia trachomatis
aataaagacttctcgagctt

SEQ ID NO: 48451 - DNA, 20 bp, Chlamydia trachomatis
tcgagcttgtcccaattgct

SEQ ID NO: 48452 - DNA, 20 bp, Chlamydia trachomatis
tcccaattgctccaccaact

SEQ ID NO: 48453 - DNA, 20 bp, Chlamydia trachomatis
ctttgcagcatctttgactt

SEQ ID NO: 48454 - DNA, 20 bp, Chlamydia trachomatis
gcagcatctttgacttgctg

SEQ ID NO: 48455 - DNA, 20 bp, Chlamydia trachomatis
cagcatctttgacttgctgg

SEQ ID NO: 48456 - DNA, 20 bp, Chlamydia trachomatis
gacttgctggctcaggcttt

SEQ ID NO: 48457 - DNA, 20 bp, Chlamydia trachomatis
acttgctggctcaggctttc

SEQ ID NO: 48458 - DNA, 20 bp, Chlamydia trachomatis
tctcaggacttccttctaat

SEQ ID NO: 48459 - DNA, 20 bp, Chlamydia trachomatis
cttctaatatcatcagcgga

SEQ ID NO: 48460 - DNA, 20 bp, Chlamydia trachomatis
taatatcatcagcggaggac

SEQ ID NO: 48461 - DNA, 20 bp, Chlamydia trachomatis
cccgtacaagcaagtgtgca

SEQ ID NO: 48462 - DNA, 20 bp, Chlamydia trachomatis
ttggtcagattgcacacttg

SEQ ID NO: 48463 - DNA, 20 bp, Chlamydia trachomatis
ttgcaacgatgataccgcag

SEQ ID NO: 48464 - DNA, 20 bp, Chlamydia trachomatis
caacgatgataccgcagcat

SEQ ID NO: 48465 - DNA, 20 bp, Chlamydia trachomatis
accatttgctgctgctcagc

SEQ ID NO: 48466 - DNA, 20 bp, Chlamydia trachomatis
gctgctgctcagctgttaaa

SEQ ID NO: 48467 - DNA, 20 bp, Chlamydia trachomatis
ctgctgctcagctgttaaaa

SEQ ID NO: 48468 - DNA, 20 bp, Chlamydia trachomatis
taggaaacactccgtgctca

SEQ ID NO: 48469 - DNA, 20 bp, Chlamydia trachomatis
aggaaacactccgtgctcat

SEQ ID NO: 48470 - DNA, 20 bp, Chlamydia trachomatis
ggaaacactccgtgctcata

SEQ ID NO: 48471 - DNA, 20 bp, Chlamydia trachomatis
tggtggttatgacgatgggg

SEQ ID NO: 48472 - DNA, 20 bp, Chlamydia trachomatis
tgacgatggggctattgctt

SEQ ID NO: 48473 - DNA, 20 bp, Chlamydia trachomatis
tattcgcacggaatacatca

SEQ ID NO: 48474 - DNA, 20 bp, Chlamydia trachomatis
gcacggaatacatcagatac

SEQ ID NO: 48475 - DNA, 20 bp, Chlamydia trachomatis
cgtgcgaatacaacagttac

SEQ ID NO: 48476 - DNA, 20 bp, Chlamydia trachomatis
cctgtccatttatttggtct

SEQ ID NO: 48477 - DNA, 20 bp, Chlamydia trachomatis
atttggtcttggagtcttca

SEQ ID NO: 48478 - DNA, 20 bp, Chlamydia trachomatis
gttttcgatgaccggatggc

SEQ ID NO: 48479 - DNA, 20 bp, Chlamydia trachomatis
ttttcgatgaccggatggct

SEQ ID NO: 48480 - DNA, 20 bp, Chlamydia trachomatis
tcgatgaccggatggctatg

SEQ ID NO: 48481 - DNA, 20 bp, Chlamydia trachomatis
cgatgaccggatggctatgc

SEQ ID NO: 48482 - DNA, 20 bp, Chlamydia trachomatis
gatgaccggatggctatgcc

SEQ ID NO: 48483 - DNA, 20 bp, Chlamydia trachomatis
ccgtctgttggagaatttcc

SEQ ID NO: 48484 - DNA, 20 bp, Chlamydia trachomatis
gagaatttcctgcgatcttt

SEQ ID NO: 48485 - DNA, 20 bp, Chlamydia trachomatis
cctgcgatcttttgtctaat

SEQ ID NO: 48486 - DNA, 20 bp, Chlamydia trachomatis
ctgcgatcttttgtctaatt

SEQ ID NO: 48487 - DNA, 20 bp, Chlamydia trachomatis
tgtctaattcttggattttt

SEQ ID NO: 48488 - DNA, 20 bp, Chlamydia trachomatis
ctttgcttatgcacctaagt

SEQ ID NO: 48489 - DNA, 20 bp, Chlamydia trachomatis
gcttatgcacctaagtgaag

SEQ ID NO: 48490 - DNA, 20 bp, Chlamydia trachomatis
cttatgcacctaagtgaagg

SEQ ID NO: 48491 - DNA, 20 bp, Chlamydia trachomatis
tgcacctaagtgaaggaaac

SEQ ID NO: 48492 - DNA, 20 bp, Chlamydia trachomatis
gtttttcatcaaggtggttg

SEQ ID NO: 48493 - DNA, 20 bp, Chlamydia trachomatis
tctcttttgctttgttaagg

SEQ ID NO: 48494 - DNA, 20 bp, Chlamydia trachomatis
ctcttttgctttgttaaggc

SEQ ID NO: 48495 - DNA, 20 bp, Chlamydia trachomatis
tcttttgctttgttaaggca

SEQ ID NO: 48496 - DNA, 20 bp, Chlamydia trachomatis
tgctttgttaaggcaagagc

SEQ ID NO: 48497 - DNA, 20 bp, Chlamydia trachomatis
gctttgttaaggcaagagca

SEQ ID NO: 48498 - DNA, 20 bp, Chlamydia trachomatis
ttctttgcagtaggccatgg

SEQ ID NO: 48499 - DNA, 20 bp, Chlamydia trachomatis
tctttgcagtaggccatggg

SEQ ID NO: 48500 - DNA, 20 bp, Chlamydia trachomatis
ctttgcagtaggccatgggg

SEQ ID NO: 48501 - DNA, 20 bp, Chlamydia trachomatis
tttgcagtaggccatgggga

SEQ ID NO: 48502 - DNA, 20 bp, Chlamydia trachomatis
gcagtaggccatggggatgg

SEQ ID NO: 48503 - DNA, 20 bp, Chlamydia trachomatis
agccgacatacgacggtaag

SEQ ID NO: 48504 - DNA, 20 bp, Chlamydia trachomatis
gcgggattttctgatttccc

SEQ ID NO: 48505 - DNA, 20 bp, Chlamydia trachomatis
tctgatttcccttaccgtcg

SEQ ID NO: 48506 - DNA, 20 bp, Chlamydia trachomatis
ctgatttcccttaccgtcgt

SEQ ID NO: 48507 - DNA, 20 bp, Chlamydia trachomatis
tgatttcccttaccgtcgta

SEQ ID NO: 48508 - DNA, 20 bp, Chlamydia trachomatis
agaatttatcaatgatcaac

SEQ ID NO: 48509 - DNA, 20 bp, Chlamydia trachomatis
gaatttatcaatgatcaact

SEQ ID NO: 48510 - DNA, 20 bp, Chlamydia trachomatis
atcaatgatcaactgcagtc

SEQ ID NO: 48511 - DNA, 20 bp, Chlamydia trachomatis
tcaatgatcaactgcagtcg

SEQ ID NO: 48512 - DNA, 20 bp, Chlamydia trachomatis
attgtgtgcgataggctttc

SEQ ID NO: 48513 - DNA, 20 bp, Chlamydia trachomatis
gatagaacgcatatcagaaa

SEQ ID NO: 48514 - DNA, 20 bp, Chlamydia trachomatis
ttgtacccaaaagaacaacc

SEQ ID NO: 48515 - DNA, 20 bp, Chlamydia trachomatis
tacccaaaagaacaaccgcg

SEQ ID NO: 48516 - DNA, 20 bp, Chlamydia trachomatis
agatgattttgttatttcct

SEQ ID NO: 48517 - DNA, 20 bp, Chlamydia trachomatis
tgttatttcctgtggacagc

SEQ ID NO: 48518 - DNA, 20 bp, Chlamydia trachomatis
gccttcggcaacaaaaatcg

SEQ ID NO: 48519 - DNA, 20 bp, Chlamydia trachomatis
ccttcggcaacaaaaatcgt

SEQ ID NO: 48520 - DNA, 20 bp, Chlamydia trachomatis
ggcaacaaaaatcgttgctg

SEQ ID NO: 48521 - DNA, 20 bp, Chlamydia trachomatis
ctgaagtagctcgctattct

SEQ ID NO: 48522 - DNA, 20 bp, Chlamydia trachomatis
agcaacgatttttgttgccg

SEQ ID NO: 48523 - DNA, 20 bp, Chlamydia trachomatis
ttgttagcaacaaaatcggt

SEQ ID NO: 48524 - DNA, 20 bp, Chlamydia trachomatis
ttagcaacaaaatcggtttc

SEQ ID NO: 48525 - DNA, 20 bp, Chlamydia trachomatis
gcaacaaaatcggtttcaac

SEQ ID NO: 48526 - DNA, 20 bp, Chlamydia trachomatis
caacgttaacttcaacaagc

SEQ ID NO: 48527 - DNA, 20 bp, Chlamydia trachomatis
aacgttaacttcaacaagcg

SEQ ID NO: 48528 - DNA, 20 bp, Chlamydia trachomatis
tcctgttggaagaggaagct

SEQ ID NO: 48529 - DNA, 20 bp, Chlamydia trachomatis
gaagaggaagctcttcaaca

SEQ ID NO: 48530 - DNA, 20 bp, Chlamydia trachomatis
aacagcttcttccgcaggtc

SEQ ID NO: 48531 - DNA, 20 bp, Chlamydia trachomatis
ttccgcaggtctttctgcag

SEQ ID NO: 48532 - DNA, 20 bp, Chlamydia trachomatis
cgcaggtctttctgcaggac

SEQ ID NO: 48533 - DNA, 20 bp, Chlamydia trachomatis
tcctgatttagtgaagcgct

SEQ ID NO: 48534 - DNA, 20 bp, Chlamydia trachomatis
agtgaagcgctatttaggat

SEQ ID NO: 48535 - DNA, 20 bp, Chlamydia trachomatis
gtgaagcgctatttaggatc

SEQ ID NO: 48536 - DNA, 20 bp, Chlamydia trachomatis
aggatccgtagtgccagctc

SEQ ID NO: 48537 - DNA, 20 bp, Chlamydia trachomatis
ggatccgtagtgccagctcg

SEQ ID NO: 48538 - DNA, 20 bp, Chlamydia trachomatis
ttgtatcataacgcataatc

SEQ ID NO: 48539 - DNA, 20 bp, Chlamydia trachomatis
tgtatcataacgcataatcc

SEQ ID NO: 48540 - DNA, 20 bp, Chlamydia trachomatis
gtatcataacgcataatcct

SEQ ID NO: 48541 - DNA, 20 bp, Chlamydia trachomatis
tatcataacgcataatccta

SEQ ID NO: 48542 - DNA, 20 bp, Chlamydia trachomatis
ggtgatctcctgcagccaga

SEQ ID NO: 48543 - DNA, 20 bp, Chlamydia trachomatis
atttgctgtagacggagctc

SEQ ID NO: 48544 - DNA, 20 bp, Chlamydia trachomatis
tttgctgtagacggagctca

SEQ ID NO: 48545 - DNA, 20 bp, Chlamydia trachomatis
gctgtagacggagctcaagg

SEQ ID NO: 48546 - DNA, 20 bp, Chlamydia trachomatis
ctgtagacggagctcaagga

SEQ ID NO: 48547 - DNA, 20 bp, Chlamydia trachomatis
ggaaagggcctcttaatctt

SEQ ID NO: 48548 - DNA, 20 bp, Chlamydia trachomatis
tgcaatcgacctctgggcct

SEQ ID NO: 48549 - DNA, 20 bp, Chlamydia trachomatis
cgaaggccatacggtatctt

SEQ ID NO: 48550 - DNA, 20 bp, Chlamydia trachomatis
tcgaggaggatttcaaggga

SEQ ID NO: 48551 - DNA, 20 bp, Chlamydia trachomatis
aaatcctcctcgagaagata

SEQ ID NO: 48552 - DNA, 20 bp, Chlamydia trachomatis
gtaattaggcccagaggtcg

SEQ ID NO: 48553 - DNA, 20 bp, Chlamydia trachomatis
cgaagatcgattagtaaata

SEQ ID NO: 48554 - DNA, 20 bp, Chlamydia trachomatis
gtaaataatgatgctccggt

SEQ ID NO: 48555 - DNA, 20 bp, Chlamydia trachomatis
ttgatgatgctgtagacgat

SEQ ID NO: 48556 - DNA, 20 bp, Chlamydia trachomatis
atgatgctgtagacgatatt

SEQ ID NO: 48557 - DNA, 20 bp, Chlamydia trachomatis
aatatcgtctacagcatcat

SEQ ID NO: 48558 - DNA, 20 bp, Chlamydia trachomatis
gatggggcgtcctaagagca

SEQ ID NO: 48559 - DNA, 20 bp, Chlamydia trachomatis
atacccagcattgcgtaatt

SEQ ID NO: 48560 - DNA, 20 bp, Chlamydia trachomatis
ttcggaaattacgcaatgct

SEQ ID NO: 48561 - DNA, 20 bp, Chlamydia trachomatis
ggaaattacgcaatgctggg

SEQ ID NO: 48562 - DNA, 20 bp, Chlamydia trachomatis
cgcaatgctgggtatcaagc

SEQ ID NO: 48563 - DNA, 20 bp, Chlamydia trachomatis
tgcgagaacgctttgccagt

SEQ ID NO: 48564 - DNA, 20 bp, Chlamydia trachomatis
gcgagaacgctttgccagta

SEQ ID NO: 48565 - DNA, 20 bp, Chlamydia trachomatis
cgagaacgctttgccagtat

SEQ ID NO: 48566 - DNA, 20 bp, Chlamydia trachomatis
gccagtattccgaaattatg

SEQ ID NO: 48567 - DNA, 20 bp, Chlamydia trachomatis
ccagtattccgaaattatgc

SEQ ID NO: 48568 - DNA, 20 bp, Chlamydia trachomatis
aggcaacgttaagaggctat

SEQ ID NO: 48569 - DNA, 20 bp, Chlamydia trachomatis
agaggctatcagaaagaagg

SEQ ID NO: 48570 - DNA, 20 bp, Chlamydia trachomatis
gttagagcgtctgcgtaaga

SEQ ID NO: 48571 - DNA, 20 bp, Chlamydia trachomatis
gagcgtctgcgtaagatgca

SEQ ID NO: 48572 - DNA, 20 bp, Chlamydia trachomatis
atggaattcttgcagatgac

SEQ ID NO: 48573 - DNA, 20 bp, Chlamydia trachomatis
agcagcttacaacatttgaa

SEQ ID NO: 48574 - DNA, 20 bp, Chlamydia trachomatis
caacatttgaaagtgctgtg

SEQ ID NO: 48575 - DNA, 20 bp, Chlamydia trachomatis
gaaagtgctgtgattgaagg

SEQ ID NO: 48576 - DNA, 20 bp, Chlamydia trachomatis
aaagtgctgtgattgaaggt

SEQ ID NO: 48577 - DNA, 20 bp, Chlamydia trachomatis
aaggtgggcgtaatggtgtg

SEQ ID NO: 48578 - DNA, 20 bp, Chlamydia trachomatis
gactgtacttcaatcatccc

SEQ ID NO: 48579 - DNA, 20 bp, Chlamydia trachomatis
aatcatcccgtccgtaactt

SEQ ID NO: 48580 - DNA, 20 bp, Chlamydia trachomatis
tgattcagaattgagaggtt

SEQ ID NO: 48581 - DNA, 20 bp, Chlamydia trachomatis
agaattgagaggttccgagg

SEQ ID NO: 48582 - DNA, 20 bp, Chlamydia trachomatis
agaggttccgaggtgaagtc

SEQ ID NO: 48583 - DNA, 20 bp, Chlamydia trachomatis
aaaatattaagcagtcgaaa

SEQ ID NO: 48584 - DNA, 20 bp, Chlamydia trachomatis
agcagtcgaaagacaagagg

SEQ ID NO: 48585 - DNA, 20 bp, Chlamydia trachomatis
gcctcaataaatttttggca

SEQ ID NO: 48586 - DNA, 20 bp, Chlamydia trachomatis
ttggcatcagcaggagttgc

SEQ ID NO: 48587 - DNA, 20 bp, Chlamydia trachomatis
tggcatcagcaggagttgct

SEQ ID NO: 48588 - DNA, 20 bp, Chlamydia trachomatis
tggaccaaaatcttcgcatc

SEQ ID NO: 48589 - DNA, 20 bp, Chlamydia trachomatis
gcatcctgaacaggttaaat

SEQ ID NO: 48590 - DNA, 20 bp, Chlamydia trachomatis
aacctgttcaggatgcgaag

SEQ ID NO: 48591 - DNA, 20 bp, Chlamydia trachomatis
acctgttcaggatgcgaaga

SEQ ID NO: 48592 - DNA, 20 bp, Chlamydia trachomatis
aggatgcgaagattttggtc

SEQ ID NO: 48593 - DNA, 20 bp, Chlamydia trachomatis
tgtctgagcaacaactgttt

SEQ ID NO: 48594 - DNA, 20 bp, Chlamydia trachomatis
gtctgagcaacaactgtttt

SEQ ID NO: 48595 - DNA, 20 bp, Chlamydia trachomatis
tctgagcaacaactgttttt

SEQ ID NO: 48596 - DNA, 20 bp, Chlamydia trachomatis
tttatgcgcaaagccgttgc

SEQ ID NO: 48597 - DNA, 20 bp, Chlamydia trachomatis
ttatgcgcaaagccgttgcc

SEQ ID NO: 48598 - DNA, 20 bp, Chlamydia trachomatis
ttctgtaggaagggttttga

SEQ ID NO: 48599 - DNA, 20 bp, Chlamydia trachomatis
tgtaggaagggttttgaagc

SEQ ID NO: 48600 - DNA, 20 bp, Chlamydia trachomatis
tgaagcttgtggttaaaatc

SEQ ID NO: 48601 - DNA, 20 bp, Chlamydia trachomatis
gaagcttgtggttaaaatcg

SEQ ID NO: 48602 - DNA, 20 bp, Chlamydia trachomatis
aagcttgtggttaaaatcgc

SEQ ID NO: 48603 - DNA, 20 bp, Chlamydia trachomatis
gagcaattacgggatgaaca

SEQ ID NO: 48604 - DNA, 20 bp, Chlamydia trachomatis
agcaattacgggatgaacat

SEQ ID NO: 48605 - DNA, 20 bp, Chlamydia trachomatis
cgggatgaacatctgtgatc

SEQ ID NO: 48606 - DNA, 20 bp, Chlamydia trachomatis
aagagatcacagatgttcat

SEQ ID NO: 48607 - DNA, 20 bp, Chlamydia trachomatis
atcccgtaattgctcaaagt

SEQ ID NO: 48608 - DNA, 20 bp, Chlamydia trachomatis
acgtttatgcgaggagttgc

SEQ ID NO: 48609 - DNA, 20 bp, Chlamydia trachomatis
cgtttatgcgaggagttgca

SEQ ID NO: 48610 - DNA, 20 bp, Chlamydia trachomatis
atgcgaggagttgcaagaaa

SEQ ID NO: 48611 - DNA, 20 bp, Chlamydia trachomatis
tgcgaggagttgcaagaaaa

SEQ ID NO: 48612 - DNA, 20 bp, Chlamydia trachomatis
caagaaaatctgacttcagg

SEQ ID NO: 48613 - DNA, 20 bp, Chlamydia trachomatis
cggctgcccgcataatgatt

SEQ ID NO: 48614 - DNA, 20 bp, Chlamydia trachomatis
ctgttttcccgaaccctgca

SEQ ID NO: 48615 - DNA, 20 bp, Chlamydia trachomatis
tgttttcccgaaccctgcat

SEQ ID NO: 48616 - DNA, 20 bp, Chlamydia trachomatis
tcccgaaccctgcatctcca

SEQ ID NO: 48617 - DNA, 20 bp, Chlamydia trachomatis
cccgaaccctgcatctccac

SEQ ID NO: 48618 - DNA, 20 bp, Chlamydia trachomatis
tagtagaaaaatagttccgt

SEQ ID NO: 48619 - DNA, 20 bp, Chlamydia trachomatis
cgttgtttttgtctacggag

SEQ ID NO: 48620 - DNA, 20 bp, Chlamydia trachomatis
tttttgtctacggaggactt

SEQ ID NO: 48621 - DNA, 20 bp, Chlamydia trachomatis
ttgtctacggaggactttgc

SEQ ID NO: 48622 - DNA, 20 bp, Chlamydia trachomatis
tgtctacggaggactttgct

SEQ ID NO: 48623 - DNA, 20 bp, Chlamydia trachomatis
gaatgttggcttagaggcag

SEQ ID NO: 48624 - DNA, 20 bp, Chlamydia trachomatis
gcttagaggcagcaatcatt

SEQ ID NO: 48625 - DNA, 20 bp, Chlamydia trachomatis
gaggcagcaatcatttaaag

SEQ ID NO: 48626 - DNA, 20 bp, Chlamydia trachomatis
aaagagtgcgtaacagctca

SEQ ID NO: 48627 - DNA, 20 bp, Chlamydia trachomatis
aagagtgcgtaacagctcac

SEQ ID NO: 48628 - DNA, 20 bp, Chlamydia trachomatis
agtttgttcagaaagagaat

SEQ ID NO: 48629 - DNA, 20 bp, Chlamydia trachomatis
gttcagaaagagaatcatcg

SEQ ID NO: 48630 - DNA, 20 bp, Chlamydia trachomatis
ttcagaaagagaatcatcgg

SEQ ID NO: 48631 - DNA, 20 bp, Chlamydia trachomatis
agaaagagaatcatcggctt

SEQ ID NO: 48632 - DNA, 20 bp, Chlamydia trachomatis
cccaaactccatgtgcggca

SEQ ID NO: 48633 - DNA, 20 bp, Chlamydia trachomatis
ttgcctgccatgcgtttcga

SEQ ID NO: 48634 - DNA, 20 bp, Chlamydia trachomatis
tgcctgccatgcgtttcgaa

SEQ ID NO: 48635 - DNA, 20 bp, Chlamydia trachomatis
gcctgccatgcgtttcgaac

SEQ ID NO: 48636 - DNA, 20 bp, Chlamydia trachomatis
cctgccatgcgtttcgaaca

SEQ ID NO: 48637 - DNA, 20 bp, Chlamydia trachomatis
cgaacagcaagagcacaatg

SEQ ID NO: 48638 - DNA, 20 bp, Chlamydia trachomatis
aagcagttggttgggatgga

SEQ ID NO: 48639 - DNA, 20 bp, Chlamydia trachomatis
agcagttggttgggatggaa

SEQ ID NO: 48640 - DNA, 20 bp, Chlamydia trachomatis
gttgggatggaagaggttct

SEQ ID NO: 48641 - DNA, 20 bp, Chlamydia trachomatis
ggatggaagaggttctttta

SEQ ID NO: 48642 - DNA, 20 bp, Chlamydia trachomatis
ttttatgaatcgtagaaaca

SEQ ID NO: 48643 - DNA, 20 bp, Chlamydia trachomatis
tccgctggttgcaaagaggt

SEQ ID NO: 48644 - DNA, 20 bp, Chlamydia trachomatis
ccgctggttgcaaagaggta

SEQ ID NO: 48645 - DNA, 20 bp, Chlamydia trachomatis
cgctggttgcaaagaggtaa

SEQ ID NO: 48646 - DNA, 20 bp, Chlamydia trachomatis
caaagaggtaacaatcactc

SEQ ID NO: 48647 - DNA, 20 bp, Chlamydia trachomatis
tagggagcgaatgttgctgt

SEQ ID NO: 48648 - DNA, 20 bp, Chlamydia trachomatis
ctaggagggaagcagttcca

SEQ ID NO: 48649 - DNA, 20 bp, Chlamydia trachomatis
taggagggaagcagttccac

SEQ ID NO: 48650 - DNA, 20 bp, Chlamydia trachomatis
cactgatttatcctccggtt

SEQ ID NO: 48651 - DNA, 20 bp, Chlamydia trachomatis
atcctccggttccagatcct

SEQ ID NO: 48652 - DNA, 20 bp, Chlamydia trachomatis
tcctccggttccagatccta

SEQ ID NO: 48653 - DNA, 20 bp, Chlamydia trachomatis
gtttcgagtgctttcatcat

SEQ ID NO: 48654 - DNA, 20 bp, Chlamydia trachomatis
cgagtgctttcatcatcgct

SEQ ID NO: 48655 - DNA, 20 bp, Chlamydia trachomatis
gagtgctttcatcatcgcta

SEQ ID NO: 48656 - DNA, 20 bp, Chlamydia trachomatis
catcatcgctagcgacacgc

SEQ ID NO: 48657 - DNA, 20 bp, Chlamydia trachomatis
atcatcgctagcgacacgca

SEQ ID NO: 48658 - DNA, 20 bp, Chlamydia trachomatis
aatgtgaatctcttattgaa

SEQ ID NO: 48659 - DNA, 20 bp, Chlamydia trachomatis
atgtgaatctcttattgaat

SEQ ID NO: 48660 - DNA, 20 bp, Chlamydia trachomatis
ttgaataggagagattttcg

SEQ ID NO: 48661 - DNA, 20 bp, Chlamydia trachomatis
aataggagagattttcgatt

SEQ ID NO: 48662 - DNA, 20 bp, Chlamydia trachomatis
tcgattggggccatctaagg

SEQ ID NO: 48663 - DNA, 20 bp, Chlamydia trachomatis
atgtgtctttttgaataaat

SEQ ID NO: 48664 - DNA, 20 bp, Chlamydia trachomatis
ttgaataaatacacagaaga

SEQ ID NO: 48665 - DNA, 20 bp, Chlamydia trachomatis
tgaataaatacacagaagat

SEQ ID NO: 48666 - DNA, 20 bp, Chlamydia trachomatis
gaataaatacacagaagatc

SEQ ID NO: 48667 - DNA, 20 bp, Chlamydia trachomatis
aataaatacacagaagatcg

SEQ ID NO: 48668 - DNA, 20 bp, Chlamydia trachomatis
tgcgattcggaagaagaggg

SEQ ID NO: 48669 - DNA, 20 bp, Chlamydia trachomatis
gcgattcggaagaagagggt

SEQ ID NO: 48670 - DNA, 20 bp, Chlamydia trachomatis
cgattcggaagaagagggta

SEQ ID NO: 48671 - DNA, 20 bp, Chlamydia trachomatis
ggaagaagagggtatgtgtt

SEQ ID NO: 48672 - DNA, 20 bp, Chlamydia trachomatis
tcctgtggaaattcggggga

SEQ ID NO: 48673 - DNA, 20 bp, Chlamydia trachomatis
ttggttctgtatatacagga

SEQ ID NO: 48674 - DNA, 20 bp, Chlamydia trachomatis
gttctgtatatacaggattt

SEQ ID NO: 48675 - DNA, 20 bp, Chlamydia trachomatis
tgtatatacaggatttttag

SEQ ID NO: 48676 - DNA, 20 bp, Chlamydia trachomatis
ttagctggatcctggttctt

SEQ ID NO: 48677 - DNA, 20 bp, Chlamydia trachomatis
tagctggatcctggttcttc

SEQ ID NO: 48678 - DNA, 20 bp, Chlamydia trachomatis
ggtgtgccgcgtatacaggg

SEQ ID NO: 48679 - DNA, 20 bp, Chlamydia trachomatis
cgagcttcctggttttcctc

SEQ ID NO: 48680 - DNA, 20 bp, Chlamydia trachomatis
ctggttttcctctcttaata

SEQ ID NO: 48681 - DNA, 20 bp, Chlamydia trachomatis
tcctctcttaatagcttgcc

SEQ ID NO: 48682 - DNA, 20 bp, Chlamydia trachomatis
cctctcttaatagcttgcct

SEQ ID NO: 48683 - DNA, 20 bp, Chlamydia trachomatis
ttgcgcactctccggaagac

SEQ ID NO: 48684 - DNA, 20 bp, Chlamydia trachomatis
cgcactctccggaagactta

SEQ ID NO: 48685 - DNA, 20 bp, Chlamydia trachomatis
ttagcagcagctgataagct

SEQ ID NO: 48686 - DNA, 20 bp, Chlamydia trachomatis
gcagcagctgataagctact

SEQ ID NO: 48687 - DNA, 20 bp, Chlamydia trachomatis
tcagctgctgctaataagtc

SEQ ID NO: 48688 - DNA, 20 bp, Chlamydia trachomatis
tcaggaaaatattcgtgacg

SEQ ID NO: 48689 - DNA, 20 bp, Chlamydia trachomatis
gtgacgtactagctaagcag

SEQ ID NO: 48690 - DNA, 20 bp, Chlamydia trachomatis
ggcctttcatacattgctct

SEQ ID NO: 48691 - DNA, 20 bp, Chlamydia trachomatis
catacattgctctagatgga

SEQ ID NO: 48692 - DNA, 20 bp, Chlamydia trachomatis
atacattgctctagatggaa

SEQ ID NO: 48693 - DNA, 20 bp, Chlamydia trachomatis
ttacacagggtattacaggg

SEQ ID NO: 48694 - DNA, 20 bp, Chlamydia trachomatis
cacagggtattacagggaaa

SEQ ID NO: 48695 - DNA, 20 bp, Chlamydia trachomatis
cagggaaagcagggtctttt

SEQ ID NO: 48696 - DNA, 20 bp, Chlamydia trachomatis
tcacactacacaatgtgtcg

SEQ ID NO: 48697 - DNA, 20 bp, Chlamydia trachomatis
cacactacacaatgtgtcgc

SEQ ID NO: 48698 - DNA, 20 bp, Chlamydia trachomatis
gctacttgttacaaattgga

SEQ ID NO: 48699 - DNA, 20 bp, Chlamydia trachomatis
ttacaaattggaaaaagtgt

SEQ ID NO: 48700 - DNA, 20 bp, Chlamydia trachomatis
caaattggaaaaagtgtacg

SEQ ID NO: 48701 - DNA, 20 bp, Chlamydia trachomatis
gaaaaagtgtacggagcttt

SEQ ID NO: 48702 - DNA, 20 bp, Chlamydia trachomatis
ggtgacggatgttgttaaag

SEQ ID NO: 48703 - DNA, 20 bp, Chlamydia trachomatis
ctccaaggaattcgtgatat

SEQ ID NO: 48704 - DNA, 20 bp, Chlamydia trachomatis
gtgatatggctgcgggagat

SEQ ID NO: 48705 - DNA, 20 bp, Chlamydia trachomatis
ctcagaagaggatgtgcatg

SEQ ID NO: 48706 - DNA, 20 bp, Chlamydia trachomatis
tcagaagaggatgtgcatga

SEQ ID NO: 48707 - DNA, 20 bp, Chlamydia trachomatis
cttcatgcacatcctcttct

SEQ ID NO: 48708 - DNA, 20 bp, Chlamydia trachomatis
ttcaggctttagaagcagct

SEQ ID NO: 48709 - DNA, 20 bp, Chlamydia trachomatis
tcaggctttagaagcagctt

SEQ ID NO: 48710 - DNA, 20 bp, Chlamydia trachomatis
caggctttagaagcagcttt

SEQ ID NO: 48711 - DNA, 20 bp, Chlamydia trachomatis
aggctttagaagcagctttt

SEQ ID NO: 48712 - DNA, 20 bp, Chlamydia trachomatis
agaagcagcttttcgagaca

SEQ ID NO: 48713 - DNA, 20 bp, Chlamydia trachomatis
cttgacgttgtatataagga

SEQ ID NO: 48714 - DNA, 20 bp, Chlamydia trachomatis
acgttgtatataaggaagcg

SEQ ID NO: 48715 - DNA, 20 bp, Chlamydia trachomatis
tatataaggaagcgttaggg

SEQ ID NO: 48716 - DNA, 20 bp, Chlamydia trachomatis
gggaaatcgaaatatgctga

SEQ ID NO: 48717 - DNA, 20 bp, Chlamydia trachomatis
agaacaagcacatcgcgatc

SEQ ID NO: 48718 - DNA, 20 bp, Chlamydia trachomatis
cgttcgataatcgttaagcg

SEQ ID NO: 48719 - DNA, 20 bp, Chlamydia trachomatis
gataatcgttaagcgagcaa

SEQ ID NO: 48720 - DNA, 20 bp, Chlamydia trachomatis
agcgagcaagagttgtggtt

SEQ ID NO: 48721 - DNA, 20 bp, Chlamydia trachomatis
tggttcgaatggtcgcatcg

SEQ ID NO: 48722 - DNA, 20 bp, Chlamydia trachomatis
gaatggtcgcatcgagcaaa

SEQ ID NO: 48723 - DNA, 20 bp, Chlamydia trachomatis
ttagcaaaaggacaaaacaa

SEQ ID NO: 48724 - DNA, 20 bp, Chlamydia trachomatis
gcaaaaggacaaaacaaagt

SEQ ID NO: 48725 - DNA, 20 bp, Chlamydia trachomatis
tgcggatgtagcagggatag

SEQ ID NO: 48726 - DNA, 20 bp, Chlamydia trachomatis
gcggatgtagcagggataga

SEQ ID NO: 48727 - DNA, 20 bp, Chlamydia trachomatis
cggatgtagcagggatagag

SEQ ID NO: 48728 - DNA, 20 bp, Chlamydia trachomatis
aactggcctttttcgttaat

SEQ ID NO: 48729 - DNA, 20 bp, Chlamydia trachomatis
ttcgttaatgctaaggagtt

SEQ ID NO: 48730 - DNA, 20 bp, Chlamydia trachomatis
tcgttaatgctaaggagttt

SEQ ID NO: 48731 - DNA, 20 bp, Chlamydia trachomatis
cgttaatgctaaggagttta

SEQ ID NO: 48732 - DNA, 20 bp, Chlamydia trachomatis
gttaatgctaaggagtttaa

SEQ ID NO: 48733 - DNA, 20 bp, Chlamydia trachomatis
cgatttttgaggtattgatc

SEQ ID NO: 48734 - DNA, 20 bp, Chlamydia trachomatis
ttgaggtattgatctgcata

SEQ ID NO: 48735 - DNA, 20 bp, Chlamydia trachomatis
tgaggtattgatctgcatag

SEQ ID NO: 48736 - DNA, 20 bp, Chlamydia trachomatis
gaggtattgatctgcatagt

SEQ ID NO: 48737 - DNA, 20 bp, Chlamydia trachomatis
aggtattgatctgcatagtt

SEQ ID NO: 48738 - DNA, 20 bp, Chlamydia trachomatis
agagccctgtctcatgtgtg

SEQ ID NO: 48739 - DNA, 20 bp, Chlamydia trachomatis
gagccctgtctcatgtgtgc

SEQ ID NO: 48740 - DNA, 20 bp, Chlamydia trachomatis
agttagcacgtattcctaga

SEQ ID NO: 48741 - DNA, 20 bp, Chlamydia trachomatis
gcacgtattcctagaattgt

SEQ ID NO: 48742 - DNA, 20 bp, Chlamydia trachomatis
ctagaattgtttggggggct

SEQ ID NO: 48743 - DNA, 20 bp, Chlamydia trachomatis
aactttctggtccgaagaaa

SEQ ID NO: 48744 - DNA, 20 bp, Chlamydia trachomatis
ctggtccgaagaaagcttgg

SEQ ID NO: 48745 - DNA, 20 bp, Chlamydia trachomatis
tggtccgaagaaagcttggg

SEQ ID NO: 48746 - DNA, 20 bp, Chlamydia trachomatis
ggtgcttccaattaaccata

SEQ ID NO: 48747 - DNA, 20 bp, Chlamydia trachomatis
caattaaccatagaaaggcc

SEQ ID NO: 48748 - DNA, 20 bp, Chlamydia trachomatis
ctttataaaagaggatgaaa

SEQ ID NO: 48749 - DNA, 20 bp, Chlamydia trachomatis
ataaaagaggatgaaatcca

SEQ ID NO: 48750 - DNA, 20 bp, Chlamydia trachomatis
taaaagaggatgaaatccaa

SEQ ID NO: 48751 - DNA, 20 bp, Chlamydia trachomatis
cgcatgagtaggcgttgcgt

SEQ ID NO: 48752 - DNA, 20 bp, Chlamydia trachomatis
cgtgatctcaaggctgcgaa

SEQ ID NO: 48753 - DNA, 20 bp, Chlamydia trachomatis
tttggggtcaggacctcgtt

SEQ ID NO: 48754 - DNA, 20 bp, Chlamydia trachomatis
ttggggtcaggacctcgttg

SEQ ID NO: 48755 - DNA, 20 bp, Chlamydia trachomatis
tggggtcaggacctcgttgt

SEQ ID NO: 48756 - DNA, 20 bp, Chlamydia trachomatis
ggggtcaggacctcgttgtg

SEQ ID NO: 48757 - DNA, 20 bp, Chlamydia trachomatis
gggtcaggacctcgttgtgg

SEQ ID NO: 48758 - DNA, 20 bp, Chlamydia trachomatis
aataaaagtgcctagtccgg

SEQ ID NO: 48759 - DNA, 20 bp, Chlamydia trachomatis
ataaaagtgcctagtccggc

SEQ ID NO: 48760 - DNA, 20 bp, Chlamydia trachomatis
actatcacattgatggctgg

SEQ ID NO: 48761 - DNA, 20 bp, Chlamydia trachomatis
ctatcacattgatggctggg

SEQ ID NO: 48762 - DNA, 20 bp, Chlamydia trachomatis
atggctgggatcttcctcat

SEQ ID NO: 48763 - DNA, 20 bp, Chlamydia trachomatis
gcgtttttcatcaccaattc

SEQ ID NO: 48764 - DNA, 20 bp, Chlamydia trachomatis
ttcatcaccaattcgcgatc

SEQ ID NO: 48765 - DNA, 20 bp, Chlamydia trachomatis
tcatcaccaattcgcgatcg

SEQ ID NO: 48766 - DNA, 20 bp, Chlamydia trachomatis
catcaccaattcgcgatcgg

SEQ ID NO: 48767 - DNA, 20 bp, Chlamydia trachomatis
atcaccaattcgcgatcggt

SEQ ID NO: 48768 - DNA, 20 bp, Chlamydia trachomatis
gattcactctcctcatggtg

SEQ ID NO: 48769 - DNA, 20 bp, Chlamydia trachomatis
actctcctcatggtgagggg

SEQ ID NO: 48770 - DNA, 20 bp, Chlamydia trachomatis
gcgtatgccgcatattttaa

SEQ ID NO: 48771 - DNA, 20 bp, Chlamydia trachomatis
cgtatgccgcatattttaac

SEQ ID NO: 48772 - DNA, 20 bp, Chlamydia trachomatis
taacgcgtatcgatatttct

SEQ ID NO: 48773 - DNA, 20 bp, Chlamydia trachomatis
ctgaaggtgtaggagatttg

SEQ ID NO: 48774 - DNA, 20 bp, Chlamydia trachomatis
ggctaccatagctccttcta

SEQ ID NO: 48775 - DNA, 20 bp, Chlamydia trachomatis
gctaccatagctccttctat

SEQ ID NO: 48776 - DNA, 20 bp, Chlamydia trachomatis
tatcagggctccacagttac

SEQ ID NO: 48777 - DNA, 20 bp, Chlamydia trachomatis
cagaaatcgatgagaagctt

SEQ ID NO: 48778 - DNA, 20 bp, Chlamydia trachomatis
cagcgactcccatttctatc

SEQ ID NO: 48779 - DNA, 20 bp, Chlamydia trachomatis
gatagaaatgggagtcgctg

SEQ ID NO: 48780 - DNA, 20 bp, Chlamydia trachomatis
gaggtggcatcctttcctgg

SEQ ID NO: 48781 - DNA, 20 bp, Chlamydia trachomatis
cctggtgttcccttttcgca

SEQ ID NO: 48782 - DNA, 20 bp, Chlamydia trachomatis
ctggtgttcccttttcgcag

SEQ ID NO: 48783 - DNA, 20 bp, Chlamydia trachomatis
tactacttgtgcttgatgga

SEQ ID NO: 48784 - DNA, 20 bp, Chlamydia trachomatis
tgcttgatggagtttggccg

SEQ ID NO: 48785 - DNA, 20 bp, Chlamydia trachomatis
atggagtttggccggtacca

SEQ ID NO: 48786 - DNA, 20 bp, Chlamydia trachomatis
ggccggtaccagtattttgg

SEQ ID NO: 48787 - DNA, 20 bp, Chlamydia trachomatis
gccggtaccagtattttggg

SEQ ID NO: 48788 - DNA, 20 bp, Chlamydia trachomatis
gatggagagggagtagtttt

SEQ ID NO: 48789 - DNA, 20 bp, Chlamydia trachomatis
atggagagggagtagttttc

SEQ ID NO: 48790 - DNA, 20 bp, Chlamydia trachomatis
tctttagtagcaatgtagct

SEQ ID NO: 48791 - DNA, 20 bp, Chlamydia trachomatis
ctttagtagcaatgtagctg

SEQ ID NO: 48792 - DNA, 20 bp, Chlamydia trachomatis
tttagtagcaatgtagctgc

SEQ ID NO: 48793 - DNA, 20 bp, Chlamydia trachomatis
caaatagtttatggggatcc

SEQ ID NO: 48794 - DNA, 20 bp, Chlamydia trachomatis
atggggatccattttagata

SEQ ID NO: 48795 - DNA, 20 bp, Chlamydia trachomatis
tggggatccattttagatat

SEQ ID NO: 48796 - DNA, 20 bp, Chlamydia trachomatis
tagatatacgatctgcgcat

SEQ ID NO: 48797 - DNA, 20 bp, Chlamydia trachomatis
agatatacgatctgcgcatt

SEQ ID NO: 48798 - DNA, 20 bp, Chlamydia trachomatis
atccgtgctagctacgggtt

SEQ ID NO: 48799 - DNA, 20 bp, Chlamydia trachomatis
tccgtgctagctacgggttt

SEQ ID NO: 48800 - DNA, 20 bp, Chlamydia trachomatis
gggaaccagcatatgaaaac

SEQ ID NO: 48801 - DNA, 20 bp, Chlamydia trachomatis
ggaaccagcatatgaaaacc

SEQ ID NO: 48802 - DNA, 20 bp, Chlamydia trachomatis
gcagaggagagcgatgttcg

SEQ ID NO: 48803 - DNA, 20 bp, Chlamydia trachomatis
tatgatcctgtagtacaaaa

SEQ ID NO: 48804 - DNA, 20 bp, Chlamydia trachomatis
atgatcctgtagtacaaaat

SEQ ID NO: 48805 - DNA, 20 bp, Chlamydia trachomatis
tgatcctgtagtacaaaata

SEQ ID NO: 48806 - DNA, 20 bp, Chlamydia trachomatis
agcagcgggtgcatcgacac

SEQ ID NO: 48807 - DNA, 20 bp, Chlamydia trachomatis
ttcttctatgcctggtgctg

SEQ ID NO: 48808 - DNA, 20 bp, Chlamydia trachomatis
tgttttctaacggaatcgag

SEQ ID NO: 48809 - DNA, 20 bp, Chlamydia trachomatis
gttttctaacggaatcgagg

SEQ ID NO: 48810 - DNA, 20 bp, Chlamydia trachomatis
ttttctaacggaatcgaggt

SEQ ID NO: 48811 - DNA, 20 bp, Chlamydia trachomatis
tctaacggaatcgaggtgaa

SEQ ID NO: 48812 - DNA, 20 bp, Chlamydia trachomatis
ctaacggaatcgaggtgaat

SEQ ID NO: 48813 - DNA, 20 bp, Chlamydia trachomatis
cgagacaaagtcgggatctg

SEQ ID NO: 48814 - DNA, 20 bp, Chlamydia trachomatis
gagacaaagtcgggatctgt

SEQ ID NO: 48815 - DNA, 20 bp, Chlamydia trachomatis
cagatgcggttgctctgaaa

SEQ ID NO: 48816 - DNA, 20 bp, Chlamydia trachomatis
ctctgaaacacttctgtcgg

SEQ ID NO: 48817 - DNA, 20 bp, Chlamydia trachomatis
tgtcggagaacttaaatgtg

SEQ ID NO: 48818 - DNA, 20 bp, Influenza A virus
atggaattggacgattctac

SEQ ID NO: 48819 - DNA, 20 bp, Influenza A virus
gacgattctacatccaaatg

SEQ ID NO: 48820 - DNA, 20 bp, Influenza A virus
tacatccaaatgtgcaccga

SEQ ID NO: 48821 - DNA, 20 bp, Influenza A virus
aagttcggtgcacatttgga

SEQ ID NO: 48822 - DNA, 20 bp, Influenza A virus
agttcggtgcacatttggat

SEQ ID NO: 48823 - DNA, 20 bp, Influenza A virus
atgacaaagaagaaataagg

SEQ ID NO: 48824 - DNA, 20 bp, Influenza A virus
tgacaaagaagaaataaggc

SEQ ID NO: 48825 - DNA, 20 bp, Influenza A virus
catcatcaccattattggct

SEQ ID NO: 48826 - DNA, 20 bp, Influenza A virus
ttggcttggcgccagattcg

SEQ ID NO: 48827 - DNA, 20 bp, Influenza A virus
gcttggcgccagattcgcct

SEQ ID NO: 48828 - DNA, 20 bp, Influenza A virus
atcaggatgatcaaacgtgg

SEQ ID NO: 48829 - DNA, 20 bp, Influenza A virus
tggagaggtgagaatggacg

SEQ ID NO: 48830 - DNA, 20 bp, Influenza A virus
tctcgtaagcactccttgtt

SEQ ID NO: 48831 - DNA, 20 bp, Influenza A virus
ttttccgtccattctcacct

SEQ ID NO: 48832 - DNA, 20 bp, Influenza A virus
tccgtccattctcacctctc

SEQ ID NO: 48833 - DNA, 20 bp, Influenza A virus
aactaagaagcaggtactgg

SEQ ID NO: 48834 - DNA, 20 bp, Influenza A virus
attagtgtttcctccacttc

SEQ ID NO: 48835 - DNA, 20 bp, Influenza A virus
gtgtttcctccacttctggt

SEQ ID NO: 48836 - DNA, 20 bp, Influenza A virus
cctccacttctggtccttat

SEQ ID NO: 48837 - DNA, 20 bp, Influenza A virus
ctccacttctggtccttatg

SEQ ID NO: 48838 - DNA, 20 bp, Influenza A virus
caagggggatgtgtttgtca

SEQ ID NO: 48839 - DNA, 20 bp, Influenza A virus
gtcataagggaaccattcat

SEQ ID NO: 48840 - DNA, 20 bp, Influenza A virus
tcataagggaaccattcata

SEQ ID NO: 48841 - DNA, 20 bp, Influenza A virus
atatcatgctcccccttgga

SEQ ID NO: 48842 - DNA, 20 bp, Influenza A virus
caagggggagcatgatatga

SEQ ID NO: 48843 - DNA, 20 bp, Influenza A virus
gctaacaattggaatttctg

SEQ ID NO: 48844 - DNA, 20 bp, Influenza A virus
gaatttctggcccagacaat

SEQ ID NO: 48845 - DNA, 20 bp, Influenza A virus
ctggcccagacaatggggca

SEQ ID NO: 48846 - DNA, 20 bp, Influenza A virus
tggcccagacaatggggcag

SEQ ID NO: 48847 - DNA, 20 bp, Influenza A virus
aagtacaacggcataataac

SEQ ID NO: 48848 - DNA, 20 bp, Influenza A virus
tcactatgaggaatgctcct

SEQ ID NO: 48849 - DNA, 20 bp, Influenza A virus
tcctgattctagtgaaatca

SEQ ID NO: 48850 - DNA, 20 bp, Influenza A virus
tagtgaaatcacatgtgtgt

SEQ ID NO: 48851 - DNA, 20 bp, Influenza A virus
gagccatgccagttatccct

SEQ ID NO: 48852 - DNA, 20 bp, Influenza A virus
tccctgcacacacatgtgat

SEQ ID NO: 48853 - DNA, 20 bp, Influenza A virus
aaatacggcaatggtgtttg

SEQ ID NO: 48854 - DNA, 20 bp, Influenza A virus
ggatagggagaactaaaagc

SEQ ID NO: 48855 - DNA, 20 bp, Influenza A virus
gatagggagaactaaaagca

SEQ ID NO: 48856 - DNA, 20 bp, Influenza A virus
gttcaagaaacggttttgag

SEQ ID NO: 48857 - DNA, 20 bp, Influenza A virus
aagaaacggttttgagatga

SEQ ID NO: 48858 - DNA, 20 bp, Influenza A virus
ttttcaaatgcatttatcgc

SEQ ID NO: 48859 - DNA, 20 bp, Influenza A virus
tttcaaatgcatttatcgct

SEQ ID NO: 48860 - DNA, 20 bp, Influenza A virus
ttcaaatgcatttatcgctt

SEQ ID NO: 48861 - DNA, 20 bp, Influenza A virus
tcaaatgcatttatcgcttc

SEQ ID NO: 48862 - DNA, 20 bp, Influenza A virus
caaatgcatttatcgcttct

SEQ ID NO: 48863 - DNA, 20 bp, Influenza C virus
aaaagcaagtgaacagtagc

SEQ ID NO: 48864 - DNA, 20 bp, Influenza C virus
agcctacacaatggcttcgg

SEQ ID NO: 48865 - DNA, 20 bp, Influenza C virus
ggaggaaatttgtatgccac

SEQ ID NO: 48866 - DNA, 20 bp, Influenza C virus
gtatgccacggaagaaaaaa

SEQ ID NO: 48867 - DNA, 20 bp, Influenza C virus
tatgccacggaagaaaaaag

SEQ ID NO: 48868 - DNA, 20 bp, Influenza C virus
atgttgagtatgtttggacc

SEQ ID NO: 48869 - DNA, 20 bp, Influenza C virus
agtatgtttggaccacctgg

SEQ ID NO: 48870 - DNA, 20 bp, Influenza C virus
ggaccacctgggaaggtaga

SEQ ID NO: 48871 - DNA, 20 bp, Influenza C virus
gaccacctgggaaggtagac

SEQ ID NO: 48872 - DNA, 20 bp, Influenza C virus
accaaggatgtggaaaacat

SEQ ID NO: 48873 - DNA, 20 bp, Influenza C virus
ctttacaagcgactgcaggg

SEQ ID NO: 48874 - DNA, 20 bp, Influenza C virus
acaagcgactgcaggggttg

SEQ ID NO: 48875 - DNA, 20 bp, Influenza C virus
caagcgactgcaggggttgc

SEQ ID NO: 48876 - DNA, 20 bp, Influenza C virus
caaaaaattgcaacaacagc

SEQ ID NO: 48877 - DNA, 20 bp, Influenza C virus
caacaacagcttcttaaaaa

SEQ ID NO: 48878 - DNA, 20 bp, Influenza C virus
atctggaaaagttgttggag

SEQ ID NO: 48879 - DNA, 20 bp, Influenza C virus
ttggaggactagataacagg

SEQ ID NO: 48880 - DNA, 20 bp, Influenza C virus
gaggactagataacagggta

SEQ ID NO: 48881 - DNA, 20 bp, Influenza C virus
cacagggaattctggagaca

SEQ ID NO: 48882 - DNA, 20 bp, Influenza C virus
tggagacaccccaacaatgc

SEQ ID NO: 48883 - DNA, 20 bp, Influenza C virus
ctgtcaggactggactatga

SEQ ID NO: 48884 - DNA, 20 bp, Influenza C virus
attcacccaccctgattgtg

SEQ ID NO: 48885 - DNA, 20 bp, Influenza C virus
acccaccctgattgtgatat

SEQ ID NO: 48886 - DNA, 20 bp, Influenza C virus
tgatatgcatctagcttcat

SEQ ID NO: 48887 - DNA, 20 bp, Influenza C virus
atagtccagtcctgacagca

SEQ ID NO: 48888 - DNA, 20 bp, Influenza C virus
taattcccaccagtggaact

SEQ ID NO: 48889 - DNA, 20 bp, Influenza C virus
ccaccagtggaactgatacc

SEQ ID NO: 48890 - DNA, 20 bp, Influenza C virus
ttggaatcgatgacctcatt

SEQ ID NO: 48891 - DNA, 20 bp, Influenza C virus
tggaatcgatgacctcatta

SEQ ID NO: 48892 - DNA, 20 bp, Influenza C virus
ggaatcgatgacctcattat

SEQ ID NO: 48893 - DNA, 20 bp, Influenza C virus
agaaattgaaaatgcaagat

SEQ ID NO: 48894 - DNA, 20 bp, Influenza C virus
gaaattgaaaatgcaagatc

SEQ ID NO: 48895 - DNA, 20 bp, Influenza C virus
aaaatgcaagatctgaagct

SEQ ID NO: 48896 - DNA, 20 bp, Influenza C virus
gttaggagaattgggaataa

SEQ ID NO: 48897 - DNA, 20 bp, Influenza C virus
ttaggagaattgggaataat

SEQ ID NO: 48898 - DNA, 20 bp, Influenza C virus
caaccattccccctcttgac

SEQ ID NO: 48899 - DNA, 20 bp, Influenza C virus
cccctcttgacacaaaaatt

SEQ ID NO: 48900 - DNA, 20 bp, Influenza C virus
acacaaaaattgatctgcaa

SEQ ID NO: 48901 - DNA, 20 bp, Influenza C virus
atctgcaatcagatcctttt

SEQ ID NO: 48902 - DNA, 20 bp, Influenza C virus
ttactggggaagcagcttgg

SEQ ID NO: 48903 - DNA, 20 bp, Influenza A virus
catggggccaaggaggtgtc

SEQ ID NO: 48904 - DNA, 20 bp, Influenza A virus
aactggtgcacttgccagtt

SEQ ID NO: 48905 - DNA, 20 bp, Influenza A virus
ccagttgcatgggcctcata

SEQ ID NO: 48906 - DNA, 20 bp, Influenza A virus
catgggcctcatatacaaca

SEQ ID NO: 48907 - DNA, 20 bp, Influenza A virus
ccatcctgttgtatatgagg

SEQ ID NO: 48908 - DNA, 20 bp, Influenza A virus
ctaatcagactaggcagatg

SEQ ID NO: 48909 - DNA, 20 bp, Influenza A virus
ggactcatcctagctccagt

SEQ ID NO: 48910 - DNA, 20 bp, Influenza A virus
tcaagaaggtcatctttcag

SEQ ID NO: 48911 - DNA, 20 bp, Influenza A virus
caagaaggtcatctttcaga

SEQ ID NO: 48912 - DNA, 20 bp, Influenza A virus
aagaaggtcatctttcagac

SEQ ID NO: 48913 - DNA, 20 bp, Human papillomavirus type 92
taatacaaacagctagtata

SEQ ID NO: 48914 - DNA, 20 bp, Human papillomavirus type 92
ccatcacaatggcaaaacct

SEQ ID NO: 48915 - DNA, 20 bp, Human papillomavirus type 92
taagttcctgcaccgaagga

SEQ ID NO: 48916 - DNA, 20 bp, Human papillomavirus type 92
ctgcaccgaaggaggttttg

SEQ ID NO: 48917 - DNA, 20 bp, Human papillomavirus type 92
tgccattgtgatgggaacac

SEQ ID NO: 48918 - DNA, 20 bp, Human papillomavirus type 92
tgctggatctgcaagacctt

SEQ ID NO: 48919 - DNA, 20 bp, Human papillomavirus type 92
tccagcccattgacctgcat

SEQ ID NO: 48920 - DNA, 20 bp, Human papillomavirus type 92
acctgcattgtgacgaagac

SEQ ID NO: 48921 - DNA, 20 bp, Human papillomavirus type 92
tgacgaagacttgtcagaaa

SEQ ID NO: 48922 - DNA, 20 bp, Human papillomavirus type 92
tcagaaaatcaggaggagga

SEQ ID NO: 48923 - DNA, 20 bp, Human papillomavirus type 92
gtgtttaatagaagctgatt

SEQ ID NO: 48924 - DNA, 20 bp, Human papillomavirus type 92
aatagaagctgattgtagtg

SEQ ID NO: 48925 - DNA, 20 bp, Human papillomavirus type 92
atagaagctgattgtagtga

SEQ ID NO: 48926 - DNA, 20 bp, Human papillomavirus type 92
tagtgatgtagatggggatt

SEQ ID NO: 48927 - DNA, 20 bp, Human papillomavirus type 92
tgaaaagttatttgacaaag

SEQ ID NO: 48928 - DNA, 20 bp, Human papillomavirus type 92
tacagcttagtccacaattg

SEQ ID NO: 48929 - DNA, 20 bp, Human papillomavirus type 92
acagcttagtccacaattgg

SEQ ID NO: 48930 - DNA, 20 bp, Human papillomavirus type 92
cagcttagtccacaattgga

SEQ ID NO: 48931 - DNA, 20 bp, Human papillomavirus type 92
gtccacaattggaatctatt

SEQ ID NO: 48932 - DNA, 20 bp, Human papillomavirus type 92
gaatctattactatttcgcc

SEQ ID NO: 48933 - DNA, 20 bp, Human papillomavirus type 92
tagctgatccaccccagatt

SEQ ID NO: 48934 - DNA, 20 bp, Human papillomavirus type 92
gcagcgtagtagcagctttg

SEQ ID NO: 48935 - DNA, 20 bp, Human papillomavirus type 92
gttttggtacaaagaatcta

SEQ ID NO: 48936 - DNA, 20 bp, Human papillomavirus type 92
ttttggtacaaagaatctat

SEQ ID NO: 48937 - DNA, 20 bp, Human papillomavirus type 92
tggtacaaagaatctatgaa

SEQ ID NO: 48938 - DNA, 20 bp, Human papillomavirus type 92
caatgcactgcaagacaagt

SEQ ID NO: 48939 - DNA, 20 bp, Human papillomavirus type 92
aatgcactgcaagacaagtt

SEQ ID NO: 48940 - DNA, 20 bp, Human papillomavirus type 92
atgacaatttatgaaagagc

SEQ ID NO: 48941 - DNA, 20 bp, Human papillomavirus type 92
atgaaagagctagtgaatcc

SEQ ID NO: 48942 - DNA, 20 bp, Human papillomavirus type 92
tgaaagagctagtgaatcct

SEQ ID NO: 48943 - DNA, 20 bp, Human papillomavirus type 92
aataaacaatactatatcag

SEQ ID NO: 48944 - DNA, 20 bp, Human papillomavirus type 92
gctcaagacgcacgcagatt

SEQ ID NO: 48945 - DNA, 20 bp, Human papillomavirus type 92
ctcaagacgcacgcagattt

SEQ ID NO: 48946 - DNA, 20 bp, Human papillomavirus type 92
agtgaaactggagaatggga

SEQ ID NO: 48947 - DNA, 20 bp, Human papillomavirus type 92
gtgaaactggagaatgggaa

SEQ ID NO: 48948 - DNA, 20 bp, Human papillomavirus type 92
cggtcgtctttggatccccc

SEQ ID NO: 48949 - DNA, 20 bp, Human papillomavirus type 92
ggtcgtctttggatccccct

SEQ ID NO: 48950 - DNA, 20 bp, Human papillomavirus type 92
ggatccccctggaggcggtt

SEQ ID NO: 48951 - DNA, 20 bp, Human papillomavirus type 92
gatccccctggaggcggttg

SEQ ID NO: 48952 - DNA, 20 bp, Human papillomavirus type 92
tagcaccagagtcttttcgc

SEQ ID NO: 48953 - DNA, 20 bp, Human papillomavirus type 92
ggatcttgacctcctgttgc

SEQ ID NO: 48954 - DNA, 20 bp, Human papillomavirus type 92
gatcttgacctcctgttgct

SEQ ID NO: 48955 - DNA, 20 bp, Human papillomavirus type 92
acctcctgttgctgtaccct

SEQ ID NO: 48956 - DNA, 20 bp, Human papillomavirus type 92
ctgtaccctctacggcctct

SEQ ID NO: 48957 - DNA, 20 bp, Human papillomavirus type 92
ccttccgttcctgctcctgc

SEQ ID NO: 48958 - DNA, 20 bp, Human papillomavirus type 92
tgattgcttcagtactacat

SEQ ID NO: 48959 - DNA, 20 bp, Human papillomavirus type 92
cttcagtactacatggtcat

SEQ ID NO: 48960 - DNA, 20 bp, Human papillomavirus type 92
agtactacatggtcatgggt

SEQ ID NO: 48961 - DNA, 20 bp, Human papillomavirus type 92
tagagcgtcctattctatcg

SEQ ID NO: 48962 - DNA, 20 bp, Human papillomavirus type 92
tatcgttgctacctgcactg

SEQ ID NO: 48963 - DNA, 20 bp, Human papillomavirus type 92
gaaatacacccacagttatt

SEQ ID NO: 48964 - DNA, 20 bp, Human papillomavirus type 92
ttaggcctgctttggtgcct

SEQ ID NO: 48965 - DNA, 20 bp, Human papillomavirus type 92
ggcctgctttggtgcctgag

SEQ ID NO: 48966 - DNA, 20 bp, Human papillomavirus type 92
ggtgcctgaggctataggac

SEQ ID NO: 48967 - DNA, 20 bp, Human papillomavirus type 92
gtgcctgaggctataggacc

SEQ ID NO: 48968 - DNA, 20 bp, Human papillomavirus type 92
gcagacttggcaaacgagct

SEQ ID NO: 48969 - DNA, 20 bp, Human papillomavirus type 92
gcaaacgagctactataagg

SEQ ID NO: 48970 - DNA, 20 bp, Human papillomavirus type 92
tagttccagacctggtcctt

SEQ ID NO: 48971 - DNA, 20 bp, Human papillomavirus type 92
cagacctggtccttatagta

SEQ ID NO: 48972 - DNA, 20 bp, Human papillomavirus type 92
tagtagctcgtttgccaagt

SEQ ID NO: 48973 - DNA, 20 bp, Human papillomavirus type 92
acacagaagattttagtggt

SEQ ID NO: 48974 - DNA, 20 bp, Human papillomavirus type 92
tagtggtgattattatctac

SEQ ID NO: 48975 - DNA, 20 bp, Human papillomavirus type 92
agtggtgattattatctaca

SEQ ID NO: 48976 - DNA, 20 bp, Human papillomavirus type 92
gtggtgattattatctacat

SEQ ID NO: 48977 - DNA, 20 bp, Human papillomavirus type 92
ttatctacatcctagcttaa

SEQ ID NO: 48978 - DNA, 20 bp, Human papillomavirus type 92
atccacatgatgtattagtg

SEQ ID NO: 48979 - DNA, 20 bp, Human papillomavirus type 92
gtgcctaaggtgtcagggaa

SEQ ID NO: 48980 - DNA, 20 bp, Human papillomavirus type 92
agagcttttcgactgaaatt

SEQ ID NO: 48981 - DNA, 20 bp, Human papillomavirus type 92
gagcttttcgactgaaatta

SEQ ID NO: 48982 - DNA, 20 bp, Human papillomavirus type 92
tcgactgaaattaccagatc

SEQ ID NO: 48983 - DNA, 20 bp, Human papillomavirus type 92
tgatccaaagcaaattcagt

SEQ ID NO: 48984 - DNA, 20 bp, Human papillomavirus type 92
gatccaaagcaaattcagtt

SEQ ID NO: 48985 - DNA, 20 bp, Human papillomavirus type 92
atccaaagcaaattcagtta

SEQ ID NO: 48986 - DNA, 20 bp, Human papillomavirus type 92
agttatttgttttaggatgt

SEQ ID NO: 48987 - DNA, 20 bp, Human papillomavirus type 92
tttgttttaggatgtacacc

SEQ ID NO: 48988 - DNA, 20 bp, Human papillomavirus type 92
ttaaagatgtcaaatgatgt

SEQ ID NO: 48989 - DNA, 20 bp, Human papillomavirus type 92
taaagatgtcaaatgatgta

SEQ ID NO: 48990 - DNA, 20 bp, Human papillomavirus type 92
aaagatgtcaaatgatgtat

SEQ ID NO: 48991 - DNA, 20 bp, Human papillomavirus type 92
aagatgtcaaatgatgtata

SEQ ID NO: 48992 - DNA, 20 bp, Human papillomavirus type 92
tttctatggacgacgagaac

SEQ ID NO: 48993 - DNA, 20 bp, Human papillomavirus type 92
cctactgttagtgggtcttt

SEQ ID NO: 48994 - DNA, 20 bp, Human papillomavirus type 92
gtgggtctttggtatccact

SEQ ID NO: 48995 - DNA, 20 bp, Human papillomavirus type 92
ggtatccactgatgcacaat

SEQ ID NO: 48996 - DNA, 20 bp, Human papillomavirus type 92
gtatccactgatgcacaatt

SEQ ID NO: 48997 - DNA, 20 bp, Human papillomavirus type 92
tttaatcggccatattggtt

SEQ ID NO: 48998 - DNA, 20 bp, Human coronavirus
tgggcgtagatttttcatag

SEQ ID NO: 48999 - DNA, 20 bp, Human coronavirus
ttcatagtggtgtttatatt

SEQ ID NO: 49000 - DNA, 20 bp, Human coronavirus
tcatagtggtgtttatattc

SEQ ID NO: 49001 - DNA, 20 bp, Human coronavirus
catagtggtgtttatattca

SEQ ID NO: 49002 - DNA, 20 bp, Human coronavirus
atagtggtgtttatattcat

SEQ ID NO: 49003 - DNA, 20 bp, Human coronavirus
tcgccgacttcttaaacaag

SEQ ID NO: 49004 - DNA, 20 bp, Human coronavirus
ttaaacaagagtgttgtgtg

SEQ ID NO: 49005 - DNA, 20 bp, Human coronavirus
aacaagagtgttgtgtgcag

SEQ ID NO: 49006 - DNA, 20 bp, Human coronavirus
tgtgcagtctagcctaatac

SEQ ID NO: 49007 - DNA, 20 bp, Human coronavirus
ttatgaatgcaagtccatat

SEQ ID NO: 49008 - DNA, 20 bp, Human coronavirus
gtgggttgggtcataccctt

SEQ ID NO: 49009 - DNA, 20 bp, Human coronavirus
ggtcatacccttagccttta

SEQ ID NO: 49010 - DNA, 20 bp, Human coronavirus
gcctttatgcctgtgcaatc

SEQ ID NO: 49011 - DNA, 20 bp, Human coronavirus
atgcctgtgcaatcccggaa

SEQ ID NO: 49012 - DNA, 20 bp, Human coronavirus
tgcctgtgcaatcccggaaa

SEQ ID NO: 49013 - DNA, 20 bp, Human coronavirus
ttgatgtaattgtggcatgg

SEQ ID NO: 49014 - DNA, 20 bp, Human coronavirus
tgatgtaattgtggcatggc

SEQ ID NO: 49015 - DNA, 20 bp, Human coronavirus
gatgtaattgtggcatggca

SEQ ID NO: 49016 - DNA, 20 bp, Human coronavirus
atgtaattgtggcatggcat

SEQ ID NO: 49017 - DNA, 20 bp, Human coronavirus
tggcatggcatgttgtgcgt

SEQ ID NO: 49018 - DNA, 20 bp, Human coronavirus
gttacattgattgcgaacaa

SEQ ID NO: 49019 - DNA, 20 bp, Human coronavirus
cattgattgcgaacaagact

SEQ ID NO: 49020 - DNA, 20 bp, Human coronavirus
attgcgaacaagactcgtgt

SEQ ID NO: 49021 - DNA, 20 bp, Human coronavirus
cgaacaagactcgtgtgatt

SEQ ID NO: 49022 - DNA, 20 bp, Human coronavirus
taaaggttggattcctggta

SEQ ID NO: 49023 - DNA, 20 bp, Human coronavirus
taaaggaaacaaatctcatt

SEQ ID NO: 49024 - DNA, 20 bp, Human coronavirus
gcaaagctttgtaccttgat

SEQ ID NO: 49025 - DNA, 20 bp, Human coronavirus
caaagctttgtaccttgatt

SEQ ID NO: 49026 - DNA, 20 bp, Human coronavirus
gtaccttgattatgttcaac

SEQ ID NO: 49027 - DNA, 20 bp, Human coronavirus
taccttgattatgttcaaca

SEQ ID NO: 49028 - DNA, 20 bp, Human coronavirus
ctaaagttgtactggactct

SEQ ID NO: 49029 - DNA, 20 bp, Human coronavirus
tactggactctttaagagtt

SEQ ID NO: 49030 - DNA, 20 bp, Human coronavirus
aagagttacttttattgatg

SEQ ID NO: 49031 - DNA, 20 bp, Human coronavirus
agagttacttttattgatgg

SEQ ID NO: 49032 - DNA, 20 bp, Human coronavirus
cttttattgatggcctttct

SEQ ID NO: 49033 - DNA, 20 bp, Human coronavirus
cagctaaaatttgcattgtg

SEQ ID NO: 49034 - DNA, 20 bp, Human coronavirus
gcattgtggataatgtttat

SEQ ID NO: 49035 - DNA, 20 bp, Human coronavirus
cattgtggataatgtttata

SEQ ID NO: 49036 - DNA, 20 bp, Human coronavirus
tggataatgtttatatggcc

SEQ ID NO: 49037 - DNA, 20 bp, Human coronavirus
atatggccaaggctggtgac

SEQ ID NO: 49038 - DNA, 20 bp, Human coronavirus
aggaaagtgatgttgaagaa

SEQ ID NO: 49039 - DNA, 20 bp, Human coronavirus
aagaagatgatgtagaaggt

SEQ ID NO: 49040 - DNA, 20 bp, Human coronavirus
aactgtcacaagtgctggac

SEQ ID NO: 49041 - DNA, 20 bp, Human coronavirus
actgtcacaagtgctggaca

SEQ ID NO: 49042 - DNA, 20 bp, Human coronavirus
actagcaacacaaggctgtc

SEQ ID NO: 49043 - DNA, 20 bp, Human coronavirus
ggtgttatacaagcaacagt

SEQ ID NO: 49044 - DNA, 20 bp, Human coronavirus
tacaagcaacagtatagtca

SEQ ID NO: 49045 - DNA, 20 bp, Human coronavirus
tttgttgataccttggttaa

SEQ ID NO: 49046 - DNA, 20 bp, Human coronavirus
gttgataccttggttaataa

SEQ ID NO: 49047 - DNA, 20 bp, Human coronavirus
ttgataccttggttaataag

SEQ ID NO: 49048 - DNA, 20 bp, Human coronavirus
gtgctactggagattgttat

SEQ ID NO: 49049 - DNA, 20 bp, Human coronavirus
tgctactggagattgttatg

SEQ ID NO: 49050 - DNA, 20 bp, Human coronavirus
ttatgtctctacagggggca

SEQ ID NO: 49051 - DNA, 20 bp, Human coronavirus
tgtctctacagggggcaaat

SEQ ID NO: 49052 - DNA, 20 bp, Human coronavirus
tgtaaaactgtgcttaatgt

SEQ ID NO: 49053 - DNA, 20 bp, Human coronavirus
cttttaatgttggacgttcc

SEQ ID NO: 49054 - DNA, 20 bp, Human coronavirus
ttttaatgttggacgttcca

SEQ ID NO: 49055 - DNA, 20 bp, Human coronavirus
taatgttggacgttccattg

SEQ ID NO: 49056 - DNA, 20 bp, Human coronavirus
aatgttggacgttccattgt

SEQ ID NO: 49057 - DNA, 20 bp, Human coronavirus
atgttggacgttccattgtt

SEQ ID NO: 49058 - DNA, 20 bp, Human coronavirus
ctaactgttgatggtgttaa

SEQ ID NO: 49059 - DNA, 20 bp, Human coronavirus
atggtgttaatttcactaat

SEQ ID NO: 49060 - DNA, 20 bp, Human coronavirus
atttcactaataggtttgtg

SEQ ID NO: 49061 - DNA, 20 bp, Human coronavirus
cactaataggtttgtgcctg

SEQ ID NO: 49062 - DNA, 20 bp, Human coronavirus
actaataggtttgtgcctgt

SEQ ID NO: 49063 - DNA, 20 bp, Human coronavirus
cacttttaagcaagctaata

SEQ ID NO: 49064 - DNA, 20 bp, Human coronavirus
acttttaagcaagctaataa

SEQ ID NO: 49065 - DNA, 20 bp, Human coronavirus
taagcaagctaataacaatt

SEQ ID NO: 49066 - DNA, 20 bp, Human coronavirus
aagcaagctaataacaattg

SEQ ID NO: 49067 - DNA, 20 bp, Human coronavirus
agcaagctaataacaattgt

SEQ ID NO: 49068 - DNA, 20 bp, Human coronavirus
tgcattttggtacattgagt

SEQ ID NO: 49069 - DNA, 20 bp, Human coronavirus
tggtacattgagtcgtgaag

SEQ ID NO: 49070 - DNA, 20 bp, Human coronavirus
ggtacattgagtcgtgaaga

SEQ ID NO: 49071 - DNA, 20 bp, Human coronavirus
gtacattgagtcgtgaagat

SEQ ID NO: 49072 - DNA, 20 bp, Human coronavirus
agtcgtgaagatcttgagat

SEQ ID NO: 49073 - DNA, 20 bp, Human coronavirus
tactcagcgtattattaaag

SEQ ID NO: 49074 - DNA, 20 bp, Human coronavirus
ttaaagcccaatttaaaaca

SEQ ID NO: 49075 - DNA, 20 bp, Human coronavirus
aagcccaatttaaaacattc

SEQ ID NO: 49076 - DNA, 20 bp, Human coronavirus
aaaacattcgagaaagtaga

SEQ ID NO: 49077 - DNA, 20 bp, Human coronavirus
aaacattcgagaaagtagat

SEQ ID NO: 49078 - DNA, 20 bp, Human coronavirus
gatgttttaaaagtggatga

SEQ ID NO: 49079 - DNA, 20 bp, Human coronavirus
atgttttaaaagtggatgat

SEQ ID NO: 49080 - DNA, 20 bp, Human coronavirus
taaaagtggatgatgttgac

SEQ ID NO: 49081 - DNA, 20 bp, Human coronavirus
aaaagtggatgatgttgacg

SEQ ID NO: 49082 - DNA, 20 bp, Human coronavirus
aaagtggatgatgttgacga

SEQ ID NO: 49083 - DNA, 20 bp, Human coronavirus
accacttggctgcctgagct

SEQ ID NO: 49084 - DNA, 20 bp, Human coronavirus
gctgcctgagctttttatgc

SEQ ID NO: 49085 - DNA, 20 bp, Human coronavirus
ttatgcttagtacattacat

SEQ ID NO: 49086 - DNA, 20 bp, Human coronavirus
tatgcttagtacattacatt

SEQ ID NO: 49087 - DNA, 20 bp, Human coronavirus
atgcttagtacattacattg

SEQ ID NO: 49088 - DNA, 20 bp, Human coronavirus
cattgattgtgattcttata

SEQ ID NO: 49089 - DNA, 20 bp, Human coronavirus
attgtgattcttataaacca

SEQ ID NO: 49090 - DNA, 20 bp, Human coronavirus
tgattcttataaaccaggta

SEQ ID NO: 49091 - DNA, 20 bp, Human coronavirus
ttataaaccaggtaatactt

SEQ ID NO: 49092 - DNA, 20 bp, Human coronavirus
taaaccaggtaatactttta

SEQ ID NO: 49093 - DNA, 20 bp, Human coronavirus
ctaaaatagctggtgtttcc

SEQ ID NO: 49094 - DNA, 20 bp, Human coronavirus
cctgtatatggtctgtggat

SEQ ID NO: 49095 - DNA, 20 bp, Human coronavirus
ctgtatatggtctgtggatg

SEQ ID NO: 49096 - DNA, 20 bp, Human coronavirus
taatcagtttagttctgatt

SEQ ID NO: 49097 - DNA, 20 bp, Human coronavirus
aatcagtttagttctgattt

SEQ ID NO: 49098 - DNA, 20 bp, Human coronavirus
gctctacagtgtttaatgtc

SEQ ID NO: 49099 - DNA, 20 bp, Human coronavirus
aatgtccctaccaaagtgtt

SEQ ID NO: 49100 - DNA, 20 bp, Human coronavirus
atgtccctaccaaagtgtta

SEQ ID NO: 49101 - DNA, 20 bp, Human coronavirus
cgatatggttatcatgtgtt

SEQ ID NO: 49102 - DNA, 20 bp, Human coronavirus
tcatgtgttgcactttatta

SEQ ID NO: 49103 - DNA, 20 bp, Human coronavirus
tccagaagtgttgcgagaag

SEQ ID NO: 49104 - DNA, 20 bp, Human coronavirus
ccagaagtgttgcgagaagg

SEQ ID NO: 49105 - DNA, 20 bp, Human coronavirus
cagaagtgttgcgagaaggg

SEQ ID NO: 49106 - DNA, 20 bp, Human coronavirus
cgagaagggcttgtacgtat

SEQ ID NO: 49107 - DNA, 20 bp, Human coronavirus
tacgtatcgtgcgtactcgt

SEQ ID NO: 49108 - DNA, 20 bp, Human coronavirus
actgctagttccattgctgg

SEQ ID NO: 49109 - DNA, 20 bp, Human coronavirus
cattgctggtgctatactcg

SEQ ID NO: 49110 - DNA, 20 bp, Human coronavirus
ctggtgctatactcgctgta

SEQ ID NO: 49111 - DNA, 20 bp, Human coronavirus
ttgttttggtgttttattac

SEQ ID NO: 49112 - DNA, 20 bp, Human coronavirus
ttttggtgttttattaccta

SEQ ID NO: 49113 - DNA, 20 bp, Human coronavirus
ctctcagttggctaaagcaa

SEQ ID NO: 49114 - DNA, 20 bp, Human coronavirus
gctaaagcaatggacacatt

SEQ ID NO: 49115 - DNA, 20 bp, Human coronavirus
accaataataatggtagtga

SEQ ID NO: 49116 - DNA, 20 bp, Human coronavirus
ccaataataatggtagtgat

SEQ ID NO: 49117 - DNA, 20 bp, Human coronavirus
accaaccgcctactgcttcc

SEQ ID NO: 49118 - DNA, 20 bp, Human coronavirus
catgtaactatgcgtagtag

SEQ ID NO: 49119 - DNA, 20 bp, Human coronavirus
atgtaactatgcgtagtagt

SEQ ID NO: 49120 - DNA, 20 bp, Human coronavirus
taccattaagggttcctttt

SEQ ID NO: 49121 - DNA, 20 bp, Human coronavirus
agggttcctttttatgcgga

SEQ ID NO: 49122 - DNA, 20 bp, Human coronavirus
ctttttatgcggatcttgtg

SEQ ID NO: 49123 - DNA, 20 bp, Human coronavirus
agccaagttaaatctgacct

SEQ ID NO: 49124 - DNA, 20 bp, Human coronavirus
gccaagttaaatctgacctt

SEQ ID NO: 49125 - DNA, 20 bp, Human coronavirus
aatctgaccttgttatagat

SEQ ID NO: 49126 - DNA, 20 bp, Human coronavirus
ttatagatgctttagcttct

SEQ ID NO: 49127 - DNA, 20 bp, Human coronavirus
tagatgctttagcttctatg

SEQ ID NO: 49128 - DNA, 20 bp, Human coronavirus
ttggttaagcataagcatct

SEQ ID NO: 49129 - DNA, 20 bp, Human coronavirus
gttaagcataagcatcttta

SEQ ID NO: 49130 - DNA, 20 bp, Human coronavirus
agcataagcatctttatttg

SEQ ID NO: 49131 - DNA, 20 bp, Human coronavirus
atttgactatgtatataact

SEQ ID NO: 49132 - DNA, 20 bp, Human coronavirus
tttgactatgtatataactc

SEQ ID NO: 49133 - DNA, 20 bp, Human coronavirus
ttcttatgttggcttccctt

SEQ ID NO: 49134 - DNA, 20 bp, Human coronavirus
ttatgttggcttcccttttt

SEQ ID NO: 49135 - DNA, 20 bp, Human coronavirus
tgttggcttccctttttggt

SEQ ID NO: 49136 - DNA, 20 bp, Human coronavirus
gcttccctttttggtactta

SEQ ID NO: 49137 - DNA, 20 bp, Human coronavirus
cctttttggtacttacacat

SEQ ID NO: 49138 - DNA, 20 bp, Human coronavirus
tgcttaattttaagctgttg

SEQ ID NO: 49139 - DNA, 20 bp, Human coronavirus
attttaagctgttgggtatt

SEQ ID NO: 49140 - DNA, 20 bp, Human coronavirus
taagctgttgggtattggag

SEQ ID NO: 49141 - DNA, 20 bp, Human coronavirus
aagctgttgggtattggagg

SEQ ID NO: 49142 - DNA, 20 bp, Human coronavirus
agctgttgggtattggaggt

SEQ ID NO: 49143 - DNA, 20 bp, Human coronavirus
tgcaggctttacagagtgaa

SEQ ID NO: 49144 - DNA, 20 bp, Human coronavirus
gcaggctttacagagtgaat

SEQ ID NO: 49145 - DNA, 20 bp, Human coronavirus
caggctttacagagtgaatt

SEQ ID NO: 49146 - DNA, 20 bp, Human coronavirus
acagagtgaatttgttaata

SEQ ID NO: 49147 - DNA, 20 bp, Human coronavirus
cagagtgaatttgttaatat

SEQ ID NO: 49148 - DNA, 20 bp, Human coronavirus
taccagataaaagtgtttat

SEQ ID NO: 49149 - DNA, 20 bp, Human coronavirus
atgaccaggtagttgataat

SEQ ID NO: 49150 - DNA, 20 bp, Human coronavirus
tgaccaggtagttgataatg

SEQ ID NO: 49151 - DNA, 20 bp, Human coronavirus
ataatgtctatgttacctat

SEQ ID NO: 49152 - DNA, 20 bp, Human coronavirus
cctatgcgggtaatgtatgg

SEQ ID NO: 49153 - DNA, 20 bp, Human coronavirus
ttggtacaatttcttctaca

SEQ ID NO: 49154 - DNA, 20 bp, Human coronavirus
gtacaatttcttctacagtt

SEQ ID NO: 49155 - DNA, 20 bp, Human coronavirus
cttctacagttagattgcaa

SEQ ID NO: 49156 - DNA, 20 bp, Human coronavirus
ttctacagttagattgcaag

SEQ ID NO: 49157 - DNA, 20 bp, Human coronavirus
tacagttagattgcaagctg

SEQ ID NO: 49158 - DNA, 20 bp, Human coronavirus
aacacccagatgttgatggg

SEQ ID NO: 49159 - DNA, 20 bp, Human coronavirus
atgggttgtgcaaattacgc

SEQ ID NO: 49160 - DNA, 20 bp, Human coronavirus
tgcaaattacgcggcaagtt

SEQ ID NO: 49161 - DNA, 20 bp, Human coronavirus
cgcggcaagtttgtacaagt

SEQ ID NO: 49162 - DNA, 20 bp, Human coronavirus
gtacaagtgcctgtaggtat

SEQ ID NO: 49163 - DNA, 20 bp, Human coronavirus
ctggcattggtttacattta

SEQ ID NO: 49164 - DNA, 20 bp, Human coronavirus
gtttacatttaaaagttaat

SEQ ID NO: 49165 - DNA, 20 bp, Human coronavirus
acatttaaaagttaattgtt

SEQ ID NO: 49166 - DNA, 20 bp, Human coronavirus
catttaaaagttaattgttg

SEQ ID NO: 49167 - DNA, 20 bp, Human coronavirus
aaaagttaattgttgccgtt

SEQ ID NO: 49168 - DNA, 20 bp, Human coronavirus
gcggacaaattggtggaggt

SEQ ID NO: 49169 - DNA, 20 bp, Human coronavirus
cggacaaattggtggaggta

SEQ ID NO: 49170 - DNA, 20 bp, Human coronavirus
gtggaggtaggcttagtagg

SEQ ID NO: 49171 - DNA, 20 bp, Human coronavirus
gtaggcgttttaacacttga

SEQ ID NO: 49172 - DNA, 20 bp, Human coronavirus
taacacttgataatcaagat

SEQ ID NO: 49173 - DNA, 20 bp, Human coronavirus
tcgcttgtctttaaaagact

SEQ ID NO: 49174 - DNA, 20 bp, Human coronavirus
tctttaaaagacttgctttt

SEQ ID NO: 49175 - DNA, 20 bp, Human coronavirus
aaaagacttgcttttatatg

SEQ ID NO: 49176 - DNA, 20 bp, Human coronavirus
aaagacttgcttttatatgc

SEQ ID NO: 49177 - DNA, 20 bp, Human coronavirus
cttttatatgctgctgatcc

SEQ ID NO: 49178 - DNA, 20 bp, Human coronavirus
ttaataattatgataagagt

SEQ ID NO: 49179 - DNA, 20 bp, Human coronavirus
ataattatgataagagtgct

SEQ ID NO: 49180 - DNA, 20 bp, Human coronavirus
tgataagagtgctggctatc

SEQ ID NO: 49181 - DNA, 20 bp, Human coronavirus
aacaaatttggaaaagccag

SEQ ID NO: 49182 - DNA, 20 bp, Human coronavirus
acaaatttggaaaagccagg

SEQ ID NO: 49183 - DNA, 20 bp, Human coronavirus
ctgtagttataggcaccact

SEQ ID NO: 49184 - DNA, 20 bp, Human coronavirus
taggcaccactaaattttat

SEQ ID NO: 49185 - DNA, 20 bp, Human coronavirus
tatggtggctgggatgatat

SEQ ID NO: 49186 - DNA, 20 bp, Human coronavirus
atggtggctgggatgatatg

SEQ ID NO: 49187 - DNA, 20 bp, Human coronavirus
tggtggctgggatgatatgt

SEQ ID NO: 49188 - DNA, 20 bp, Human coronavirus
aagatcttagtatacgtgct

SEQ ID NO: 49189 - DNA, 20 bp, Human coronavirus
gtatacgtgctcttcagaag

SEQ ID NO: 49190 - DNA, 20 bp, Human coronavirus
agaagcgcttatactcacat

SEQ ID NO: 49191 - DNA, 20 bp, Human coronavirus
tactcacatgtgtatagaag

SEQ ID NO: 49192 - DNA, 20 bp, Human coronavirus
attcaacctttgtcacagaa

SEQ ID NO: 49193 - DNA, 20 bp, Human coronavirus
tgttcacaacacacaatgct

SEQ ID NO: 49194 - DNA, 20 bp, Human coronavirus
acaacacacaatgcttgtaa

SEQ ID NO: 49195 - DNA, 20 bp, Human coronavirus
taaagatggatggtgacgat

SEQ ID NO: 49196 - DNA, 20 bp, Human coronavirus
catatcctaatcctagtcgt

SEQ ID NO: 49197 - DNA, 20 bp, Human coronavirus
ggatatggaaggtagacatc

SEQ ID NO: 49198 - DNA, 20 bp, Human coronavirus
ttttaagtacttgtgatgga

SEQ ID NO: 49199 - DNA, 20 bp, Human coronavirus
taagtacttgtgatggacaa

SEQ ID NO: 49200 - DNA, 20 bp, Human coronavirus
aagtacttgtgatggacaaa

SEQ ID NO: 49201 - DNA, 20 bp, Human coronavirus
agtacttgtgatggacaaaa

SEQ ID NO: 49202 - DNA, 20 bp, Human coronavirus
tgatggacaaaagttcactg

SEQ ID NO: 49203 - DNA, 20 bp, Human coronavirus
catactagctaatgaatgta

SEQ ID NO: 49204 - DNA, 20 bp, Human coronavirus
aaattgtttgctgcagaaac

SEQ ID NO: 49205 - DNA, 20 bp, Human coronavirus
tttgctgcagaaacgcaaaa

SEQ ID NO: 49206 - DNA, 20 bp, Human coronavirus
gctgcagaaacgcaaaaggc

SEQ ID NO: 49207 - DNA, 20 bp, Human coronavirus
ctgcagaaacgcaaaaggca

SEQ ID NO: 49208 - DNA, 20 bp, Human coronavirus
ttccgcaggagaattatagt

SEQ ID NO: 49209 - DNA, 20 bp, Human coronavirus
cgcaggagaattatagtagt

SEQ ID NO: 49210 - DNA, 20 bp, Human coronavirus
tagtagtattagatttgcta

SEQ ID NO: 49211 - DNA, 20 bp, Human coronavirus
gatttgctagtgtttatagt

SEQ ID NO: 49212 - DNA, 20 bp, Human coronavirus
gctagtgtttatagtgtgct

SEQ ID NO: 49213 - DNA, 20 bp, Human coronavirus
aaaattaatgacaccactcg

SEQ ID NO: 49214 - DNA, 20 bp, Human coronavirus
aaattaatgacaccactcgt

SEQ ID NO: 49215 - DNA, 20 bp, Human coronavirus
atgacaccactcgtaagtat

SEQ ID NO: 49216 - DNA, 20 bp, Human coronavirus
actaccataaatgcattacc

SEQ ID NO: 49217 - DNA, 20 bp, Human coronavirus
ctaccataaatgcattacct

SEQ ID NO: 49218 - DNA, 20 bp, Human coronavirus
gtggcataaagctgttttta

SEQ ID NO: 49219 - DNA, 20 bp, Human coronavirus
tggcataaagctgtttttat

SEQ ID NO: 49220 - DNA, 20 bp, Human coronavirus
ttattagcccatataatagt

SEQ ID NO: 49221 - DNA, 20 bp, Human coronavirus
tattagcccatataatagtc

SEQ ID NO: 49222 - DNA, 20 bp, Human coronavirus
attagcccatataatagtca

SEQ ID NO: 49223 - DNA, 20 bp, Human coronavirus
aatgtagtactaatttattt

SEQ ID NO: 49224 - DNA, 20 bp, Human coronavirus
atttaaagattgtagcaaga

SEQ ID NO: 49225 - DNA, 20 bp, Human coronavirus
tttaaagattgtagcaagag

SEQ ID NO: 49226 - DNA, 20 bp, Human coronavirus
aaagattgtagcaagagtta

SEQ ID NO: 49227 - DNA, 20 bp, Human coronavirus
aagattgtagcaagagttat

SEQ ID NO: 49228 - DNA, 20 bp, Human coronavirus
cccacttcaattaggatttt

SEQ ID NO: 49229 - DNA, 20 bp, Human coronavirus
ccacttcaattaggattttc

SEQ ID NO: 49230 - DNA, 20 bp, Human coronavirus
aattaggattttccacagga

SEQ ID NO: 49231 - DNA, 20 bp, Human coronavirus
ggattttccacaggaattga

SEQ ID NO: 49232 - DNA, 20 bp, Human coronavirus
tccacaggaattgattttgt

SEQ ID NO: 49233 - DNA, 20 bp, Human coronavirus
gagctcacttgtctccgcta

SEQ ID NO: 49234 - DNA, 20 bp, Human coronavirus
agctcacttgtctccgctac

SEQ ID NO: 49235 - DNA, 20 bp, Human coronavirus
tctccgctactttgcaaaag

SEQ ID NO: 49236 - DNA, 20 bp, Human coronavirus
gcaaaagtagggcgtgagat

SEQ ID NO: 49237 - DNA, 20 bp, Human coronavirus
caaaagtagggcgtgagatt

SEQ ID NO: 49238 - DNA, 20 bp, Human coronavirus
cctgtgtcaaagattttgat

SEQ ID NO: 49239 - DNA, 20 bp, Human coronavirus
tgattttaagttctatgatg

SEQ ID NO: 49240 - DNA, 20 bp, Human coronavirus
gattttaagttctatgatgc

SEQ ID NO: 49241 - DNA, 20 bp, Human coronavirus
attttaagttctatgatgcc

SEQ ID NO: 49242 - DNA, 20 bp, Human coronavirus
taagttctatgatgcccaac

SEQ ID NO: 49243 - DNA, 20 bp, Human coronavirus
gaagcctatgccattcttct

SEQ ID NO: 49244 - DNA, 20 bp, Human coronavirus
aagcctatgccattcttcta

SEQ ID NO: 49245 - DNA, 20 bp, Human coronavirus
ttctattattcagatacgcc

SEQ ID NO: 49246 - DNA, 20 bp, Human coronavirus
tattattcagatacgccttg

SEQ ID NO: 49247 - DNA, 20 bp, Human coronavirus
ttcagatacgccttgtgtgt

SEQ ID NO: 49248 - DNA, 20 bp, Human coronavirus
tgccattataaatgataaag

SEQ ID NO: 49249 - DNA, 20 bp, Human coronavirus
taaatgataaagttgtggct

SEQ ID NO: 49250 - DNA, 20 bp, Human coronavirus
tggctaagatcgataaggag

SEQ ID NO: 49251 - DNA, 20 bp, Human coronavirus
tcatttttattaataataca

SEQ ID NO: 49252 - DNA, 20 bp, Human coronavirus
ttattaataatacaacatac

SEQ ID NO: 49253 - DNA, 20 bp, Human coronavirus
aagcttttaaacgttctaat

SEQ ID NO: 49254 - DNA, 20 bp, Human coronavirus
taaacgttctaataatggcg

SEQ ID NO: 49255 - DNA, 20 bp, Human coronavirus
aaacgttctaataatggcgt

SEQ ID NO: 49256 - DNA, 20 bp, Human coronavirus
aacgttctaataatggcgtt

SEQ ID NO: 49257 - DNA, 20 bp, Human coronavirus
taataatggcgtttacattt

SEQ ID NO: 49258 - DNA, 20 bp, Human coronavirus
gaacacattgtttatggtaa

SEQ ID NO: 49259 - DNA, 20 bp, Human coronavirus
aacacattgtttatggtaac

SEQ ID NO: 49260 - DNA, 20 bp, Human coronavirus
tttatggtaacttcaaccag

SEQ ID NO: 49261 - DNA, 20 bp, Human coronavirus
atggtaacttcaaccagaag

SEQ ID NO: 49262 - DNA, 20 bp, Human coronavirus
tggtaacttcaaccagaaga

SEQ ID NO: 49263 - DNA, 20 bp, Human coronavirus
ctatcctcgtttgcaagctg

SEQ ID NO: 49264 - DNA, 20 bp, Human coronavirus
tatcctcgtttgcaagctgc

SEQ ID NO: 49265 - DNA, 20 bp, Human coronavirus
gcaagctgcatctgactgga

SEQ ID NO: 49266 - DNA, 20 bp, Human coronavirus
caagctgcatctgactggaa

SEQ ID NO: 49267 - DNA, 20 bp, Human coronavirus
ttctatgcctgtattatata

SEQ ID NO: 49268 - DNA, 20 bp, Human coronavirus
gctctgggtggcagtgttgc

SEQ ID NO: 49269 - DNA, 20 bp, Human coronavirus
ctataaaaataacagagttt

SEQ ID NO: 49270 - DNA, 20 bp, Human coronavirus
tcttggaatgcagaattata

SEQ ID NO: 49271 - DNA, 20 bp, Human coronavirus
cttggaatgcagaattatat

SEQ ID NO: 49272 - DNA, 20 bp, Human coronavirus
ttggaatgcagaattatata

SEQ ID NO: 49273 - DNA, 20 bp, Human coronavirus
taaaatacaaacagcgccac

SEQ ID NO: 49274 - DNA, 20 bp, Human coronavirus
gtcttactatgctggacata

SEQ ID NO: 49275 - DNA, 20 bp, Human coronavirus
ctatgctggacatacagcct

SEQ ID NO: 49276 - DNA, 20 bp, Human coronavirus
atgtcgctattcaagaagtt

SEQ ID NO: 49277 - DNA, 20 bp, Human coronavirus
ttgaatagcgacatcaacac

SEQ ID NO: 49278 - DNA, 20 bp, Human coronavirus
aggaaaatgttgattttata

SEQ ID NO: 49279 - DNA, 20 bp, Human coronavirus
attttataaacagcatgcaa

SEQ ID NO: 49280 - DNA, 20 bp, Human coronavirus
tataaacagcatgcaattca

SEQ ID NO: 49281 - DNA, 20 bp, Human coronavirus
ataaacagcatgcaattcaa

SEQ ID NO: 49282 - DNA, 20 bp, Human coronavirus
taaacagcatgcaattcaat

SEQ ID NO: 49283 - DNA, 20 bp, Human coronavirus
ttataattacacaggcgaag

SEQ ID NO: 49284 - DNA, 20 bp, Human coronavirus
tataattacacaggcgaagg

SEQ ID NO: 49285 - DNA, 20 bp, Human coronavirus
ataattacacaggcgaaggt

SEQ ID NO: 49286 - DNA, 20 bp, Human coronavirus
taattacacaggcgaaggtc

SEQ ID NO: 49287 - DNA, 20 bp, Human coronavirus
cacaggcgaaggtcaacaaa

SEQ ID NO: 49288 - DNA, 20 bp, Human coronavirus
caaatgagctattgttaact

SEQ ID NO: 49289 - DNA, 20 bp, Human coronavirus
aaatgagctattgttaactg

SEQ ID NO: 49290 - DNA, 20 bp, Human coronavirus
ttaactgttcctacgaaagc

SEQ ID NO: 49291 - DNA, 20 bp, Human coronavirus
actgttcctacgaaagcaat

SEQ ID NO: 49292 - DNA, 20 bp, Human coronavirus
ctacgaaagcaatctgtctt

SEQ ID NO: 49293 - DNA, 20 bp, Human coronavirus
tgtaaatacatcctatagtg

SEQ ID NO: 49294 - DNA, 20 bp, Human coronavirus
gtaaatacatcctatagtgt

SEQ ID NO: 49295 - DNA, 20 bp, Human coronavirus
taaatacatcctatagtgtg

SEQ ID NO: 49296 - DNA, 20 bp, Human coronavirus
aacacaggatggtgataata

SEQ ID NO: 49297 - DNA, 20 bp, Human coronavirus
caaggtcttttagaggtctc

SEQ ID NO: 49298 - DNA, 20 bp, Human coronavirus
cacactattatgtcatgcct

SEQ ID NO: 49299 - DNA, 20 bp, Human coronavirus
acactattatgtcatgcctc

SEQ ID NO: 49300 - DNA, 20 bp, Human coronavirus
tgtcatgcctctgacttgta

SEQ ID NO: 49301 - DNA, 20 bp, Human coronavirus
taatagtaagcttactttag

SEQ ID NO: 49302 - DNA, 20 bp, Human coronavirus
ctttagaatattgggttaca

SEQ ID NO: 49303 - DNA, 20 bp, Human coronavirus
caatatagaagcttggctta

SEQ ID NO: 49304 - DNA, 20 bp, Human coronavirus
gcttaatgataagtcggtgc

SEQ ID NO: 49305 - DNA, 20 bp, Human coronavirus
atgataagtcggtgccctct

SEQ ID NO: 49306 - DNA, 20 bp, Human coronavirus
aattgggaacgtaagacatt

SEQ ID NO: 49307 - DNA, 20 bp, Human coronavirus
ggaacgtaagacattttcaa

SEQ ID NO: 49308 - DNA, 20 bp, Human coronavirus
aatccttctacttggaataa

SEQ ID NO: 49309 - DNA, 20 bp, Human coronavirus
atccttctacttggaataag

SEQ ID NO: 49310 - DNA, 20 bp, Human coronavirus
tacttggaataagagatttg

SEQ ID NO: 49311 - DNA, 20 bp, Human coronavirus
gaataagagatttggtttta

SEQ ID NO: 49312 - DNA, 20 bp, Human coronavirus
ggttttatagaagattctgt

SEQ ID NO: 49313 - DNA, 20 bp, Human coronavirus
agttggcataggtgagcact

SEQ ID NO: 49314 - DNA, 20 bp, Human coronavirus
gttggcataggtgagcactg

SEQ ID NO: 49315 - DNA, 20 bp, Human coronavirus
gcataggtgagcactgttcg

SEQ ID NO: 49316 - DNA, 20 bp, Human coronavirus
gggtcttgctgttaaaagtg

SEQ ID NO: 49317 - DNA, 20 bp, Human coronavirus
ctgttaaaagtgattattgt

SEQ ID NO: 49318 - DNA, 20 bp, Human coronavirus
ctatagcggtcgtgtttctg

SEQ ID NO: 49319 - DNA, 20 bp, Human coronavirus
ctgcggcctttcacgctaac

SEQ ID NO: 49320 - DNA, 20 bp, Human coronavirus
tgcggcctttcacgctaact

SEQ ID NO: 49321 - DNA, 20 bp, Human coronavirus
cacgctaactcttccgaacc

SEQ ID NO: 49322 - DNA, 20 bp, Human coronavirus
acgctaactcttccgaacca

SEQ ID NO: 49323 - DNA, 20 bp, Human coronavirus
attcaaacaagctctcctaa

SEQ ID NO: 49324 - DNA, 20 bp, Human coronavirus
ttcaaacaagctctcctaaa

SEQ ID NO: 49325 - DNA, 20 bp, Human coronavirus
aaacaagctctcctaaagtt

SEQ ID NO: 49326 - DNA, 20 bp, Human coronavirus
ctattgattgtgctgcattt

SEQ ID NO: 49327 - DNA, 20 bp, Human coronavirus
attgtgctgcatttgtctgt

SEQ ID NO: 49328 - DNA, 20 bp, Human coronavirus
gggacctcatttgtgtgcaa

SEQ ID NO: 49329 - DNA, 20 bp, Human coronavirus
gtgtgcaaagttataaaggc

SEQ ID NO: 49330 - DNA, 20 bp, Human coronavirus
tgtgcaaagttataaaggca

SEQ ID NO: 49331 - DNA, 20 bp, Human coronavirus
taaaggcatcaaagtgttgc

SEQ ID NO: 49332 - DNA, 20 bp, Human coronavirus
cctccactgctctcagaaaa

SEQ ID NO: 49333 - DNA, 20 bp, Human coronavirus
aagcggaagctcagatagat

SEQ ID NO: 49334 - DNA, 20 bp, Human coronavirus
ttaatggtcgtcttaccgct

SEQ ID NO: 49335 - DNA, 20 bp, Human coronavirus
atggtcgtcttaccgctctt

SEQ ID NO: 49336 - DNA, 20 bp, Human coronavirus
ccgctcttaatgcttatgtt

SEQ ID NO: 49337 - DNA, 20 bp, Human coronavirus
atgcttatgtttctcaacag

SEQ ID NO: 49338 - DNA, 20 bp, Human coronavirus
gtcctggtctgtgcattgct

SEQ ID NO: 49339 - DNA, 20 bp, Human coronavirus
ctggtgatagaggtatagct

SEQ ID NO: 49340 - DNA, 20 bp, Human coronavirus
ttttgttaatgtaaataata

SEQ ID NO: 49341 - DNA, 20 bp, Human coronavirus
tgttaatgtaaataatactt

SEQ ID NO: 49342 - DNA, 20 bp, Human coronavirus
gttaatgtaaataatacttg

SEQ ID NO: 49343 - DNA, 20 bp, Human coronavirus
aaatgaataggttacaggag

SEQ ID NO: 49344 - DNA, 20 bp, Human coronavirus
caggaggcaataaaagtctt

SEQ ID NO: 49345 - DNA, 20 bp, Human coronavirus
aatcagagctacatcaatct

SEQ ID NO: 49346 - DNA, 20 bp, Human coronavirus
gtacatatgaatattatgta

SEQ ID NO: 49347 - DNA, 20 bp, Human coronavirus
tgtaaaatggccttggtatg

SEQ ID NO: 49348 - DNA, 20 bp, Human coronavirus
tattaacggttttaatgtct

SEQ ID NO: 49349 - DNA, 20 bp, Human coronavirus
acggttttaatgtctcagaa

SEQ ID NO: 49350 - DNA, 20 bp, Human coronavirus
taatgtctcagaattagaag

SEQ ID NO: 49351 - DNA, 20 bp, Human coronavirus
aatgtctcagaattagaaga

SEQ ID NO: 49352 - DNA, 20 bp, Human coronavirus
atgtctcagaattagaagat

SEQ ID NO: 49353 - DNA, 20 bp, Human coronavirus
caacccagaaacaaacaact

SEQ ID NO: 49354 - DNA, 20 bp, Human coronavirus
aacccagaaacaaacaactt

SEQ ID NO: 49355 - DNA, 20 bp, Human coronavirus
atgtgtatagatatgaaagg

SEQ ID NO: 49356 - DNA, 20 bp, Human coronavirus
ggccgataattgaggactat

SEQ ID NO: 49357 - DNA, 20 bp, Human coronavirus
aggactatcatactctgacg

SEQ ID NO: 49358 - DNA, 20 bp, Human coronavirus
ttgagaaataatatctaaat

SEQ ID NO: 49359 - DNA, 20 bp, Human coronavirus
agaaataatatctaaatttt

SEQ ID NO: 49360 - DNA, 20 bp, Human coronavirus
taaggatgtcttttactcct

SEQ ID NO: 49361 - DNA, 20 bp, Human coronavirus
aaggatgtcttttactcctg

SEQ ID NO: 49362 - DNA, 20 bp, Human coronavirus
aggatgtcttttactcctgg

SEQ ID NO: 49363 - DNA, 20 bp, Human coronavirus
acggagtctactgggtcgct

SEQ ID NO: 49364 - DNA, 20 bp, Human coronavirus
ggtcccgatcgacaatgtca

SEQ ID NO: 49365 - DNA, 20 bp, Human coronavirus
acatcagcctggttgctagc

SEQ ID NO: 49366 - DNA, 20 bp, Human coronavirus
ctagcgacccagtagactcc

SEQ ID NO: 49367 - DNA, 20 bp, Human coronavirus
tggcaatagaacccctacct

SEQ ID NO: 49368 - DNA, 20 bp, Human coronavirus
ctagtcttgttctggcaaaa

SEQ ID NO: 49369 - DNA, 20 bp, Human coronavirus
ttctggcaaaacttggcaag

SEQ ID NO: 49370 - DNA, 20 bp, Human coronavirus
tggcaaaacttggcaaggat

SEQ ID NO: 49371 - DNA, 20 bp, Human coronavirus
gcaaggatgccactaaacct

SEQ ID NO: 49372 - DNA, 20 bp, Human coronavirus
atgaattgcgctataacggc

SEQ ID NO: 49373 - DNA, 20 bp, Human coronavirus
tgaattgcgctataacggcg

SEQ ID NO: 49374 - DNA, 20 bp, Human coronavirus
cgctataacggcgcaattag

SEQ ID NO: 49375 - DNA, 20 bp, Human coronavirus
ggtttgacagtacactttca

SEQ ID NO: 49376 - DNA, 20 bp, Human coronavirus
gacagtacactttcaggttt

SEQ ID NO: 49377 - DNA, 20 bp, Human coronavirus
tgtcggcatctggtggtaac

SEQ ID NO: 49378 - DNA, 20 bp, Human coronavirus
tagcagcaagacatccattc

SEQ ID NO: 49379 - DNA, 20 bp, Human coronavirus
tgatagagagtgccttatct

SEQ ID NO: 49380 - DNA, 20 bp, Human coronavirus
tctcgacttttctgcgaggg

SEQ ID NO: 49381 - DNA, 20 bp, Human coronavirus
tctgcgaggggttaccacca

SEQ ID NO: 49382 - DNA, 20 bp, Influenza A virus
tcaagaaactggttcatgct

SEQ ID NO: 49383 - DNA, 20 bp, Influenza A virus
atgctaatgcccaagcagaa

SEQ ID NO: 49384 - DNA, 20 bp, Influenza A virus
gcatcagaatggaccaggca

SEQ ID NO: 49385 - DNA, 20 bp, Influenza A virus
catcagaatggaccaggcaa

SEQ ID NO: 49386 - DNA, 20 bp, Influenza A virus
ttctccatgattgcctggtc

SEQ ID NO: 49387 - DNA, 20 bp, Influenza A virus
gggtcctcatcggaggactt

SEQ ID NO: 49388 - DNA, 20 bp, Influenza A virus
aatggaatgataacacagtt

SEQ ID NO: 49389 - DNA, 20 bp, Influenza A virus
gagtctctaaaaatctacag

SEQ ID NO: 49390 - DNA, 20 bp, Influenza A virus
gcttggagaagcagtaatga

SEQ ID NO: 49391 - DNA, 20 bp, Influenza A virus
gagaagcagtaatgagaatg

SEQ ID NO: 49392 - DNA, 20 bp, Influenza A virus
gcagaccaagaactgggtga

SEQ ID NO: 49393 - DNA, 20 bp, Influenza A virus
cagaccaagaactgggtgat

SEQ ID NO: 49394 - DNA, 20 bp, Influenza A virus
cttgaccggcttcgccgaga

SEQ ID NO: 49395 - DNA, 20 bp, Influenza A virus
accggcttcgccgagatcag

SEQ ID NO: 49396 - DNA, 20 bp, Influenza A virus
gccgagatcagaagtcccta

SEQ ID NO: 49397 - DNA, 20 bp, Influenza A virus
aggaaatgtcaagggattgg

SEQ ID NO: 49398 - DNA, 20 bp, Influenza A virus
gttaatgctcattcccaagc

SEQ ID NO: 49399 - DNA, 20 bp, Influenza A virus
atgctcattcccaagcagaa

SEQ ID NO: 49400 - DNA, 20 bp, Influenza A virus
ccaagcagaaagtgacaggg

SEQ ID NO: 49401 - DNA, 20 bp, Influenza A virus
gcattagaatggaccaggca

SEQ ID NO: 49402 - DNA, 20 bp, Influenza A virus
gggtcctcatcggaggactt

SEQ ID NO: 49403 - DNA, 20 bp, Influenza A virus
aatggaatgataacacagtt

SEQ ID NO: 49404 - DNA, 20 bp, Influenza A virus
gagtctctgaaactctacag

SEQ ID NO: 49405 - DNA, 20 bp, Influenza A virus
tccaagtgaatctctgtaga

SEQ ID NO: 49406 - DNA, 20 bp, Influenza A virus
cagagactcgaactgtgtta

SEQ ID NO: 49407 - DNA, 20 bp, Hepatitis C virus
tgtcttcacgcggaaagcgc

SEQ ID NO: 49408 - DNA, 20 bp, Hepatitis C virus
acgcggaaagcgcctagcca

SEQ ID NO: 49409 - DNA, 20 bp, Hepatitis C virus
gtacgagtgtcgtgcagcct

SEQ ID NO: 49410 - DNA, 20 bp, Hepatitis C virus
cgcagaccactatggctctc

SEQ ID NO: 49411 - DNA, 20 bp, Hepatitis C virus
ccgcgtgaagacagaagttc

SEQ ID NO: 49412 - DNA, 20 bp, Hepatitis C virus
ccgggtggcggacagatcgt

SEQ ID NO: 49413 - DNA, 20 bp, Hepatitis C virus
gtggagtatacgtgttgccg

SEQ ID NO: 49414 - DNA, 20 bp, Hepatitis C virus
ccgcgcaggggcccacgatt

SEQ ID NO: 49415 - DNA, 20 bp, Hepatitis C virus
ggtaaagtcatcgataccct

SEQ ID NO: 49416 - DNA, 20 bp, Hepatitis C virus
gccgacctcatggggtacat

SEQ ID NO: 49417 - DNA, 20 bp, Hepatitis C virus
cgacgcctcctacaggagcg

SEQ ID NO: 49418 - DNA, 20 bp, Hepatitis C virus
gggtatcgatgactttaccc

SEQ ID NO: 49419 - DNA, 20 bp, Hepatitis C virus
tgtccaggacggcaatacat

SEQ ID NO: 49420 - DNA, 20 bp, Hepatitis C virus
ctccgacgtacctgactgcc

SEQ ID NO: 49421 - DNA, 20 bp, Hepatitis C virus
ccgtcctggacacaaggtac

SEQ ID NO: 49422 - DNA, 20 bp, Hepatitis C virus
gtcccccgctgtgggtatgg

SEQ ID NO: 49423 - DNA, 20 bp, Hepatitis C virus
accccagaccttgttcgaca

SEQ ID NO: 49424 - DNA, 20 bp, Hepatitis C virus
ccccagaccttgttcgacat

SEQ ID NO: 49425 - DNA, 20 bp, Hepatitis C virus
ttcgacataatggccggggc

SEQ ID NO: 49426 - DNA, 20 bp, Hepatitis C virus
gacataatggccggggccca

SEQ ID NO: 49427 - DNA, 20 bp, Hepatitis C virus
cttcaggcagggatggggcc

SEQ ID NO: 49428 - DNA, 20 bp, Hepatitis C virus
ttcaggcagggatggggccc

SEQ ID NO: 49429 - DNA, 20 bp, Hepatitis C virus
aggcagggatggggcccctt

SEQ ID NO: 49430 - DNA, 20 bp, Hepatitis C virus
acagatgctaacatcaccgg

SEQ ID NO: 49431 - DNA, 20 bp, Hepatitis C virus
tgatgacagaccatactgct

SEQ ID NO: 49432 - DNA, 20 bp, Hepatitis C virus
ctgctgaagtcccagcggcc

SEQ ID NO: 49433 - DNA, 20 bp, Hepatitis C virus
gggtgctcgtggatgaactc

SEQ ID NO: 49434 - DNA, 20 bp, Hepatitis C virus
ggtgctcgtggatgaactcc

SEQ ID NO: 49435 - DNA, 20 bp, Hepatitis C virus
atccacgagcacccaaacca

SEQ ID NO: 49436 - DNA, 20 bp, Hepatitis C virus
agcaggaacacatctttctc

SEQ ID NO: 49437 - DNA, 20 bp, Hepatitis C virus
caactggaccaggggggagc

SEQ ID NO: 49438 - DNA, 20 bp, Hepatitis C virus
ttgaatgcagcagcggatgt

SEQ ID NO: 49439 - DNA, 20 bp, Hepatitis C virus
aatgcagcagcggatgttgc

SEQ ID NO: 49440 - DNA, 20 bp, Hepatitis C virus
ctcactgcggtcacgatcct

SEQ ID NO: 49441 - DNA, 20 bp, Hepatitis C virus
gagaacctggtcacgctgaa

SEQ ID NO: 49442 - DNA, 20 bp, Hepatitis C virus
agcgtgaccaggttctccaa

SEQ ID NO: 49443 - DNA, 20 bp, Hepatitis C virus
tccaaggctgcttctgtctg

SEQ ID NO: 49444 - DNA, 20 bp, Hepatitis C virus
agtcccatggaaatcaaggt

SEQ ID NO: 49445 - DNA, 20 bp, Hepatitis C virus
gtcccatggaaatcaaggtc

SEQ ID NO: 49446 - DNA, 20 bp, Hepatitis C virus
cggagatattctttgcgggc

SEQ ID NO: 49447 - DNA, 20 bp, Hepatitis C virus
atttccatgggactaaatat

SEQ ID NO: 49448 - DNA, 20 bp, Hepatitis C virus
ccatgggactaaatattaca

SEQ ID NO: 49449 - DNA, 20 bp, Hepatitis C virus
ctacggctacccagaccttc

SEQ ID NO: 49450 - DNA, 20 bp, Hepatitis C virus
tacggctacccagaccttcc

SEQ ID NO: 49451 - DNA, 20 bp, Hepatitis C virus
ctaggtacaacagtaggggg

SEQ ID NO: 49452 - DNA, 20 bp, Hepatitis C virus
tatggactgtttatcatgga

SEQ ID NO: 49453 - DNA, 20 bp, Hepatitis C virus
atcatggagcaggttcgaga

SEQ ID NO: 49454 - DNA, 20 bp, Hepatitis C virus
ctctggaggtcccgttatgt

SEQ ID NO: 49455 - DNA, 20 bp, Hepatitis C virus
tgtgcccttcggggcatgtt

SEQ ID NO: 49456 - DNA, 20 bp, Hepatitis C virus
ggggcatgttgcggggatct

SEQ ID NO: 49457 - DNA, 20 bp, Hepatitis C virus
cggggatctttagggctgct

SEQ ID NO: 49458 - DNA, 20 bp, Hepatitis C virus
agggctgctgtgtgcaccag

SEQ ID NO: 49459 - DNA, 20 bp, Hepatitis C virus
atgtcgcgtgcctatgggat

SEQ ID NO: 49460 - DNA, 20 bp, Hepatitis C virus
caactggtgctaaactgacc

SEQ ID NO: 49461 - DNA, 20 bp, Hepatitis C virus
agcaccagttgtaacggtgc

SEQ ID NO: 49462 - DNA, 20 bp, Hepatitis C virus
gcaccagttgtaacggtgcg

SEQ ID NO: 49463 - DNA, 20 bp, Hepatitis C virus
taacggtgcggttcccagtg

SEQ ID NO: 49464 - DNA, 20 bp, Hepatitis C virus
cccgcagccaacgtcgcggc

SEQ ID NO: 49465 - DNA, 20 bp, Hepatitis C virus
ccgcagccaacgtcgcggcc

SEQ ID NO: 49466 - DNA, 20 bp, Hepatitis C virus
cagacggtctttcaccggag

SEQ ID NO: 49467 - DNA, 20 bp, Hepatitis C virus
caccggaggcgacatatcgg

SEQ ID NO: 49468 - DNA, 20 bp, Hepatitis C virus
accggaggcgacatatcggt

SEQ ID NO: 49469 - DNA, 20 bp, Hepatitis C virus
acttctcgtacctaactgcc

SEQ ID NO: 49470 - DNA, 20 bp, Hepatitis C virus
tcgtacctaactgcctacca

SEQ ID NO: 49471 - DNA, 20 bp, Hepatitis C virus
ggacgagatgtggaagtgtc

SEQ ID NO: 49472 - DNA, 20 bp, Hepatitis C virus
agccgcacgagacacttcca

SEQ ID NO: 49473 - DNA, 20 bp, Hepatitis C virus
cacatctcgtcccaacttgg

SEQ ID NO: 49474 - DNA, 20 bp, Hepatitis C virus
tgggtcatattgagctggag

SEQ ID NO: 49475 - DNA, 20 bp, Hepatitis C virus
agctggagggcaagccagca

SEQ ID NO: 49476 - DNA, 20 bp, Hepatitis C virus
cagacaaagaggtgttgtat

SEQ ID NO: 49477 - DNA, 20 bp, Hepatitis C virus
tatcaacaatacgatgagat

SEQ ID NO: 49478 - DNA, 20 bp, Hepatitis C virus
cctgagcttgttcgatatat

SEQ ID NO: 49479 - DNA, 20 bp, Hepatitis C virus
tggcgttcactgcttcagtc

SEQ ID NO: 49480 - DNA, 20 bp, Hepatitis C virus
actgcttcagtcaccagtcc

SEQ ID NO: 49481 - DNA, 20 bp, Hepatitis C virus
agtcaccagtcccctgacga

SEQ ID NO: 49482 - DNA, 20 bp, Hepatitis C virus
tttaacatactcggggggtg

SEQ ID NO: 49483 - DNA, 20 bp, Hepatitis C virus
ttaacatactcggggggtgg

SEQ ID NO: 49484 - DNA, 20 bp, Hepatitis C virus
atccactgtaccgctccctc

SEQ ID NO: 49485 - DNA, 20 bp, Hepatitis C virus
tgccagcgctccctgggctg

SEQ ID NO: 49486 - DNA, 20 bp, Hepatitis C virus
atttcctgtcaaaagggata

SEQ ID NO: 49487 - DNA, 20 bp, Hepatitis C virus
cctgtcaaaagggatacaag

SEQ ID NO: 49488 - DNA, 20 bp, Hepatitis C virus
ctgtcaaaagggatacaagg

SEQ ID NO: 49489 - DNA, 20 bp, Hepatitis C virus
acatcacaccgtccccccgc

SEQ ID NO: 49490 - DNA, 20 bp, Hepatitis C virus
catcacgggggccacagaag

SEQ ID NO: 49491 - DNA, 20 bp, Hepatitis C virus
tttactgaagtggatggagt

SEQ ID NO: 49492 - DNA, 20 bp, Hepatitis C virus
actgaagtggatggagtgag

SEQ ID NO: 49493 - DNA, 20 bp, Hepatitis C virus
ctgaagtggatggagtgaga

SEQ ID NO: 49494 - DNA, 20 bp, Hepatitis C virus
agtaaagaactcagcagccg

SEQ ID NO: 49495 - DNA, 20 bp, Hepatitis C virus
aaggccacttgccagacgca

SEQ ID NO: 49496 - DNA, 20 bp, Hepatitis C virus
ccagacgcataggcctcatc

SEQ ID NO: 49497 - DNA, 20 bp, Hepatitis C virus
ccgccataacaagttggcgt

SEQ ID NO: 49498 - DNA, 20 bp, Hepatitis C virus
gcgtccactagctcagcgtc

SEQ ID NO: 49499 - DNA, 20 bp, Hepatitis C virus
ccaccacggggcgctccacc

SEQ ID NO: 49500 - DNA, 20 bp, Hepatitis C virus
agctggacggctctaatgtg

SEQ ID NO: 49501 - DNA, 20 bp, Hepatitis C virus
ttcagctagcgcggctagcg

SEQ ID NO: 49502 - DNA, 20 bp, Hepatitis C virus
tcagctagcgcggctagcgc

SEQ ID NO: 49503 - DNA, 20 bp, Hepatitis C virus
cagctagcgcggctagcgcc

SEQ ID NO: 49504 - DNA, 20 bp, Hepatitis C virus
ttggaccggcgccctgataa

SEQ ID NO: 49505 - DNA, 20 bp, Hepatitis C virus
gaccggcgccctgataacac

SEQ ID NO: 49506 - DNA, 20 bp, Hepatitis C virus
agacatcataacctagtcta

SEQ ID NO: 49507 - DNA, 20 bp, Hepatitis C virus
tgatgtctcaacagggagtt

SEQ ID NO: 49508 - DNA, 20 bp, Hepatitis C virus
ctgagtgggctgatgggcag

SEQ ID NO: 49509 - DNA, 20 bp, Hepatitis C virus
gggtatagtgcgaaggacgt

SEQ ID NO: 49510 - DNA, 20 bp, Hepatitis C virus
gctccttgtccagcagggcc

SEQ ID NO: 49511 - DNA, 20 bp, Hepatitis C virus
tccagcagggccattaacca

SEQ ID NO: 49512 - DNA, 20 bp, Hepatitis C virus
accagatccgctccgtctgg

SEQ ID NO: 49513 - DNA, 20 bp, Hepatitis C virus
ctggaagacaccacaactcc

SEQ ID NO: 49514 - DNA, 20 bp, Hepatitis C virus
aaccggaggccaggaaagtg

SEQ ID NO: 49515 - DNA, 20 bp, Hepatitis C virus
actgcggaggccctatgttc

SEQ ID NO: 49516 - DNA, 20 bp, Hepatitis C virus
ctgcggaggccctatgttca

SEQ ID NO: 49517 - DNA, 20 bp, Hepatitis C virus
ctgttgaacatagggcctcc

SEQ ID NO: 49518 - DNA, 20 bp, Hepatitis C virus
aacatagggcctccgcagta

SEQ ID NO: 49519 - DNA, 20 bp, Hepatitis C virus
cttgtctgcggagatgattt

SEQ ID NO: 49520 - DNA, 20 bp, Hepatitis C virus
ttgtctgcggagatgatttg

SEQ ID NO: 49521 - DNA, 20 bp, Hepatitis C virus
tctgcggagatgatttggtc

SEQ ID NO: 49522 - DNA, 20 bp, Hepatitis C virus
ggtcgtggtggctgagagtg

SEQ ID NO: 49523 - DNA, 20 bp, Hepatitis C virus
gtcgtggtggctgagagtga

SEQ ID NO: 49524 - DNA, 20 bp, Influenza A virus
catcctaagtgctgggttct

SEQ ID NO: 49525 - DNA, 20 bp, Influenza A virus
atcctaagtgctgggttctt

SEQ ID NO: 49526 - DNA, 20 bp, Influenza A virus
ttctcctgtcttcctgatgt

SEQ ID NO: 49527 - DNA, 20 bp, Influenza A virus
tcctgtcttcctgatgtgta

SEQ ID NO: 49528 - DNA, 20 bp, Influenza A virus
ctgatgtgtacttcttgatt

SEQ ID NO: 49529 - DNA, 20 bp, Influenza A virus
attatccaaaaatctacaaa

SEQ ID NO: 49530 - DNA, 20 bp, Influenza A virus
tccaaaaatctacaaaactt

SEQ ID NO: 49531 - DNA, 20 bp, Influenza A virus
ttttgaaagagtcgaaaggc

SEQ ID NO: 49532 - DNA, 20 bp, Influenza A virus
tgaaagagtcgaaaggctaa

SEQ ID NO: 49533 - DNA, 20 bp, Influenza A virus
gaaagagtcgaaaggctaaa

SEQ ID NO: 49534 - DNA, 20 bp, Influenza A virus
caaaatttctcctttgatgg

SEQ ID NO: 49535 - DNA, 20 bp, Influenza A virus
tgcaatcctggagttcttct

SEQ ID NO: 49536 - DNA, 20 bp, Influenza A virus
gcaatcctggagttcttctt

SEQ ID NO: 49537 - DNA, 20 bp, Influenza A virus
caatcctggagttcttcttt

SEQ ID NO: 49538 - DNA, 20 bp, Influenza A virus
ttctttcttctctttggtta

SEQ ID NO: 49539 - DNA, 20 bp, Influenza A virus
attattgctgctaggaacat

SEQ ID NO: 49540 - DNA, 20 bp, Influenza A virus
ttgctgctaggaacatagtg

SEQ ID NO: 49541 - DNA, 20 bp, Influenza A virus
ctgctaggaacatagtgaga

SEQ ID NO: 49542 - DNA, 20 bp, Influenza A virus
attggagatgtgccacagca

SEQ ID NO: 49543 - DNA, 20 bp, Influenza A virus
ttggagatgtgccacagcac

SEQ ID NO: 49544 - DNA, 20 bp, Influenza A virus
cgggcaatcttcaaacattg

SEQ ID NO: 49545 - DNA, 20 bp, Influenza A virus
aaacattgaagataagagtg

SEQ ID NO: 49546 - DNA, 20 bp, Influenza A virus
aagataagagtgcatgaggg

SEQ ID NO: 49547 - DNA, 20 bp, Influenza A virus
acaatggttgggagaagagc

SEQ ID NO: 49548 - DNA, 20 bp, Influenza A virus
ggagaagagcaacagccata

SEQ ID NO: 49549 - DNA, 20 bp, Influenza A virus
taagacattttcagaaggat

SEQ ID NO: 49550 - DNA, 20 bp, Influenza A virus
aagacattttcagaaggatg

SEQ ID NO: 49551 - DNA, 20 bp, Influenza A virus
agacattttcagaaggatgc

SEQ ID NO: 49552 - DNA, 20 bp, Influenza A virus
tcagaaggatgcgaaagtgc

SEQ ID NO: 49553 - DNA, 20 bp, Influenza A virus
cagaaggatgcgaaagtgct

SEQ ID NO: 49554 - DNA, 20 bp, Influenza A virus
ctcatcgtcaatgatgtggg

SEQ ID NO: 49555 - DNA, 20 bp, Influenza A virus
atctcccacatcattgacga

SEQ ID NO: 49556 - DNA, 20 bp, Influenza A virus
acgatgagtaagttattgtc

SEQ ID NO: 49557 - DNA, 20 bp, Influenza A virus
ttgtcagtttctctgttccc

SEQ ID NO: 49558 - DNA, 20 bp, Influenza A virus
tcagtttctctgttccctgt

SEQ ID NO: 49559 - DNA, 20 bp, Influenza A virus
gtgagaactctgttccaaca

SEQ ID NO: 49560 - DNA, 20 bp, Influenza A virus
tgagaactctgttccaacaa

SEQ ID NO: 49561 - DNA, 20 bp, Influenza A virus
caacaaatgagggatgtgct

SEQ ID NO: 49562 - DNA, 20 bp, Influenza A virus
ggacatttgataccgcacag

SEQ ID NO: 49563 - DNA, 20 bp, Influenza A virus
gataccgcacagataataaa

SEQ ID NO: 49564 - DNA, 20 bp, Influenza A virus
tgaggggattcctcattctg

SEQ ID NO: 49565 - DNA, 20 bp, Influenza A virus
ctcattctgggcaaagaaga

SEQ ID NO: 49566 - DNA, 20 bp, Influenza A virus
tgggcaaagaagacaggaga

SEQ ID NO: 49567 - DNA, 20 bp, Influenza A virus
agcatcaatgaactgagcaa

SEQ ID NO: 49568 - DNA, 20 bp, Influenza A virus
ctcagttcattgatgcttaa

SEQ ID NO: 49569 - DNA, 20 bp, Hepatitis C virus
gcagggctcttctatcagca

SEQ ID NO: 49570 - DNA, 20 bp, Hepatitis C virus
tatcagcacaaattcaactc

SEQ ID NO: 49571 - DNA, 20 bp, Hepatitis C virus
aactcttcaggctgtcctga

SEQ ID NO: 49572 - DNA, 20 bp, Hepatitis C virus
aggctgtcctgagaggttgg

SEQ ID NO: 49573 - DNA, 20 bp, Hepatitis C virus
gccagctgccgacgccttac

SEQ ID NO: 49574 - DNA, 20 bp, Hepatitis C virus
gttcggttgtacctggatga

SEQ ID NO: 49575 - DNA, 20 bp, Hepatitis C virus
ggttgtacctggatgaactc

SEQ ID NO: 49576 - DNA, 20 bp, Hepatitis C virus
tacctggatgaactcaactg

SEQ ID NO: 49577 - DNA, 20 bp, Hepatitis C virus
accaaagtgtgcggagcgcc

SEQ ID NO: 49578 - DNA, 20 bp, Hepatitis C virus
tgtcatcggaggggtgggca

SEQ ID NO: 49579 - DNA, 20 bp, Hepatitis C virus
ctgctgtccaccacacagtg

SEQ ID NO: 49580 - DNA, 20 bp, Hepatitis C virus
cagatcacagcgttcgcccc

SEQ ID NO: 49581 - DNA, 20 bp, Hepatitis C virus
tgtccttcctcgtgttcttc

SEQ ID NO: 49582 - DNA, 20 bp, Hepatitis C virus
ctcgtgttcttctgctttgc

SEQ ID NO: 49583 - DNA, 20 bp, Hepatitis C virus
ttctgctttgcgtggtatct

SEQ ID NO: 49584 - DNA, 20 bp, Hepatitis C virus
tgctttgcgtggtatctgaa

SEQ ID NO: 49585 - DNA, 20 bp, Hepatitis C virus
gcgtggtatctgaagggtag

SEQ ID NO: 49586 - DNA, 20 bp, Hepatitis C virus
gacatcaccaaactactcct

SEQ ID NO: 49587 - DNA, 20 bp, Hepatitis C virus
acatcaccaaactactcctg

SEQ ID NO: 49588 - DNA, 20 bp, Hepatitis C virus
ggacccctttggattcttca

SEQ ID NO: 49589 - DNA, 20 bp, Hepatitis C virus
ggattcttcaagccagtttg

SEQ ID NO: 49590 - DNA, 20 bp, Hepatitis C virus
gattcttcaagccagtttgc

SEQ ID NO: 49591 - DNA, 20 bp, Hepatitis C virus
tcccgaatggagaccaagct

SEQ ID NO: 49592 - DNA, 20 bp, Hepatitis C virus
atgatgtcaccgcacgcggc

SEQ ID NO: 49593 - DNA, 20 bp, Hepatitis C virus
gtctccattcgggagaagac

SEQ ID NO: 49594 - DNA, 20 bp, Hepatitis C virus
gggagaagacgactggttcc

SEQ ID NO: 49595 - DNA, 20 bp, Hepatitis C virus
tgggctggcccgctcctcaa

SEQ ID NO: 49596 - DNA, 20 bp, Hepatitis C virus
ccgctcattgacaccctgca

SEQ ID NO: 49597 - DNA, 20 bp, Hepatitis C virus
aggagcgggccagcccacaa

SEQ ID NO: 49598 - DNA, 20 bp, Hepatitis C virus
gtccacattggtatacatct

SEQ ID NO: 49599 - DNA, 20 bp, Hepatitis C virus
gtatacatctggatgacagg

SEQ ID NO: 49600 - DNA, 20 bp, Hepatitis C virus
atccctgtggagaacctaga

SEQ ID NO: 49601 - DNA, 20 bp, Hepatitis C virus
tccctgtggagaacctagag

SEQ ID NO: 49602 - DNA, 20 bp, Hepatitis C virus
acggacaactcctctccacc

SEQ ID NO: 49603 - DNA, 20 bp, Hepatitis C virus
tccgtgaacaccggggatct

SEQ ID NO: 49604 - DNA, 20 bp, Hepatitis C virus
tctctaggttctccacaggg

SEQ ID NO: 49605 - DNA, 20 bp, Hepatitis C virus
cttgccgacggcgggtgctc

SEQ ID NO: 49606 - DNA, 20 bp, Hepatitis C virus
ccgacggcgggtgctcagga

SEQ ID NO: 49607 - DNA, 20 bp, Hepatitis C virus
tgacataataatttgtgacg

SEQ ID NO: 49608 - DNA, 20 bp, Hepatitis C virus
gtgacgagtgccactccacg

SEQ ID NO: 49609 - DNA, 20 bp, Hepatitis C virus
tgacgagtgccactccacgg

SEQ ID NO: 49610 - DNA, 20 bp, Hepatitis C virus
ggcatcaatgccgtggccta

SEQ ID NO: 49611 - DNA, 20 bp, Hepatitis C virus
acgtgtctgtcatcccgacc

SEQ ID NO: 49612 - DNA, 20 bp, Hepatitis C virus
atgcccaatgcgaccagctt

SEQ ID NO: 49613 - DNA, 20 bp, Hepatitis C virus
gactcgtccgtcctctgtga

SEQ ID NO: 49614 - DNA, 20 bp, Hepatitis C virus
gtatgagctcacgcccgccg

SEQ ID NO: 49615 - DNA, 20 bp, Hepatitis C virus
agaatgaagtcaccctgacg

SEQ ID NO: 49616 - DNA, 20 bp, Hepatitis C virus
gcggcgtcctggctgctctg

SEQ ID NO: 49617 - DNA, 20 bp, Hepatitis C virus
ggtgattgggtgcgtcaggg

SEQ ID NO: 49618 - DNA, 20 bp, Hepatitis C virus
gtgattgggtgcgtcagggt

SEQ ID NO: 49619 - DNA, 20 bp, Hepatitis C virus
ggtgcgtcagggtgacttca

SEQ ID NO: 49620 - DNA, 20 bp, Hepatitis C virus
aagcagaaggccctcggcct

SEQ ID NO: 49621 - DNA, 20 bp, Hepatitis C virus
tcacccctgctgtccagacc

SEQ ID NO: 49622 - DNA, 20 bp, Hepatitis C virus
tgggcgaagcacatgtggaa

SEQ ID NO: 49623 - DNA, 20 bp, Hepatitis C virus
cacatgtgcttcgcccagaa

SEQ ID NO: 49624 - DNA, 20 bp, Hepatitis C virus
gcccagaagacctcgagttt

SEQ ID NO: 49625 - DNA, 20 bp, Hepatitis C virus
gactggggaaggtcctcgtg

SEQ ID NO: 49626 - DNA, 20 bp, Hepatitis C virus
ttgcagggtatggcgcgggc

SEQ ID NO: 49627 - DNA, 20 bp, Hepatitis C virus
cagggtatggcgcgggcgtg

SEQ ID NO: 49628 - DNA, 20 bp, Hepatitis C virus
tagcattcaagatcatgagc

SEQ ID NO: 49629 - DNA, 20 bp, Hepatitis C virus
aagatcatgagcggtgaggt

SEQ ID NO: 49630 - DNA, 20 bp, Hepatitis C virus
cagtgaggctgctgagtatg

SEQ ID NO: 49631 - DNA, 20 bp, Hepatitis C virus
cccattaacgcctacaccac

SEQ ID NO: 49632 - DNA, 20 bp, Hepatitis C virus
acgcctacaccacgggcccc

SEQ ID NO: 49633 - DNA, 20 bp, Hepatitis C virus
atggggaacgtcccactcca

SEQ ID NO: 49634 - DNA, 20 bp, Hepatitis C virus
ctgcaggtcctaggaccgac

SEQ ID NO: 49635 - DNA, 20 bp, Hepatitis C virus
agagtaggactccacgagta

SEQ ID NO: 49636 - DNA, 20 bp, Hepatitis C virus
ccttgcgagcccgaaccgga

SEQ ID NO: 49637 - DNA, 20 bp, Hepatitis C virus
cgagcccgaaccggacgtag

SEQ ID NO: 49638 - DNA, 20 bp, Hepatitis C virus
acgtccatgctcactgatcc

SEQ ID NO: 49639 - DNA, 20 bp, Hepatitis C virus
gggctcgcaaggtaattgcg

SEQ ID NO: 49640 - DNA, 20 bp, Hepatitis C virus
tgcggaagtctcggagattc

SEQ ID NO: 49641 - DNA, 20 bp, Hepatitis C virus
gcccgggccctgcccgtttg

SEQ ID NO: 49642 - DNA, 20 bp, Hepatitis C virus
gggcgcggccggactacaac

SEQ ID NO: 49643 - DNA, 20 bp, Hepatitis C virus
ggcgcggccggactacaacc

SEQ ID NO: 49644 - DNA, 20 bp, Hepatitis C virus
ttccacgtctctactagcgg

SEQ ID NO: 49645 - DNA, 20 bp, Hepatitis C virus
tggctgcccccccgactccg

SEQ ID NO: 49646 - DNA, 20 bp, Hepatitis C virus
agtcctattcttccatgccc

SEQ ID NO: 49647 - DNA, 20 bp, Hepatitis C virus
ttccatgccccccctggagg

SEQ ID NO: 49648 - DNA, 20 bp, Hepatitis C virus
catgccccccctggaggggg

SEQ ID NO: 49649 - DNA, 20 bp, Hepatitis C virus
ctatccgtagaggaagcttg

SEQ ID NO: 49650 - DNA, 20 bp, Hepatitis C virus
cagcctgacgcccccacatt

SEQ ID NO: 49651 - DNA, 20 bp, Hepatitis C virus
agccaaatccaagtttggct

SEQ ID NO: 49652 - DNA, 20 bp, Hepatitis C virus
tgccccatagccaaacttgg

SEQ ID NO: 49653 - DNA, 20 bp, Hepatitis C virus
gccccatagccaaacttgga

SEQ ID NO: 49654 - DNA, 20 bp, Hepatitis C virus
cccgacctgggcgtgcgcgt

SEQ ID NO: 49655 - DNA, 20 bp, Hepatitis C virus
gcaagctccccctggccgtg

SEQ ID NO: 49656 - DNA, 20 bp, Hepatitis C virus
gaatccgtaggagcttccca

SEQ ID NO: 49657 - DNA, 20 bp, Hepatitis C virus
ccatcacggccagggggagc

SEQ ID NO: 49658 - DNA, 20 bp, Hepatitis C virus
ctaaccacgtcgtacagggc

SEQ ID NO: 49659 - DNA, 20 bp, Hepatitis C virus
ccaattcaaggggggaaaac

SEQ ID NO: 49660 - DNA, 20 bp, Hepatitis C virus
aaggggggaaaactgcggct

SEQ ID NO: 49661 - DNA, 20 bp, Hepatitis C virus
ctacatcaaggcccgggcag

SEQ ID NO: 49662 - DNA, 20 bp, Hepatitis C virus
atgtagcaagtgagggtgtt

SEQ ID NO: 49663 - DNA, 20 bp, Hepatitis C virus
ccacagctagttgtcagtac

SEQ ID NO: 49664 - DNA, 20 bp, Hepatitis C virus
cccgtgaccctacaaccccc

SEQ ID NO: 49665 - DNA, 20 bp, Hepatitis C virus
ctggctaggcaacataatca

SEQ ID NO: 49666 - DNA, 20 bp, Hepatitis C virus
tgttgcctagccaggaattg

SEQ ID NO: 49667 - DNA, 20 bp, Hepatitis C virus
cctagccaggaattgactgg

SEQ ID NO: 49668 - DNA, 20 bp, Hepatitis C virus
actggagtgtgtcttgctgt

SEQ ID NO: 49669 - DNA, 20 bp, Hepatitis C virus
gggtcccgcccttgcgagct

SEQ ID NO: 49670 - DNA, 20 bp, Hepatitis C virus
cgagcttggagacaccgggc

SEQ ID NO: 49671 - DNA, 20 bp, Hepatitis C virus
gagacaccgggcccggagcg

SEQ ID NO: 49672 - DNA, 20 bp, Hepatitis C virus
tgtccagaggaggcagggct

SEQ ID NO: 49673 - DNA, 20 bp, Hepatitis C virus
ccacatatggcagccctgcc

SEQ ID NO: 49674 - DNA, 20 bp, Human papillomavirus type 10
cttttgtgtagaaattgtgg

SEQ ID NO: 49675 - DNA, 20 bp, Human papillomavirus type 10
tgtgtagaaattgtggaata

SEQ ID NO: 49676 - DNA, 20 bp, Human papillomavirus type 10
gtgtagaaattgtggaatac

SEQ ID NO: 49677 - DNA, 20 bp, Human papillomavirus type 10
tgtagaaattgtggaatacc

SEQ ID NO: 49678 - DNA, 20 bp, Human papillomavirus type 10
tggaatacctttggaggacc

SEQ ID NO: 49679 - DNA, 20 bp, Human papillomavirus type 10
gttacgatgtctgtcttttt

SEQ ID NO: 49680 - DNA, 20 bp, Human papillomavirus type 10
cgatgtctgtctttttcttc

SEQ ID NO: 49681 - DNA, 20 bp, Human papillomavirus type 10
ttcttcccttaccagcggtt

SEQ ID NO: 49682 - DNA, 20 bp, Human papillomavirus type 10
tcttcccttaccagcggttt

SEQ ID NO: 49683 - DNA, 20 bp, Human papillomavirus type 10
cttcccttaccagcggtttg

SEQ ID NO: 49684 - DNA, 20 bp, Human papillomavirus type 10
gatgaagaagattatacaga

SEQ ID NO: 49685 - DNA, 20 bp, Human papillomavirus type 10
tacagatgcggtggaaccag

SEQ ID NO: 49686 - DNA, 20 bp, Human papillomavirus type 10
gtacattctgttaccaccct

SEQ ID NO: 49687 - DNA, 20 bp, Human papillomavirus type 10
tacattctgttaccacccta

SEQ ID NO: 49688 - DNA, 20 bp, Human papillomavirus type 10
tgttaccaccctatacgctt

SEQ ID NO: 49689 - DNA, 20 bp, Human papillomavirus type 10
gagctaccggacagtggcta

SEQ ID NO: 49690 - DNA, 20 bp, Human papillomavirus type 10
ggcctttgctgactgtctcc

SEQ ID NO: 49691 - DNA, 20 bp, Human papillomavirus type 10
gcctttgctgactgtctccc

SEQ ID NO: 49692 - DNA, 20 bp, Human papillomavirus type 10
gctgactgtctccccagctt

SEQ ID NO: 49693 - DNA, 20 bp, Human papillomavirus type 10
ctgactgtctccccagcttt

SEQ ID NO: 49694 - DNA, 20 bp, Human papillomavirus type 10
tgtgattatgcacacataca

SEQ ID NO: 49695 - DNA, 20 bp, Human papillomavirus type 10
tgcacacatacaagtgctac

SEQ ID NO: 49696 - DNA, 20 bp, Human papillomavirus type 10
tgctggtacggtacaaacgt

SEQ ID NO: 49697 - DNA, 20 bp, Human papillomavirus type 10
ttggcacgtttgtaccgtac

SEQ ID NO: 49698 - DNA, 20 bp, Human papillomavirus type 10
tggcacgtttgtaccgtacc

SEQ ID NO: 49699 - DNA, 20 bp, Human papillomavirus type 10
tttagtgttttatggaccag

SEQ ID NO: 49700 - DNA, 20 bp, Human papillomavirus type 10
agtgttttatggaccagcag

SEQ ID NO: 49701 - DNA, 20 bp, Human papillomavirus type 10
gtgttttatggaccagcaga

SEQ ID NO: 49702 - DNA, 20 bp, Human papillomavirus type 10
tatggaccagcagacactgg

SEQ ID NO: 49703 - DNA, 20 bp, Human papillomavirus type 10
atggaccagcagacactggc

SEQ ID NO: 49704 - DNA, 20 bp, Human papillomavirus type 10
aatgatcaaaattggaaatg

SEQ ID NO: 49705 - DNA, 20 bp, Human papillomavirus type 10
gaaatgcttttttcgaaggt

SEQ ID NO: 49706 - DNA, 20 bp, Human papillomavirus type 10
tttcgaaggttatgggcacg

SEQ ID NO: 49707 - DNA, 20 bp, Human papillomavirus type 10
ttcgaaggttatgggcacgt

SEQ ID NO: 49708 - DNA, 20 bp, Human papillomavirus type 10
tcgaaggttatgggcacgtt

SEQ ID NO: 49709 - DNA, 20 bp, Human papillomavirus type 10
tacacatgaaaatatgaaca

SEQ ID NO: 49710 - DNA, 20 bp, Human papillomavirus type 10
tgtgaatttcaaggatgacg

SEQ ID NO: 49711 - DNA, 20 bp, Human papillomavirus type 10
caaggatgacgcttgtgtat

SEQ ID NO: 49712 - DNA, 20 bp, Human papillomavirus type 10
aaggatgacgcttgtgtata

SEQ ID NO: 49713 - DNA, 20 bp, Human papillomavirus type 10
tgtatatggggaaacaggca

SEQ ID NO: 49714 - DNA, 20 bp, Human papillomavirus type 10
cacccagaaggccgcggaac

SEQ ID NO: 49715 - DNA, 20 bp, Human papillomavirus type 10
tccacccgctcgttccgcgg

SEQ ID NO: 49716 - DNA, 20 bp, Human papillomavirus type 10
cgcggccttctgggtggaat

SEQ ID NO: 49717 - DNA, 20 bp, Human papillomavirus type 10
tgggtggaatctttggaccc

SEQ ID NO: 49718 - DNA, 20 bp, Human papillomavirus type 10
ggacccttgtcgctgctgct

SEQ ID NO: 49719 - DNA, 20 bp, Human papillomavirus type 10
ctgggctttttttgtgctgc

SEQ ID NO: 49720 - DNA, 20 bp, Human papillomavirus type 10
ttttgtgctgctgctgtgtt

SEQ ID NO: 49721 - DNA, 20 bp, Human papillomavirus type 10
tttgtgctgctgctgtgttt

SEQ ID NO: 49722 - DNA, 20 bp, Human papillomavirus type 10
ttgtgctgctgctgtgtttg

SEQ ID NO: 49723 - DNA, 20 bp, Human papillomavirus type 10
tgtgctgctgctgtgtttgt

SEQ ID NO: 49724 - DNA, 20 bp, Human papillomavirus type 10
ttcccaaagtagagggcacc

SEQ ID NO: 49725 - DNA, 20 bp, Human papillomavirus type 10
ccaaagtagagggcaccacc

SEQ ID NO: 49726 - DNA, 20 bp, Human papillomavirus type 10
gcagatcgcattttgcagtg

SEQ ID NO: 49727 - DNA, 20 bp, Human papillomavirus type 10
tgcagtggggtagccttggt

SEQ ID NO: 49728 - DNA, 20 bp, Human papillomavirus type 10
gcagtggggtagccttggtg

SEQ ID NO: 49729 - DNA, 20 bp, Human papillomavirus type 10
tctggtactagtggctttga

SEQ ID NO: 49730 - DNA, 20 bp, Human papillomavirus type 10
ctggtactagtggctttgaa

SEQ ID NO: 49731 - DNA, 20 bp, Human papillomavirus type 10
tggtactagtggctttgaag

SEQ ID NO: 49732 - DNA, 20 bp, Human papillomavirus type 10
gaagttacatcctctgccac

SEQ ID NO: 49733 - DNA, 20 bp, Human papillomavirus type 10
aagttacatcctctgccaca

SEQ ID NO: 49734 - DNA, 20 bp, Human papillomavirus type 10
gccctatagccccaatcgag

SEQ ID NO: 49735 - DNA, 20 bp, Human papillomavirus type 10
aaatggaacctttacttgct

SEQ ID NO: 49736 - DNA, 20 bp, Human papillomavirus type 10
acttgctccagctgcctctg

SEQ ID NO: 49737 - DNA, 20 bp, Human papillomavirus type 10
cttgctccagctgcctctga

SEQ ID NO: 49738 - DNA, 20 bp, Human papillomavirus type 10
ctccagctgcctctgacact

SEQ ID NO: 49739 - DNA, 20 bp, Human papillomavirus type 10
gtgtacctgcctcccactcc

SEQ ID NO: 49740 - DNA, 20 bp, Human papillomavirus type 10
tcagcacggacgactatgtg

SEQ ID NO: 49741 - DNA, 20 bp, Human papillomavirus type 10
actattatgcaggcacttca

SEQ ID NO: 49742 - DNA, 20 bp, Human papillomavirus type 10
ctattatgcaggcacttcac

SEQ ID NO: 49743 - DNA, 20 bp, Human papillomavirus type 10
gtgcgtgtcacatagtcgtc

SEQ ID NO: 49744 - DNA, 20 bp, Human papillomavirus type 10
actgctttacaattaaataa

SEQ ID NO: 49745 - DNA, 20 bp, Human papillomavirus type 10
ctgctttacaattaaataag

SEQ ID NO: 49746 - DNA, 20 bp, Human papillomavirus type 10
acaattaaataagtctgacg

SEQ ID NO: 49747 - DNA, 20 bp, Human papillomavirus type 10
caattaaataagtctgacgt

SEQ ID NO: 49748 - DNA, 20 bp, Human papillomavirus type 10
aataagtctgacgtgcctat

SEQ ID NO: 49749 - DNA, 20 bp, Human papillomavirus type 10
ttcagttgtgtaaggtaaca

SEQ ID NO: 49750 - DNA, 20 bp, Human papillomavirus type 10
tcagttgtgtaaggtaacat

SEQ ID NO: 49751 - DNA, 20 bp, Human papillomavirus type 10
cagttgtgtaaggtaacatt

SEQ ID NO: 49752 - DNA, 20 bp, Human papillomavirus type 10
agttgtgtaaggtaacattg

SEQ ID NO: 49753 - DNA, 20 bp, Human papillomavirus type 10
tgtaaggtaacattgacccc

SEQ ID NO: 49754 - DNA, 20 bp, Human papillomavirus type 10
gtcacatagttttatatttt

SEQ ID NO: 49755 - DNA, 20 bp, Human papillomavirus type 10
tcacatagttttatattttt

SEQ ID NO: 49756 - DNA, 20 bp, Human papillomavirus type 10
tatattttttaatttgtgta

SEQ ID NO: 49757 - DNA, 20 bp, Human papillomavirus type 10
atattttttaatttgtgtaa

SEQ ID NO: 49758 - DNA, 20 bp, Human papillomavirus type 10
tattttttaatttgtgtaat

SEQ ID NO: 49759 - DNA, 20 bp, Human papillomavirus type 184
ccatttagagttgaaacgag

SEQ ID NO: 49760 - DNA, 20 bp, Human papillomavirus type 184
agagttgaaacgagttgtaa

SEQ ID NO: 49761 - DNA, 20 bp, Human papillomavirus type 184
gagttgaaacgagttgtaag

SEQ ID NO: 49762 - DNA, 20 bp, Human papillomavirus type 184
aaacgagttgtaagtcctgt

SEQ ID NO: 49763 - DNA, 20 bp, Human papillomavirus type 184
taagtcctgtgggacaggtg

SEQ ID NO: 49764 - DNA, 20 bp, Human papillomavirus type 184
gaaaaaagctcagactctga

SEQ ID NO: 49765 - DNA, 20 bp, Human papillomavirus type 184
aaaaaagctcagactctgat

SEQ ID NO: 49766 - DNA, 20 bp, Human papillomavirus type 184
cctggcactgtacaacaaac

SEQ ID NO: 49767 - DNA, 20 bp, Human papillomavirus type 184
cctgtttgttgtacagtgcc

SEQ ID NO: 49768 - DNA, 20 bp, Human papillomavirus type 184
gttgtacagtgccagggaat

SEQ ID NO: 49769 - DNA, 20 bp, Human papillomavirus type 184
actttgatgaaaatcctgca

SEQ ID NO: 49770 - DNA, 20 bp, Human papillomavirus type 184
ctttgatgaaaatcctgcaa

SEQ ID NO: 49771 - DNA, 20 bp, Human papillomavirus type 184
gatgaaaatcctgcaaatgt

SEQ ID NO: 49772 - DNA, 20 bp, Human papillomavirus type 184
atgaaaatcctgcaaatgtg

SEQ ID NO: 49773 - DNA, 20 bp, Human papillomavirus type 184
ccttatacaaactgggactc

SEQ ID NO: 49774 - DNA, 20 bp, Human papillomavirus type 184
acgagccagccgaaaccacc

SEQ ID NO: 49775 - DNA, 20 bp, Human papillomavirus type 184
gcggtggggtagaggggtat

SEQ ID NO: 49776 - DNA, 20 bp, Human papillomavirus type 184
cggtggggtagaggggtatg

SEQ ID NO: 49777 - DNA, 20 bp, Human papillomavirus type 184
cggctggctcgtcaacaggc

SEQ ID NO: 49778 - DNA, 20 bp, Human papillomavirus type 184
ggctggctcgtcaacaggct

SEQ ID NO: 49779 - DNA, 20 bp, Human papillomavirus type 184
agcccggttggagtctgtcc

SEQ ID NO: 49780 - DNA, 20 bp, Human papillomavirus type 184
gagtctgtcccagctcctga

SEQ ID NO: 49781 - DNA, 20 bp, Human papillomavirus type 184
cgtcaacaggtttatcaaga

SEQ ID NO: 49782 - DNA, 20 bp, Human papillomavirus type 184
atcaagacttggaagacttc

SEQ ID NO: 49783 - DNA, 20 bp, Human papillomavirus type 184
tcaagacttggaagacttca

SEQ ID NO: 49784 - DNA, 20 bp, Human papillomavirus type 184
gaacgggtaaaggcactggt

SEQ ID NO: 49785 - DNA, 20 bp, Human papillomavirus type 184
ttcatcgttagctccatcta

SEQ ID NO: 49786 - DNA, 20 bp, Human papillomavirus type 184
atcgttagctccatctatta

SEQ ID NO: 49787 - DNA, 20 bp, Human papillomavirus type 184
gctccatctattacacgccc

SEQ ID NO: 49788 - DNA, 20 bp, Human papillomavirus type 184
cacgccctttgcctaaacca

SEQ ID NO: 49789 - DNA, 20 bp, Human papillomavirus type 184
gcaagaagaagtaggtgaaa

SEQ ID NO: 49790 - DNA, 20 bp, Human papillomavirus type 184
caagaagaagtaggtgaaac

SEQ ID NO: 49791 - DNA, 20 bp, Human papillomavirus type 184
tcactgctgatccaggaaca

SEQ ID NO: 49792 - DNA, 20 bp, Human papillomavirus type 184
ggtggtggggaggtagtcac

SEQ ID NO: 49793 - DNA, 20 bp, Human papillomavirus type 184
ctggatcagcagtgataact

SEQ ID NO: 49794 - DNA, 20 bp, Human papillomavirus type 184
aatttgaatttgaaaatccc

SEQ ID NO: 49795 - DNA, 20 bp, Human papillomavirus type 184
gaatttgaaaatcccgcctt

SEQ ID NO: 49796 - DNA, 20 bp, Human papillomavirus type 184
aatttgaaaatcccgccttt

SEQ ID NO: 49797 - DNA, 20 bp, Human papillomavirus type 184
gaaaatcccgcctttgatga

SEQ ID NO: 49798 - DNA, 20 bp, Human papillomavirus type 184
aaaatcccgcctttgatgat

SEQ ID NO: 49799 - DNA, 20 bp, Human papillomavirus type 184
gaaaccttttattccctata

SEQ ID NO: 49800 - DNA, 20 bp, Human papillomavirus type 184
aaaccttttattccctatat

SEQ ID NO: 49801 - DNA, 20 bp, Human papillomavirus type 184
tattccctatatacattttg

SEQ ID NO: 49802 - DNA, 20 bp, Human papillomavirus type 184
attccctatatacattttgg

SEQ ID NO: 49803 - DNA, 20 bp, Human papillomavirus type 184
ttccctatatacattttgga

SEQ ID NO: 49804 - DNA, 20 bp, Human papillomavirus type 184
agtacggatgaatatgtaga

SEQ ID NO: 49805 - DNA, 20 bp, Human papillomavirus type 184
atttttatgctggatctgaa

SEQ ID NO: 49806 - DNA, 20 bp, Human papillomavirus type 184
tttttatgctggatctgaaa

SEQ ID NO: 49807 - DNA, 20 bp, Human papillomavirus type 184
ttatgctggatctgaaaggc

SEQ ID NO: 49808 - DNA, 20 bp, Human papillomavirus type 184
tatgctggatctgaaaggct

SEQ ID NO: 49809 - DNA, 20 bp, Human papillomavirus type 184
caaattggaagaggcggtcc

SEQ ID NO: 49810 - DNA, 20 bp, Human papillomavirus type 184
gaagaggcggtccaataggt

SEQ ID NO: 49811 - DNA, 20 bp, Human papillomavirus type 184
gtacatcaggtcatcccttg

SEQ ID NO: 49812 - DNA, 20 bp, Human papillomavirus type 184
tttaataagtataatgatac

SEQ ID NO: 49813 - DNA, 20 bp, Human papillomavirus type 184
aataagtataatgatacaga

SEQ ID NO: 49814 - DNA, 20 bp, Human papillomavirus type 184
tcctcctatacaactagttc

SEQ ID NO: 49815 - DNA, 20 bp, Human papillomavirus type 184
atactactattcaggatggt

SEQ ID NO: 49816 - DNA, 20 bp, Human papillomavirus type 184
aggatggtgacatgtgtgat

SEQ ID NO: 49817 - DNA, 20 bp, Human papillomavirus type 184
ggagctgcaaattttaaaac

SEQ ID NO: 49818 - DNA, 20 bp, Human papillomavirus type 184
gagctgcaaattttaaaaca

SEQ ID NO: 49819 - DNA, 20 bp, Human papillomavirus type 184
atgttagaggaggtgttgat

SEQ ID NO: 49820 - DNA, 20 bp, Human papillomavirus type 184
tgttagaggaggtgttgatg

SEQ ID NO: 49821 - DNA, 20 bp, Human papillomavirus type 184
gaggaggtgttgatggcgat

SEQ ID NO: 49822 - DNA, 20 bp, Human papillomavirus type 184
atggcgatgcattgccatta

SEQ ID NO: 49823 - DNA, 20 bp, Human papillomavirus type 184
ccattaactaactttattta

SEQ ID NO: 49824 - DNA, 20 bp, Human papillomavirus type 184
cggtaagtttttggcgccag

SEQ ID NO: 49825 - DNA, 20 bp, Human papillomavirus type 184
ggtaagtttttggcgccaga

SEQ ID NO: 49826 - DNA, 20 bp, Human papillomavirus type 184
ttggcgccagaggcaaactt

SEQ ID NO: 49827 - DNA, 20 bp, Human papillomavirus type 184
tggcgccagaggcaaactta

SEQ ID NO: 49828 - DNA, 20 bp, Human papillomavirus type 184
ggcgccagaggcaaacttag

SEQ ID NO: 49829 - DNA, 20 bp, Influenza B virus
agacagacaacggtagacca

SEQ ID NO: 49830 - DNA, 20 bp, Influenza B virus
aatacatcaagaattgaaaa

SEQ ID NO: 49831 - DNA, 20 bp, Influenza B virus
aaaagaacccttcattaaga

SEQ ID NO: 49832 - DNA, 20 bp, Influenza B virus
attaagaatgaagtgggcca

SEQ ID NO: 49833 - DNA, 20 bp, Influenza B virus
agaatgaagtgggccatgtg

SEQ ID NO: 49834 - DNA, 20 bp, Influenza B virus
gaaaaggtctacgaaagctt

SEQ ID NO: 49835 - DNA, 20 bp, Influenza B virus
aaaaggtctacgaaagcttt

SEQ ID NO: 49836 - DNA, 20 bp, Influenza B virus
tttctcagaaagatgagact

SEQ ID NO: 49837 - DNA, 20 bp, Influenza B virus
ttctcagaaagatgagactt

SEQ ID NO: 49838 - DNA, 20 bp, Influenza B virus
tctcagaaagatgagacttg

SEQ ID NO: 49839 - DNA, 20 bp, Influenza B virus
aagggaacgatgataactcc

SEQ ID NO: 49840 - DNA, 20 bp, Influenza B virus
tactggcatacatgcttgag

SEQ ID NO: 49841 - DNA, 20 bp, Influenza B virus
agagagaactagttgcccga

SEQ ID NO: 49842 - DNA, 20 bp, Influenza B virus
ttcgggcaactagttctctc

SEQ ID NO: 49843 - DNA, 20 bp, Influenza B virus
gggcaactagttctctctca

SEQ ID NO: 49844 - DNA, 20 bp, Influenza B virus
catcaaacccactagagcta

SEQ ID NO: 49845 - DNA, 20 bp, Influenza B virus
caaataagactgtgatagac

SEQ ID NO: 49846 - DNA, 20 bp, Influenza B virus
aaaatcatgtctggcagccc

SEQ ID NO: 49847 - DNA, 20 bp, Influenza B virus
aaatcatgtctggcagccct

SEQ ID NO: 49848 - DNA, 20 bp, Influenza B virus
taaaggttcagtgtctatca

SEQ ID NO: 49849 - DNA, 20 bp, Influenza B virus
catgtaagatgtggcgaatg

SEQ ID NO: 49850 - DNA, 20 bp, Influenza B virus
aaaaaaagccaaatgagaat

SEQ ID NO: 49851 - DNA, 20 bp, Influenza B virus
agccaaaaaggaggacatga

SEQ ID NO: 49852 - DNA, 20 bp, Influenza B virus
ttaaatctttcatgtcctcc

SEQ ID NO: 49853 - DNA, 20 bp, Influenza B virus
aatctttcatgtcctccttt

SEQ ID NO: 49854 - DNA, 20 bp, Influenza B virus
ctgaataggagcaatgacct

SEQ ID NO: 49855 - DNA, 20 bp, Influenza B virus
tgaataggagcaatgacctt

SEQ ID NO: 49856 - DNA, 20 bp, Influenza B virus
ttgatcaatggggatatgag

SEQ ID NO: 49857 - DNA, 20 bp, Influenza B virus
tgatcaatggggatatgagg

SEQ ID NO: 49858 - DNA, 20 bp, Influenza B virus
gatcaatggggatatgagga

SEQ ID NO: 49859 - DNA, 20 bp, Influenza B virus
gaatcacaagcacagctaat

SEQ ID NO: 49860 - DNA, 20 bp, Influenza B virus
gtaagtgttttgtaccagtt

SEQ ID NO: 49861 - DNA, 20 bp, Influenza B virus
tgtaccagttctttggttgt

SEQ ID NO: 49862 - DNA, 20 bp, Influenza B virus
gtaccagttctttggttgtt

SEQ ID NO: 49863 - DNA, 20 bp, Influenza B virus
taccagttctttggttgttc

SEQ ID NO: 49864 - DNA, 20 bp, Influenza B virus
caagagcagtgctcaaacaa

SEQ ID NO: 49865 - DNA, 20 bp, Influenza B virus
tgaaaactgaccaattcata

SEQ ID NO: 49866 - DNA, 20 bp, Influenza B virus
ataaaattgttgcctttctg

SEQ ID NO: 49867 - DNA, 20 bp, Influenza B virus
ttgcctttctgtttttcgcc

SEQ ID NO: 49868 - DNA, 20 bp, Influenza B virus
cctttctgtttttcgccacc

SEQ ID NO: 49869 - DNA, 20 bp, Influenza B virus
cttgttagtggcaaatatga

SEQ ID NO: 49870 - DNA, 20 bp, Influenza B virus
ttgttagtggcaaatatgac

SEQ ID NO: 49871 - DNA, 20 bp, Influenza B virus
ttagtggcaaatatgaccct

SEQ ID NO: 49872 - DNA, 20 bp, Influenza B virus
gtggcaaatatgaccctgat

SEQ ID NO: 49873 - DNA, 20 bp, Influenza B virus
gagatttcaaaaccattgag

SEQ ID NO: 49874 - DNA, 20 bp, Human coronavirus
tcagatctcattaaatctaa

SEQ ID NO: 49875 - DNA, 20 bp, Human coronavirus
aatctaaactttttaaacaa

SEQ ID NO: 49876 - DNA, 20 bp, Human coronavirus
ttaaacaagattccctgtta

SEQ ID NO: 49877 - DNA, 20 bp, Human coronavirus
taaacaagattccctgttat

SEQ ID NO: 49878 - DNA, 20 bp, Human coronavirus
aaacaagattccctgttatc

SEQ ID NO: 49879 - DNA, 20 bp, Human coronavirus
gattcgtttatgataatcat

SEQ ID NO: 49880 - DNA, 20 bp, Human coronavirus
gtttatgataatcatgtgaa

SEQ ID NO: 49881 - DNA, 20 bp, Human coronavirus
atgataatcatgtgaagata

SEQ ID NO: 49882 - DNA, 20 bp, Human coronavirus
tgataatcatgtgaagatag

SEQ ID NO: 49883 - DNA, 20 bp, Human coronavirus
tcgctgcattcttggacaag

SEQ ID NO: 49884 - DNA, 20 bp, Human coronavirus
caggtaatatgatggatggt

SEQ ID NO: 49885 - DNA, 20 bp, Human coronavirus
aggtaatatgatggatggtt

SEQ ID NO: 49886 - DNA, 20 bp, Human coronavirus
ttcttgtccattgtgttgta

SEQ ID NO: 49887 - DNA, 20 bp, Human coronavirus
tcttgtccattgtgttgtac

SEQ ID NO: 49888 - DNA, 20 bp, Human coronavirus
cttgtccattgtgttgtaca

SEQ ID NO: 49889 - DNA, 20 bp, Human coronavirus
aacaaaatcatattcttggc

SEQ ID NO: 49890 - DNA, 20 bp, Human coronavirus
ttggcgttaataattcttgg

SEQ ID NO: 49891 - DNA, 20 bp, Human coronavirus
gcgttaataattcttggtgt

SEQ ID NO: 49892 - DNA, 20 bp, Human coronavirus
ataattcttggtgtaggcaa

SEQ ID NO: 49893 - DNA, 20 bp, Human coronavirus
ttggtgtaggcaactgttgc

SEQ ID NO: 49894 - DNA, 20 bp, Human coronavirus
gtattatagataatatgtac

SEQ ID NO: 49895 - DNA, 20 bp, Human coronavirus
tattatagataatatgtaca

SEQ ID NO: 49896 - DNA, 20 bp, Human coronavirus
tagataatatgtacatgggt

SEQ ID NO: 49897 - DNA, 20 bp, Human coronavirus
ttccctattgtcatgaatga

SEQ ID NO: 49898 - DNA, 20 bp, Human coronavirus
tccctattgtcatgaatgat

SEQ ID NO: 49899 - DNA, 20 bp, Human coronavirus
tgttaaaggtgatattataa

SEQ ID NO: 49900 - DNA, 20 bp, Human coronavirus
gttaaaggtgatattataaa

SEQ ID NO: 49901 - DNA, 20 bp, Human coronavirus
ttaaaggtgatattataaat

SEQ ID NO: 49902 - DNA, 20 bp, Human coronavirus
aaggtgatattataaatgtt

SEQ ID NO: 49903 - DNA, 20 bp, Human coronavirus
taaatgttgctagacttgtt

SEQ ID NO: 49904 - DNA, 20 bp, Human coronavirus
ttatgtgaatgtagcttgtc

SEQ ID NO: 49905 - DNA, 20 bp, Human coronavirus
tgtgaatgtagcttgtctta

SEQ ID NO: 49906 - DNA, 20 bp, Human coronavirus
tcttatgttgcagcatatta

SEQ ID NO: 49907 - DNA, 20 bp, Human coronavirus
tgttgcagcatattaatctt

SEQ ID NO: 49908 - DNA, 20 bp, Human coronavirus
cagcatattaatcttaaatt

SEQ ID NO: 49909 - DNA, 20 bp, Human coronavirus
ttaatggttataagattggc

SEQ ID NO: 49910 - DNA, 20 bp, Human coronavirus
taatggttataagattggct

SEQ ID NO: 49911 - DNA, 20 bp, Human coronavirus
aatggttataagattggctg

SEQ ID NO: 49912 - DNA, 20 bp, Human coronavirus
atggttataagattggctgt

SEQ ID NO: 49913 - DNA, 20 bp, Human coronavirus
taagattggctgtaattgtg

SEQ ID NO: 49914 - DNA, 20 bp, Human coronavirus
atactaactttaagttagtt

SEQ ID NO: 49915 - DNA, 20 bp, Human coronavirus
tactaactttaagttagttg

SEQ ID NO: 49916 - DNA, 20 bp, Human coronavirus
aagttagttggacatgatat

SEQ ID NO: 49917 - DNA, 20 bp, Human coronavirus
agttagttggacatgatatt

SEQ ID NO: 49918 - DNA, 20 bp, Human coronavirus
gttggacatgatatttgtgc

SEQ ID NO: 49919 - DNA, 20 bp, Human coronavirus
gttttattaggcatattgtc

SEQ ID NO: 49920 - DNA, 20 bp, Human coronavirus
tattaggcatattgtctatg

SEQ ID NO: 49921 - DNA, 20 bp, Human coronavirus
attaggcatattgtctatgg

SEQ ID NO: 49922 - DNA, 20 bp, Human coronavirus
ttaggcatattgtctatggt

SEQ ID NO: 49923 - DNA, 20 bp, Human coronavirus
ggcatattgtctatggttgt

SEQ ID NO: 49924 - DNA, 20 bp, Human coronavirus
tagatacttttgtgggatgt

SEQ ID NO: 49925 - DNA, 20 bp, Human coronavirus
agatacttttgtgggatgtg

SEQ ID NO: 49926 - DNA, 20 bp, Human coronavirus
gatacttttgtgggatgtgt

SEQ ID NO: 49927 - DNA, 20 bp, Human coronavirus
tgtgggatgtgtacgtaaat

SEQ ID NO: 49928 - DNA, 20 bp, Human coronavirus
gtgggatgtgtacgtaaatg

SEQ ID NO: 49929 - DNA, 20 bp, Human coronavirus
ttgttattcagatggtgtta

SEQ ID NO: 49930 - DNA, 20 bp, Human coronavirus
ttattcagatggtgttatga

SEQ ID NO: 49931 - DNA, 20 bp, Human coronavirus
ttcagatggtgttatgaaga

SEQ ID NO: 49932 - DNA, 20 bp, Human coronavirus
agatggtgttatgaagaatg

SEQ ID NO: 49933 - DNA, 20 bp, Human coronavirus
tgaagaatgcttctttgtat

SEQ ID NO: 49934 - DNA, 20 bp, Human coronavirus
aacagttgtgtcttaccaga

SEQ ID NO: 49935 - DNA, 20 bp, Human coronavirus
acagttgtgtcttaccagat

SEQ ID NO: 49936 - DNA, 20 bp, Human coronavirus
tgtcttaccagatgcagggc

SEQ ID NO: 49937 - DNA, 20 bp, Human coronavirus
ccagatgcagggctgtcaac

SEQ ID NO: 49938 - DNA, 20 bp, Human coronavirus
ttttgacagtctctttacaa

SEQ ID NO: 49939 - DNA, 20 bp, Human coronavirus
tacagttgccagttaaggac

SEQ ID NO: 49940 - DNA, 20 bp, Human coronavirus
ccagttaaggactacgtcca

SEQ ID NO: 49941 - DNA, 20 bp, Human coronavirus
aggactacgtccagactgtt

SEQ ID NO: 49942 - DNA, 20 bp, Human coronavirus
atgttattgcttggctctat

SEQ ID NO: 49943 - DNA, 20 bp, Human coronavirus
ttgcttggctctatgcagct

SEQ ID NO: 49944 - DNA, 20 bp, Human coronavirus
aacgtatggcagacctagca

SEQ ID NO: 49945 - DNA, 20 bp, Human coronavirus
ctaacatgtataaagaggct

SEQ ID NO: 49946 - DNA, 20 bp, Human coronavirus
atgataagaagagtaaagtt

SEQ ID NO: 49947 - DNA, 20 bp, Human coronavirus
tttccgctttgcagacaatg

SEQ ID NO: 49948 - DNA, 20 bp, Human coronavirus
ccgctttgcagacaatgctt

SEQ ID NO: 49949 - DNA, 20 bp, Human coronavirus
ctattaaacctgaggctact

SEQ ID NO: 49950 - DNA, 20 bp, Human coronavirus
aacctgaggctactattaac

SEQ ID NO: 49951 - DNA, 20 bp, Human coronavirus
accaagattcttatggtggt

SEQ ID NO: 49952 - DNA, 20 bp, Human coronavirus
ttatggtggtgcctcagttt

SEQ ID NO: 49953 - DNA, 20 bp, Human coronavirus
tggtggtgcctcagtttgta

SEQ ID NO: 49954 - DNA, 20 bp, Human coronavirus
gttgaagtaggtttagttgg

SEQ ID NO: 49955 - DNA, 20 bp, Human coronavirus
aagtaggtttagttggtgtt

SEQ ID NO: 49956 - DNA, 20 bp, Human coronavirus
agttggtgttttaactttag

SEQ ID NO: 49957 - DNA, 20 bp, Human coronavirus
gttggtgttttaactttaga

SEQ ID NO: 49958 - DNA, 20 bp, Human coronavirus
gtgttttaactttagataac

SEQ ID NO: 49959 - DNA, 20 bp, Human coronavirus
ccattacaaagagttaggtg

SEQ ID NO: 49960 - DNA, 20 bp, Human coronavirus
caaagagttaggtgtagtta

SEQ ID NO: 49961 - DNA, 20 bp, Human coronavirus
ggtgtagttatgaacttaga

SEQ ID NO: 49962 - DNA, 20 bp, Human coronavirus
tgaacttagatgttgacaca

SEQ ID NO: 49963 - DNA, 20 bp, Human coronavirus
gatgttgacacacaccgtta

SEQ ID NO: 49964 - DNA, 20 bp, Human coronavirus
tcatttgaggaacagaatga

SEQ ID NO: 49965 - DNA, 20 bp, Human coronavirus
gaggaacagaatgaaattta

SEQ ID NO: 49966 - DNA, 20 bp, Human coronavirus
aggaacagaatgaaatttat

SEQ ID NO: 49967 - DNA, 20 bp, Human coronavirus
atgcatatactaaacgtaat

SEQ ID NO: 49968 - DNA, 20 bp, Human coronavirus
tgcatatactaaacgtaatg

SEQ ID NO: 49969 - DNA, 20 bp, Human coronavirus
tcctaaatgtgatcgtgcta

SEQ ID NO: 49970 - DNA, 20 bp, Human coronavirus
tgcgtattgttagtagttta

SEQ ID NO: 49971 - DNA, 20 bp, Human coronavirus
gcgtattgttagtagtttag

SEQ ID NO: 49972 - DNA, 20 bp, Human coronavirus
cgtattgttagtagtttagt

SEQ ID NO: 49973 - DNA, 20 bp, Human coronavirus
ttagtagtttagttttggcc

SEQ ID NO: 49974 - DNA, 20 bp, Human coronavirus
ttttgttgatgatttattga

SEQ ID NO: 49975 - DNA, 20 bp, Human coronavirus
tgttgatgatttattgaaga

SEQ ID NO: 49976 - DNA, 20 bp, Human coronavirus
gttgatgatttattgaagac

SEQ ID NO: 49977 - DNA, 20 bp, Human coronavirus
ttgatgatttattgaagact

SEQ ID NO: 49978 - DNA, 20 bp, Human coronavirus
atgatttattgaagactgac

SEQ ID NO: 49979 - DNA, 20 bp, Human coronavirus
tatagatgattttaataaga

SEQ ID NO: 49980 - DNA, 20 bp, Human coronavirus
taataagatagctagttgta

SEQ ID NO: 49981 - DNA, 20 bp, Human coronavirus
aataagatagctagttgtaa

SEQ ID NO: 49982 - DNA, 20 bp, Human coronavirus
ataagatagctagttgtaaa

SEQ ID NO: 49983 - DNA, 20 bp, Human coronavirus
taaatggacagaagttgatg

SEQ ID NO: 49984 - DNA, 20 bp, Human coronavirus
tctagtgtttatagtgttcc

SEQ ID NO: 49985 - DNA, 20 bp, Human coronavirus
ctagtgtttatagtgttcca

SEQ ID NO: 49986 - DNA, 20 bp, Human coronavirus
tagtgtttatagtgttccat

SEQ ID NO: 49987 - DNA, 20 bp, Human coronavirus
atagtgttccattggtgttt

SEQ ID NO: 49988 - DNA, 20 bp, Human coronavirus
tagtgttccattggtgtttc

SEQ ID NO: 49989 - DNA, 20 bp, Human coronavirus
gttttgatgttgagggcgct

SEQ ID NO: 49990 - DNA, 20 bp, Human coronavirus
tgatgttgagggcgctcatg

SEQ ID NO: 49991 - DNA, 20 bp, Human coronavirus
gatgttgagggcgctcatgc

SEQ ID NO: 49992 - DNA, 20 bp, Human coronavirus
atgttgagggcgctcatgct

SEQ ID NO: 49993 - DNA, 20 bp, Human coronavirus
agggcgctcatgctactcgc

SEQ ID NO: 49994 - DNA, 20 bp, Human coronavirus
aagctgccatgctatgtaat

SEQ ID NO: 49995 - DNA, 20 bp, Human coronavirus
tgttatgacataggcaatcc

SEQ ID NO: 49996 - DNA, 20 bp, Human coronavirus
tgacataggcaatcctaaag

SEQ ID NO: 49997 - DNA, 20 bp, Human coronavirus
agcttgtgtcaaagattatg

SEQ ID NO: 49998 - DNA, 20 bp, Human coronavirus
gcttgtgtcaaagattatga

SEQ ID NO: 49999 - DNA, 20 bp, Human coronavirus
tgtgtacgtagatggtttag

SEQ ID NO: 50000 - DNA, 20 bp, Human coronavirus
agaatctaaacaagttgatt

SEQ ID NO: 50001 - DNA, 20 bp, Human coronavirus
gaatctaaacaagttgatta

SEQ ID NO: 50002 - DNA, 20 bp, Human coronavirus
attacgttcctttaagaagc

SEQ ID NO: 50003 - DNA, 20 bp, Human coronavirus
cgttcctttaagaagcgcca

SEQ ID NO: 50004 - DNA, 20 bp, Human coronavirus
aaatggtgtgattgtggata

SEQ ID NO: 50005 - DNA, 20 bp, Human coronavirus
aatggtgtgattgtggataa

SEQ ID NO: 50006 - DNA, 20 bp, Human coronavirus
tggataaagttggagaactc

SEQ ID NO: 50007 - DNA, 20 bp, Human coronavirus
gagaactcaaagttgagttt

SEQ ID NO: 50008 - DNA, 20 bp, Human coronavirus
agttttggttcgctatgaga

SEQ ID NO: 50009 - DNA, 20 bp, Human coronavirus
ctaagtacactcaattatgt

SEQ ID NO: 50010 - DNA, 20 bp, Human coronavirus
tgtcagtatttgaatactac

SEQ ID NO: 50011 - DNA, 20 bp, Human coronavirus
gaatactacaacattagctg

SEQ ID NO: 50012 - DNA, 20 bp, Human coronavirus
aatactacaacattagctgt

SEQ ID NO: 50013 - DNA, 20 bp, Human coronavirus
gctgttcctgttaatatgcg

SEQ ID NO: 50014 - DNA, 20 bp, Human coronavirus
caagagtcataaaccacctt

SEQ ID NO: 50015 - DNA, 20 bp, Human coronavirus
tgcttcctgtcctattggta

SEQ ID NO: 50016 - DNA, 20 bp, Human coronavirus
ctgtcctattggtactaatt

SEQ ID NO: 50017 - DNA, 20 bp, Human coronavirus
gtactaattatcgttcttgt

SEQ ID NO: 50018 - DNA, 20 bp, Human coronavirus
tcgttcttgtgagagtacta

SEQ ID NO: 50019 - DNA, 20 bp, Human coronavirus
gcatgggtagtggtttttgt

SEQ ID NO: 50020 - DNA, 20 bp, Human coronavirus
ttgtgttgattataactcac

SEQ ID NO: 50021 - DNA, 20 bp, Human coronavirus
tgtgttgattataactcacc

SEQ ID NO: 50022 - DNA, 20 bp, Human coronavirus
gtgttgattataactcacct

SEQ ID NO: 50023 - DNA, 20 bp, Human coronavirus
tgttgattataactcacctt

SEQ ID NO: 50024 - DNA, 20 bp, Human coronavirus
agaggctcaggttcagattg

SEQ ID NO: 50025 - DNA, 20 bp, Human coronavirus
gaggctcaggttcagattga

SEQ ID NO: 50026 - DNA, 20 bp, Human coronavirus
agattgataggcttattaat

SEQ ID NO: 50027 - DNA, 20 bp, Human coronavirus
ataggcttattaatggtcgt

SEQ ID NO: 50028 - DNA, 20 bp, Human coronavirus
ttaatggtcgtttaactgct

SEQ ID NO: 50029 - DNA, 20 bp, Human coronavirus
gttaggccagttattgagga

SEQ ID NO: 50030 - DNA, 20 bp, Human coronavirus
ttaggccagttattgaggac

SEQ ID NO: 50031 - DNA, 20 bp, Human coronavirus
ggccagttattgaggactat

SEQ ID NO: 50032 - DNA, 20 bp, Human coronavirus
ttgaggactatcacacatta

SEQ ID NO: 50033 - DNA, 20 bp, Human coronavirus
aggactatcacacattaact

SEQ ID NO: 50034 - DNA, 20 bp, Human coronavirus
aggaatcctcaagaaaactt

SEQ ID NO: 50035 - DNA, 20 bp, Human coronavirus
ttgggctgaccaatctgagc

SEQ ID NO: 50036 - DNA, 20 bp, Human coronavirus
ggctgaccaatctgagcgaa

SEQ ID NO: 50037 - DNA, 20 bp, Human coronavirus
ccaaacctttaatagaggca

SEQ ID NO: 50038 - DNA, 20 bp, Human coronavirus
aatagaggcagaaaaaccca

SEQ ID NO: 50039 - DNA, 20 bp, Human coronavirus
taacaaaacctcgccaaaag

SEQ ID NO: 50040 - DNA, 20 bp, Human coronavirus
aacaaaacctcgccaaaagc

SEQ ID NO: 50041 - DNA, 20 bp, Human coronavirus
acaaaacctcgccaaaagcg

SEQ ID NO: 50042 - DNA, 20 bp, Human coronavirus
taatgttcaacagtgttttg

SEQ ID NO: 50043 - DNA, 20 bp, Human coronavirus
aacagtgttttggtaaaaga

SEQ ID NO: 50044 - DNA, 20 bp, Human coronavirus
gttgagttctaaacctcagc

SEQ ID NO: 50045 - DNA, 20 bp, Human coronavirus
agttctaaacctcagcgtaa

SEQ ID NO: 50046 - DNA, 20 bp, Human coronavirus
taaacctcagcgtaaaagag

SEQ ID NO: 50047 - DNA, 20 bp, Human coronavirus
aacaattaccagaacagttt

SEQ ID NO: 50048 - DNA, 20 bp, Human coronavirus
ccagaacagtttgactctct

SEQ ID NO: 50049 - DNA, 20 bp, Influenza A virus
aacccgatgattgtcgaact

SEQ ID NO: 50050 - DNA, 20 bp, Influenza A virus
tcgaacttgcagaaaaagca

SEQ ID NO: 50051 - DNA, 20 bp, Influenza A virus
cagaaaaagcaatgaaagag

SEQ ID NO: 50052 - DNA, 20 bp, Influenza A virus
aaacaaacaaatttgcagca

SEQ ID NO: 50053 - DNA, 20 bp, Influenza A virus
gcagcaatatgcacccactt

SEQ ID NO: 50054 - DNA, 20 bp, Influenza A virus
aaaccaggctatttaccata

SEQ ID NO: 50055 - DNA, 20 bp, Influenza A virus
accataagacaagaaatggc

SEQ ID NO: 50056 - DNA, 20 bp, Influenza A virus
ccataagacaagaaatggcc

SEQ ID NO: 50057 - DNA, 20 bp, Influenza A virus
ctttcgtcagtccgaaagag

SEQ ID NO: 50058 - DNA, 20 bp, Influenza A virus
cgtcagtccgaaagaggcga

SEQ ID NO: 50059 - DNA, 20 bp, Influenza A virus
aaccttttctgaagacaaca

SEQ ID NO: 50060 - DNA, 20 bp, Influenza A virus
tctgaagacaacaccaagac

SEQ ID NO: 50061 - DNA, 20 bp, Influenza A virus
ctgaagacaacaccaagacc

SEQ ID NO: 50062 - DNA, 20 bp, Influenza A virus
tgaagacaacaccaagacca

SEQ ID NO: 50063 - DNA, 20 bp, Influenza A virus
ctaatggacctccttgttat

SEQ ID NO: 50064 - DNA, 20 bp, Influenza A virus
caggacattgaaaatgagga

SEQ ID NO: 50065 - DNA, 20 bp, Influenza A virus
aaaatgaggagaagatccca

SEQ ID NO: 50066 - DNA, 20 bp, Influenza A virus
tcaccaagagcccactttag

SEQ ID NO: 50067 - DNA, 20 bp, Influenza A virus
caccaagagcccactttagt

SEQ ID NO: 50068 - DNA, 20 bp, Influenza A virus
accaagagcccactttagtt

SEQ ID NO: 50069 - DNA, 20 bp, Influenza A virus
gagaggacgtagccccaatt

SEQ ID NO: 50070 - DNA, 20 bp, Influenza A virus
agtacattgcaagcatgagg

SEQ ID NO: 50071 - DNA, 20 bp, Influenza A virus
caagcatgaggaggaattat

SEQ ID NO: 50072 - DNA, 20 bp, Influenza A virus
tttcacagcagaggtgtccc

SEQ ID NO: 50073 - DNA, 20 bp, Influenza A virus
cacagcagaggtgtcccatt

SEQ ID NO: 50074 - DNA, 20 bp, Influenza A virus
tgagcatggagttttctctc

SEQ ID NO: 50075 - DNA, 20 bp, Influenza A virus
tctctcactgacccgagact

SEQ ID NO: 50076 - DNA, 20 bp, Influenza A virus
ctctcactgacccgagactt

SEQ ID NO: 50077 - DNA, 20 bp, Influenza A virus
tctcactgacccgagacttg

SEQ ID NO: 50078 - DNA, 20 bp, Influenza A virus
agccacataaatgggagaaa

SEQ ID NO: 50079 - DNA, 20 bp, Influenza A virus
aagagaaagacatgaccaaa

SEQ ID NO: 50080 - DNA, 20 bp, Influenza A virus
tttgagaataaatcagaagc

SEQ ID NO: 50081 - DNA, 20 bp, Influenza A virus
ttgagaataaatcagaagca

SEQ ID NO: 50082 - DNA, 20 bp, Influenza A virus
tgagaataaatcagaagcat

SEQ ID NO: 50083 - DNA, 20 bp, Influenza A virus
gagaataaatcagaagcatg

SEQ ID NO: 50084 - DNA, 20 bp, Influenza A virus
gaagaatggttggtggaatt

SEQ ID NO: 50085 - DNA, 20 bp, Influenza A virus
gtggaattgggaggttttac

SEQ ID NO: 50086 - DNA, 20 bp, Influenza A virus
ggaggttttacgtacagatg

SEQ ID NO: 50087 - DNA, 20 bp, Influenza A virus
tacgtacagatgtgcactga

SEQ ID NO: 50088 - DNA, 20 bp, Influenza A virus
acgtacagatgtgcactgaa

SEQ ID NO: 50089 - DNA, 20 bp, Influenza A virus
ggatgataaagcgaggcatt

SEQ ID NO: 50090 - DNA, 20 bp, Influenza A virus
atgaccggaacttctggaga

SEQ ID NO: 50091 - DNA, 20 bp, Influenza A virus
tggagaggcgataatggacg

SEQ ID NO: 50092 - DNA, 20 bp, Influenza A virus
cacattctctcatatgcaat

SEQ ID NO: 50093 - DNA, 20 bp, Influenza A virus
tctcatatgcaatccttgtt

SEQ ID NO: 50094 - DNA, 20 bp, Influenza A virus
aagatctcatctttctggca

SEQ ID NO: 50095 - DNA, 20 bp, Influenza A virus
ctggcacggtctgcactcat

SEQ ID NO: 50096 - DNA, 20 bp, Influenza A virus
tggcacggtctgcactcatc

SEQ ID NO: 50097 - DNA, 20 bp, Influenza A virus
cctgcttgtgtgtacgggct

SEQ ID NO: 50098 - DNA, 20 bp, Influenza A virus
tgggctacggatcctctcag

SEQ ID NO: 50099 - DNA, 20 bp, Influenza A virus
gaggacctgagagtctcaag

SEQ ID NO: 50100 - DNA, 20 bp, Influenza A virus
aggacctgagagtctcaagt

SEQ ID NO: 50101 - DNA, 20 bp, Influenza A virus
cattagaggaacaagagtga

SEQ ID NO: 50102 - DNA, 20 bp, Influenza A virus
attagaggaacaagagtgat

SEQ ID NO: 50103 - DNA, 20 bp, Influenza A virus
gaggaacaagagtgatccca

SEQ ID NO: 50104 - DNA, 20 bp, Human papillomavirus type 132
gattatatgttgtcgcgtcg

SEQ ID NO: 50105 - DNA, 20 bp, Human papillomavirus type 132
tatgttgtcgcgtcgtcctt

SEQ ID NO: 50106 - DNA, 20 bp, Human papillomavirus type 132
tcgcgtcgtcctttggaata

SEQ ID NO: 50107 - DNA, 20 bp, Human papillomavirus type 132
ggaataagaagctttcagca

SEQ ID NO: 50108 - DNA, 20 bp, Human papillomavirus type 132
gaataagaagctttcagcat

SEQ ID NO: 50109 - DNA, 20 bp, Human papillomavirus type 132
gaaagtctctggaaagagac

SEQ ID NO: 50110 - DNA, 20 bp, Human papillomavirus type 132
ccagagactttcgaagtgga

SEQ ID NO: 50111 - DNA, 20 bp, Human papillomavirus type 132
cagagactttcgaagtggat

SEQ ID NO: 50112 - DNA, 20 bp, Human papillomavirus type 132
cgaagtggatggggtgtccg

SEQ ID NO: 50113 - DNA, 20 bp, Human papillomavirus type 132
gaagtggatggggtgtccgg

SEQ ID NO: 50114 - DNA, 20 bp, Human papillomavirus type 132
caaaacacggtctgtcggga

SEQ ID NO: 50115 - DNA, 20 bp, Human papillomavirus type 132
gacgacttcaagaagaggct

SEQ ID NO: 50116 - DNA, 20 bp, Human papillomavirus type 132
aagaagaggctcgggatccg

SEQ ID NO: 50117 - DNA, 20 bp, Human papillomavirus type 132
attttattaaaaggtcatcc

SEQ ID NO: 50118 - DNA, 20 bp, Human papillomavirus type 132
tattaaaaggtcatcctaat

SEQ ID NO: 50119 - DNA, 20 bp, Human papillomavirus type 132
taggaaatttggacagctta

SEQ ID NO: 50120 - DNA, 20 bp, Human papillomavirus type 132
aggaaatttggacagcttat

SEQ ID NO: 50121 - DNA, 20 bp, Human papillomavirus type 132
ggaaatttggacagcttata

SEQ ID NO: 50122 - DNA, 20 bp, Human papillomavirus type 132
ggacagcttataacatgcct

SEQ ID NO: 50123 - DNA, 20 bp, Human papillomavirus type 132
gacagcttataacatgccta

SEQ ID NO: 50124 - DNA, 20 bp, Human papillomavirus type 132
ggagagggtggtactgggcg

SEQ ID NO: 50125 - DNA, 20 bp, Human papillomavirus type 132
tggtaatacacctgttaaac

SEQ ID NO: 50126 - DNA, 20 bp, Human papillomavirus type 132
ggtaatacacctgttaaacc

SEQ ID NO: 50127 - DNA, 20 bp, Human papillomavirus type 132
gtaatacacctgttaaacca

SEQ ID NO: 50128 - DNA, 20 bp, Human papillomavirus type 132
aaccaaatacagctgtagag

SEQ ID NO: 50129 - DNA, 20 bp, Human papillomavirus type 132
ggaaaggggtgtttctgctg

SEQ ID NO: 50130 - DNA, 20 bp, Human papillomavirus type 132
ctgctgtattggatgtgcag

SEQ ID NO: 50131 - DNA, 20 bp, Human papillomavirus type 132
tgctgtattggatgtgcagc

SEQ ID NO: 50132 - DNA, 20 bp, Human papillomavirus type 132
gatgtgcagcctatacctga

SEQ ID NO: 50133 - DNA, 20 bp, Human papillomavirus type 132
caggtataggctgcacatcc

SEQ ID NO: 50134 - DNA, 20 bp, Human papillomavirus type 132
gagaccactttagttagagc

SEQ ID NO: 50135 - DNA, 20 bp, Human papillomavirus type 132
agttagagccagggaactgt

SEQ ID NO: 50136 - DNA, 20 bp, Human papillomavirus type 132
gttagagccagggaactgta

SEQ ID NO: 50137 - DNA, 20 bp, Human papillomavirus type 132
gagccagggaactgtataat

SEQ ID NO: 50138 - DNA, 20 bp, Human papillomavirus type 132
attatacagttccctggctc

SEQ ID NO: 50139 - DNA, 20 bp, Human papillomavirus type 132
gcaggccacggttaactgag

SEQ ID NO: 50140 - DNA, 20 bp, Human papillomavirus type 132
actgagtatgctccaggggt

SEQ ID NO: 50141 - DNA, 20 bp, Human papillomavirus type 132
gagtgagcagattgggtgaa

SEQ ID NO: 50142 - DNA, 20 bp, Human papillomavirus type 132
ggtgaaactaacactataac

SEQ ID NO: 50143 - DNA, 20 bp, Human papillomavirus type 132
ttatagtgttagtttcaccc

SEQ ID NO: 50144 - DNA, 20 bp, Human papillomavirus type 132
ttccatggatcctaaacaag

SEQ ID NO: 50145 - DNA, 20 bp, Human papillomavirus type 132
tccatggatcctaaacaagt

SEQ ID NO: 50146 - DNA, 20 bp, Human papillomavirus type 132
ccatggatcctaaacaagtt

SEQ ID NO: 50147 - DNA, 20 bp, Human papillomavirus type 132
catggatcctaaacaagttc

SEQ ID NO: 50148 - DNA, 20 bp, Human papillomavirus type 132
agttatttattgtaggatgt

SEQ ID NO: 50149 - DNA, 20 bp, Human papillomavirus type 132
agatttagtggacactttca

SEQ ID NO: 50150 - DNA, 20 bp, Human papillomavirus type 132
gatttagtggacactttcag

SEQ ID NO: 50151 - DNA, 20 bp, Human papillomavirus type 132
agtggacactttcagtatat

SEQ ID NO: 50152 - DNA, 20 bp, Human papillomavirus type 132
gtggacactttcagtatatg

SEQ ID NO: 50153 - DNA, 20 bp, Human papillomavirus type 132
cagtatatggccagattatt

SEQ ID NO: 50154 - DNA, 20 bp, Human papillomavirus type 132
tagctcatatcaatgtaatg

SEQ ID NO: 50155 - DNA, 20 bp, Human papillomavirus type 132
agctcatatcaatgtaatga

SEQ ID NO: 50156 - DNA, 20 bp, Human papillomavirus type 132
gctcatatcaatgtaatgaa

SEQ ID NO: 50157 - DNA, 20 bp, Human papillomavirus type 132
atcaatggcaattagctttt

SEQ ID NO: 50158 - DNA, 20 bp, Human papillomavirus type 132
gcttttgtacctccccctca

SEQ ID NO: 50159 - DNA, 20 bp, Human papillomavirus type 132
aggtaggaaatttttgtatc

SEQ ID NO: 50160 - DNA, 20 bp, Human papillomavirus type 132
ggtaggaaatttttgtatca

SEQ ID NO: 50161 - DNA, 20 bp, Human papillomavirus type 132
ttgtatcagataggcctgct

SEQ ID NO: 50162 - DNA, 20 bp, Human papillomavirus type 132
tgtatcagataggcctgcta

SEQ ID NO: 50163 - DNA, 20 bp, Human papillomavirus type 132
gtatcagataggcctgctaa

SEQ ID NO: 50164 - DNA, 20 bp, Human papillomavirus type 132
actgtggtcagttcttcagt

SEQ ID NO: 50165 - DNA, 20 bp, Human papillomavirus type 132
ctgtggtcagttcttcagta

SEQ ID NO: 50166 - DNA, 20 bp, Human papillomavirus type 132
ttcagtaacagttggtgaaa

SEQ ID NO: 50167 - DNA, 20 bp, Human papillomavirus type 132
agtaacagttggtgaaaact

SEQ ID NO: 50168 - DNA, 20 bp, Human papillomavirus type 132
gtgaaaactaccacttttgg

SEQ ID NO: 50169 - DNA, 20 bp, Influenza A virus
gctgcaatatgcacacattt

SEQ ID NO: 50170 - DNA, 20 bp, Influenza A virus
ctgcaatatgcacacatttg

SEQ ID NO: 50171 - DNA, 20 bp, Influenza A virus
ggaagtttgtttcatgtatt

SEQ ID NO: 50172 - DNA, 20 bp, Influenza A virus
gaagtttgtttcatgtattc

SEQ ID NO: 50173 - DNA, 20 bp, Influenza A virus
gtttcatgtattcggatttc

SEQ ID NO: 50174 - DNA, 20 bp, Influenza A virus
cttcctgatttgtatgatta

SEQ ID NO: 50175 - DNA, 20 bp, Influenza A virus
ttcctgatttgtatgattac

SEQ ID NO: 50176 - DNA, 20 bp, Influenza A virus
ctgatttgtatgattacaaa

SEQ ID NO: 50177 - DNA, 20 bp, Influenza A virus
gtatgattacaaagagaacc

SEQ ID NO: 50178 - DNA, 20 bp, Influenza A virus
tatgattacaaagagaaccg

SEQ ID NO: 50179 - DNA, 20 bp, Influenza A virus
ctttcgtcagtccgaaagag

SEQ ID NO: 50180 - DNA, 20 bp, Influenza A virus
cgtcagtccgaaagaggcga

SEQ ID NO: 50181 - DNA, 20 bp, Influenza A virus
gtcagtccgaaagaggcgaa

SEQ ID NO: 50182 - DNA, 20 bp, Influenza A virus
aagaaaaatttgagattaca

SEQ ID NO: 50183 - DNA, 20 bp, Influenza A virus
gagattacaggaactatgcg

SEQ ID NO: 50184 - DNA, 20 bp, Influenza A virus
aagtgggcactcggtgaaaa

SEQ ID NO: 50185 - DNA, 20 bp, Influenza A virus
gatgactgcaaagatgttgg

SEQ ID NO: 50186 - DNA, 20 bp, Influenza A virus
atgactgcaaagatgttgga

SEQ ID NO: 50187 - DNA, 20 bp, Influenza A virus
gagaccttaaacagtatgac

SEQ ID NO: 50188 - DNA, 20 bp, Influenza A virus
aacagtatgacagtgatgag

SEQ ID NO: 50189 - DNA, 20 bp, Influenza A virus
ccccgattgaacatatcgca

SEQ ID NO: 50190 - DNA, 20 bp, Influenza A virus
aacatatcgcaagcatgagg

SEQ ID NO: 50191 - DNA, 20 bp, Influenza A virus
tacagcagaagtgtcccact

SEQ ID NO: 50192 - DNA, 20 bp, Influenza A virus
acagcagaagtgtcccactg

SEQ ID NO: 50193 - DNA, 20 bp, Influenza A virus
cagcagaagtgtcccactgc

SEQ ID NO: 50194 - DNA, 20 bp, Influenza A virus
tcactcactgacccgagact

SEQ ID NO: 50195 - DNA, 20 bp, Influenza A virus
ttgaaataggagacatgctc

SEQ ID NO: 50196 - DNA, 20 bp, Influenza A virus
aaataggagacatgctcttg

SEQ ID NO: 50197 - DNA, 20 bp, Influenza A virus
aggactgcgataggccaagt

SEQ ID NO: 50198 - DNA, 20 bp, Influenza A virus
gcctatcgcagtcctcaaga

SEQ ID NO: 50199 - DNA, 20 bp, Influenza A virus
tgtcaaagagaaagacatga

SEQ ID NO: 50200 - DNA, 20 bp, Influenza A virus
tttgaaaacaaatcggaaac

SEQ ID NO: 50201 - DNA, 20 bp, Influenza A virus
gaaaacaaatcggaaacatg

SEQ ID NO: 50202 - DNA, 20 bp, Influenza A virus
aaaacaaatcggaaacatgg

SEQ ID NO: 50203 - DNA, 20 bp, Influenza A virus
ggaaagtgtgcaggacctta

SEQ ID NO: 50204 - DNA, 20 bp, Influenza A virus
ttatctatggcacataagaa

SEQ ID NO: 50205 - DNA, 20 bp, Influenza A virus
tctatggcacataagaaagc

SEQ ID NO: 50206 - DNA, 20 bp, Influenza A virus
gatgacaggctccgaagaga

SEQ ID NO: 50207 - DNA, 20 bp, Influenza A virus
atgacaggctccgaagagac

SEQ ID NO: 50208 - DNA, 20 bp, Influenza A virus
cctttaatgccttttggtct

SEQ ID NO: 50209 - DNA, 20 bp, Influenza A virus
tggtgaaaatggaccaagcc

SEQ ID NO: 50210 - DNA, 20 bp, Influenza A virus
ttttatccattatggcttgg

SEQ ID NO: 50211 - DNA, 20 bp, Influenza A virus
tatccattatggcttggtcc

SEQ ID NO: 50212 - DNA, 20 bp, Influenza A virus
atccattatggcttggtcca

SEQ ID NO: 50213 - DNA, 20 bp, Influenza A virus
tccattatggcttggtccat

SEQ ID NO: 50214 - DNA, 20 bp, Influenza A virus
gaatcctcatcggtggactt

SEQ ID NO: 50215 - DNA, 20 bp, Influenza A virus
aatggaatgataactcaatt

SEQ ID NO: 50216 - DNA, 20 bp, Influenza A virus
gagcgtctgaaaatatacag

SEQ ID NO: 50217 - DNA, 20 bp, Influenza A virus
gcttggggaatccatgatga

SEQ ID NO: 50218 - DNA, 20 bp, Influenza A virus
gggaatccatgatgagaatg

SEQ ID NO: 50219 - DNA, 20 bp, Influenza A virus
ccagagaaagagaagagtga

SEQ ID NO: 50220 - DNA, 20 bp, Influenza A virus
cagagaaagagaagagtgag

SEQ ID NO: 50221 - DNA, 20 bp, Influenza A virus
tgcttcttcttccctattgt

SEQ ID NO: 50222 - DNA, 20 bp, Influenza A virus
gcttcttcttccctattgtt

SEQ ID NO: 50223 - DNA, 20 bp, Influenza A virus
cttcttcttccctattgttc

SEQ ID NO: 50224 - DNA, 20 bp, Influenza A virus
tcgaagcactagcaaggagc

SEQ ID NO: 50225 - DNA, 20 bp, Influenza A virus
agcaatctggactccccgtt

SEQ ID NO: 50226 - DNA, 20 bp, Influenza A virus
gagggaatgagaagaaggct

SEQ ID NO: 50227 - DNA, 20 bp, Influenza A virus
gccaatttagccttcttctc

SEQ ID NO: 50228 - DNA, 20 bp, Influenza A virus
ccaatttagccttcttctca

SEQ ID NO: 50229 - DNA, 20 bp, Influenza A virus
ggcagaagaggtacaccaaa

SEQ ID NO: 50230 - DNA, 20 bp, Influenza A virus
cgctctcatagtgaatgcac

SEQ ID NO: 50231 - DNA, 20 bp, Influenza A virus
gctctcatagtgaatgcacc

SEQ ID NO: 50232 - DNA, 20 bp, Influenza A virus
ggtgcattcactatgagagc

SEQ ID NO: 50233 - DNA, 20 bp, Influenza A virus
gtgcattcactatgagagcg

SEQ ID NO: 50234 - DNA, 20 bp, Influenza A virus
ggagtttccggaattaatga

SEQ ID NO: 50235 - DNA, 20 bp, Influenza A virus
gagtttccggaattaatgaa

SEQ ID NO: 50236 - DNA, 20 bp, Influenza A virus
ccggaattaatgaatcggct

SEQ ID NO: 50237 - DNA, 20 bp, Influenza A virus
cggaattaatgaatcggctg

SEQ ID NO: 50238 - DNA, 20 bp, Influenza A virus
atgaatcggctgacatgagc

SEQ ID NO: 50239 - DNA, 20 bp, Influenza A virus
tcaacactagccaaagggga

SEQ ID NO: 50240 - DNA, 20 bp, Influenza A virus
ttgaggatgaacaaatgtac

SEQ ID NO: 50241 - DNA, 20 bp, Influenza A virus
aggatgaacaaatgtaccag

SEQ ID NO: 50242 - DNA, 20 bp, Influenza A virus
gagaaattcttccctagcag

SEQ ID NO: 50243 - DNA, 20 bp, Influenza A virus
ttccctagcagttcatatcg

SEQ ID NO: 50244 - DNA, 20 bp, Human papillomavirus type 85
cagtacatgtaataggatgg

SEQ ID NO: 50245 - DNA, 20 bp, Human papillomavirus type 85
ggcaatccagctacccgacc

SEQ ID NO: 50246 - DNA, 20 bp, Human papillomavirus type 85
gcaatccagctacccgaccc

SEQ ID NO: 50247 - DNA, 20 bp, Human papillomavirus type 85
cataggtctggtagtttgta

SEQ ID NO: 50248 - DNA, 20 bp, Human papillomavirus type 85
gtagggtcgggtagctggat

SEQ ID NO: 50249 - DNA, 20 bp, Human papillomavirus type 85
tgttagatttggaaccatat

SEQ ID NO: 50250 - DNA, 20 bp, Human papillomavirus type 85
gatttggaaccatataatga

SEQ ID NO: 50251 - DNA, 20 bp, Human papillomavirus type 85
ggaaccatataatgaagtgc

SEQ ID NO: 50252 - DNA, 20 bp, Human papillomavirus type 85
gaaccatataatgaagtgca

SEQ ID NO: 50253 - DNA, 20 bp, Human papillomavirus type 85
cacttcattatatggttcca

SEQ ID NO: 50254 - DNA, 20 bp, Human papillomavirus type 85
catgcacaggaagtagaaac

SEQ ID NO: 50255 - DNA, 20 bp, Human papillomavirus type 85
catgccttaaaacgaaagta

SEQ ID NO: 50256 - DNA, 20 bp, Human papillomavirus type 85
aaacgaaagtatggagcaca

SEQ ID NO: 50257 - DNA, 20 bp, Human papillomavirus type 85
tctgtgctgtgtgctccata

SEQ ID NO: 50258 - DNA, 20 bp, Human papillomavirus type 85
ctgtgctgtgtgctccatac

SEQ ID NO: 50259 - DNA, 20 bp, Human papillomavirus type 85
gtgaagtaacaggagacaca

SEQ ID NO: 50260 - DNA, 20 bp, Human papillomavirus type 85
tacaacatggtatagatgac

SEQ ID NO: 50261 - DNA, 20 bp, Human papillomavirus type 85
gacctgtcagaaatgataca

SEQ ID NO: 50262 - DNA, 20 bp, Human papillomavirus type 85
acctgtcagaaatgatacag

SEQ ID NO: 50263 - DNA, 20 bp, Human papillomavirus type 85
tcaaacgcccactgtatcat

SEQ ID NO: 50264 - DNA, 20 bp, Human papillomavirus type 85
cacatacatttccatttgat

SEQ ID NO: 50265 - DNA, 20 bp, Human papillomavirus type 85
ccatttgatagcaatggcaa

SEQ ID NO: 50266 - DNA, 20 bp, Human papillomavirus type 85
catttgatagcaatggcaat

SEQ ID NO: 50267 - DNA, 20 bp, Human papillomavirus type 85
gatagcaatggcaatccagt

SEQ ID NO: 50268 - DNA, 20 bp, Human papillomavirus type 85
atagcaatggcaatccagtg

SEQ ID NO: 50269 - DNA, 20 bp, Human papillomavirus type 85
aaacaataaaccaccacgtg

SEQ ID NO: 50270 - DNA, 20 bp, Human papillomavirus type 85
caaatttcaaaaagcaaagc

SEQ ID NO: 50271 - DNA, 20 bp, Human papillomavirus type 85
aaatttcaaaaagcaaagca

SEQ ID NO: 50272 - DNA, 20 bp, Human papillomavirus type 85
caaaaagcaaagcacatgaa

SEQ ID NO: 50273 - DNA, 20 bp, Human papillomavirus type 85
aaaaagcaaagcacatgaag

SEQ ID NO: 50274 - DNA, 20 bp, Human papillomavirus type 85
ctagagaattacaacacccc

SEQ ID NO: 50275 - DNA, 20 bp, Human papillomavirus type 85
caacaccccaccacaccgta

SEQ ID NO: 50276 - DNA, 20 bp, Human papillomavirus type 85
ggtgcacacggtggtggctt

SEQ ID NO: 50277 - DNA, 20 bp, Human papillomavirus type 85
ggtatacggtgtggtggggt

SEQ ID NO: 50278 - DNA, 20 bp, Human papillomavirus type 85
taattctctagcaattgcag

SEQ ID NO: 50279 - DNA, 20 bp, Human papillomavirus type 85
ttgatgtgtctcctgcaagg

SEQ ID NO: 50280 - DNA, 20 bp, Human papillomavirus type 85
atgtgtctcctgcaaggcca

SEQ ID NO: 50281 - DNA, 20 bp, Human papillomavirus type 85
taattgaatctgtggggcct

SEQ ID NO: 50282 - DNA, 20 bp, Human papillomavirus type 85
aatctgtggggccttcagat

SEQ ID NO: 50283 - DNA, 20 bp, Human papillomavirus type 85
agatccatctattgttacat

SEQ ID NO: 50284 - DNA, 20 bp, Human papillomavirus type 85
ggttattgaggttcctcaaa

SEQ ID NO: 50285 - DNA, 20 bp, Human papillomavirus type 85
ttgaggttcctcaaacaggg

SEQ ID NO: 50286 - DNA, 20 bp, Human papillomavirus type 85
aggttcctcaaacaggggag

SEQ ID NO: 50287 - DNA, 20 bp, Human papillomavirus type 85
ctcaaacaggggaggtgtct

SEQ ID NO: 50288 - DNA, 20 bp, Human papillomavirus type 85
ttattactacccctacatct

SEQ ID NO: 50289 - DNA, 20 bp, Human papillomavirus type 85
tgcctgatcctgattttatg

SEQ ID NO: 50290 - DNA, 20 bp, Human papillomavirus type 85
tatggatattgttcgtttac

SEQ ID NO: 50291 - DNA, 20 bp, Human papillomavirus type 85
atggatattgttcgtttaca

SEQ ID NO: 50292 - DNA, 20 bp, Human papillomavirus type 85
tggatattgttcgtttacat

SEQ ID NO: 50293 - DNA, 20 bp, Human papillomavirus type 85
ttcgtttacataggcctgcc

SEQ ID NO: 50294 - DNA, 20 bp, Human papillomavirus type 85
cgggttacattacctgaccc

SEQ ID NO: 50295 - DNA, 20 bp, Human papillomavirus type 85
gggttacattacctgaccct

SEQ ID NO: 50296 - DNA, 20 bp, Human papillomavirus type 85
cattacctgaccctaataaa

SEQ ID NO: 50297 - DNA, 20 bp, Human papillomavirus type 85
cctgaccctaataaatttgg

SEQ ID NO: 50298 - DNA, 20 bp, Human papillomavirus type 85
ggtcttccagacactaatat

SEQ ID NO: 50299 - DNA, 20 bp, Human papillomavirus type 85
cacacgacactagagataat

SEQ ID NO: 50300 - DNA, 20 bp, Human papillomavirus type 85
taaacaaacccagttatgta

SEQ ID NO: 50301 - DNA, 20 bp, Human papillomavirus type 85
tgtattattggttgtgttcc

SEQ ID NO: 50302 - DNA, 20 bp, Human papillomavirus type 85
ttggttgtgttcctgctatt

SEQ ID NO: 50303 - DNA, 20 bp, Human papillomavirus type 85
gttgtgttcctgctattggg

SEQ ID NO: 50304 - DNA, 20 bp, Human papillomavirus type 85
gtaaatatccagactatttg

SEQ ID NO: 50305 - DNA, 20 bp, Human papillomavirus type 85
taaatatccagactatttgc

SEQ ID NO: 50306 - DNA, 20 bp, Human papillomavirus type 85
gcaaatgtctgcagatgcat

SEQ ID NO: 50307 - DNA, 20 bp, Human papillomavirus type 85
caaatgtctgcagatgcata

SEQ ID NO: 50308 - DNA, 20 bp, Human papillomavirus type 85
ttttgtttacgacgcgaaca

SEQ ID NO: 50309 - DNA, 20 bp, Influenza A virus
gagagagctcggatgtttta

SEQ ID NO: 50310 - DNA, 20 bp, Influenza A virus
tagtcacaagagaaccctat

SEQ ID NO: 50311 - DNA, 20 bp, Influenza A virus
agtcacaagagaaccctatg

SEQ ID NO: 50312 - DNA, 20 bp, Influenza A virus
gtcacaagagaaccctatgt

SEQ ID NO: 50313 - DNA, 20 bp, Influenza A virus
catgcgacccagatgaatgc

SEQ ID NO: 50314 - DNA, 20 bp, Influenza A virus
atttctgcaacaggccttct

SEQ ID NO: 50315 - DNA, 20 bp, Influenza A virus
ctgcaacaggccttctgttg

SEQ ID NO: 50316 - DNA, 20 bp, Influenza A virus
tgcaacaggccttctgttgt

SEQ ID NO: 50317 - DNA, 20 bp, Influenza A virus
tgttgtaccatactactgca

SEQ ID NO: 50318 - DNA, 20 bp, Influenza A virus
taccatactactgcagatgc

SEQ ID NO: 50319 - DNA, 20 bp, Influenza A virus
aagaatgctcatgttacggg

SEQ ID NO: 50320 - DNA, 20 bp, Influenza A virus
cggggaacgaacaggaatta

SEQ ID NO: 50321 - DNA, 20 bp, Influenza A virus
cctgcacatgcagggacaat

SEQ ID NO: 50322 - DNA, 20 bp, Influenza A virus
gcagggctcaaatagaccag

SEQ ID NO: 50323 - DNA, 20 bp, Influenza A virus
agatagacccagtagcaatg

SEQ ID NO: 50324 - DNA, 20 bp, Influenza A virus
gctagggaggacaataagca

SEQ ID NO: 50325 - DNA, 20 bp, Influenza A virus
aaagtgccaaatgcattgac

SEQ ID NO: 50326 - DNA, 20 bp, Influenza A virus
ggcacttttaacatctcgta

SEQ ID NO: 50327 - DNA, 20 bp, Influenza A virus
gcacttttaacatctcgtat

SEQ ID NO: 50328 - DNA, 20 bp, Influenza A virus
taacatctcgtatccagacc

SEQ ID NO: 50329 - DNA, 20 bp, Influenza A virus
attctgagtgcggggttctt

SEQ ID NO: 50330 - DNA, 20 bp, Influenza A virus
tgagtgcggggttcttctct

SEQ ID NO: 50331 - DNA, 20 bp, Influenza A virus
ttctcttgccttcctgatgt

SEQ ID NO: 50332 - DNA, 20 bp, Influenza A virus
tcttgccttcctgatgtgta

SEQ ID NO: 50333 - DNA, 20 bp, Influenza A virus
ccttcctgatgtgtactttt

SEQ ID NO: 50334 - DNA, 20 bp, Influenza A virus
attaccctaaggtatataaa

SEQ ID NO: 50335 - DNA, 20 bp, Influenza A virus
ccctaaggtatataaaactt

SEQ ID NO: 50336 - DNA, 20 bp, Influenza A virus
tttcgaaaaggtcgaaaggt

SEQ ID NO: 50337 - DNA, 20 bp, Influenza A virus
cgaaaaggtcgaaaggttga

SEQ ID NO: 50338 - DNA, 20 bp, Influenza A virus
gaaaaggtcgaaaggttgaa

SEQ ID NO: 50339 - DNA, 20 bp, Influenza A virus
taaaattgctcccttgatgg

SEQ ID NO: 50340 - DNA, 20 bp, Influenza A virus
ctcccttgatggtggcgtac

SEQ ID NO: 50341 - DNA, 20 bp, Influenza A virus
atggtggcgtacatgctaga

SEQ ID NO: 50342 - DNA, 20 bp, Influenza A virus
gtccgtaaaacaaggtttct

SEQ ID NO: 50343 - DNA, 20 bp, Influenza A virus
ttttacggaccaattctctt

SEQ ID NO: 50344 - DNA, 20 bp, Influenza A virus
gcatctctcttggaaatgtg

SEQ ID NO: 50345 - DNA, 20 bp, Influenza A virus
gaaatgtgccacagcacaca

SEQ ID NO: 50346 - DNA, 20 bp, Influenza A virus
ctcctccaatctgtgtgctg

SEQ ID NO: 50347 - DNA, 20 bp, Influenza A virus
ccaagagagatgctaatggg

SEQ ID NO: 50348 - DNA, 20 bp, Influenza A virus
caagagagatgctaatgggt

SEQ ID NO: 50349 - DNA, 20 bp, Influenza A virus
acaatggttgggagaagagc

SEQ ID NO: 50350 - DNA, 20 bp, Influenza A virus
ggagaagagcaacagctatt

SEQ ID NO: 50351 - DNA, 20 bp, Influenza A virus
tcagaaaggcaaccaggaga

SEQ ID NO: 50352 - DNA, 20 bp, Influenza A virus
cctttctgagaatagctgtt

SEQ ID NO: 50353 - DNA, 20 bp, Influenza A virus
ctgagaatagctgttgctct

SEQ ID NO: 50354 - DNA, 20 bp, Influenza A virus
acaataacttattcgtcatc

SEQ ID NO: 50355 - DNA, 20 bp, Influenza A virus
ttcgtcatcaatgatgtggg

SEQ ID NO: 50356 - DNA, 20 bp, Influenza A virus
gtcatcaatgatgtgggaga

SEQ ID NO: 50357 - DNA, 20 bp, Influenza A virus
tccattgataagtgttgact

SEQ ID NO: 50358 - DNA, 20 bp, Influenza A virus
ataagtgttgactagcactg

SEQ ID NO: 50359 - DNA, 20 bp, Influenza A virus
ggacatttgacactgtccaa

SEQ ID NO: 50360 - DNA, 20 bp, Influenza A virus
gacactgtccaaataataaa

SEQ ID NO: 50361 - DNA, 20 bp, Influenza A virus
acactgtccaaataataaaa

SEQ ID NO: 50362 - DNA, 20 bp, Influenza A virus
tcccctttgctgctgcccca

SEQ ID NO: 50363 - DNA, 20 bp, Influenza A virus
gctgctgccccaccagaaca

SEQ ID NO: 50364 - DNA, 20 bp, Influenza A virus
ctcattttgggcaaagaaga

SEQ ID NO: 50365 - DNA, 20 bp, Influenza A virus
tcattttgggcaaagaagac

SEQ ID NO: 50366 - DNA, 20 bp, Influenza A virus
tgggcaaagaagacaagaga

SEQ ID NO: 50367 - DNA, 20 bp, Influenza A virus
gggcaaagaagacaagagat

SEQ ID NO: 50368 - DNA, 20 bp, Influenza A virus
ggcaaagaagacaagagata

SEQ ID NO: 50369 - DNA, 20 bp, Human papillomavirus
ctgtgagcctcagtgtatta

SEQ ID NO: 50370 - DNA, 20 bp, Human papillomavirus
attctgatggaatccaaacc

SEQ ID NO: 50371 - DNA, 20 bp, Human papillomavirus
tgatggaatccaaaccaaga

SEQ ID NO: 50372 - DNA, 20 bp, Human papillomavirus
ggaggagtattgcaaacatt

SEQ ID NO: 50373 - DNA, 20 bp, Human papillomavirus
gaggagtattgcaaacatta

SEQ ID NO: 50374 - DNA, 20 bp, Human papillomavirus
tttagagttgacacgctttg

SEQ ID NO: 50375 - DNA, 20 bp, Human papillomavirus
agagttgacacgctttgcta

SEQ ID NO: 50376 - DNA, 20 bp, Human papillomavirus
gagttgacacgctttgctac

SEQ ID NO: 50377 - DNA, 20 bp, Human papillomavirus
acacgctttgctacttttgt

SEQ ID NO: 50378 - DNA, 20 bp, Human papillomavirus
gctacttttgtaaggttaga

SEQ ID NO: 50379 - DNA, 20 bp, Human papillomavirus
gagtccgaggctggaagctg

SEQ ID NO: 50380 - DNA, 20 bp, Human papillomavirus
agtccgaggctggaagctgt

SEQ ID NO: 50381 - DNA, 20 bp, Human papillomavirus
acatttctccacaaagagtg

SEQ ID NO: 50382 - DNA, 20 bp, Human papillomavirus
ctccacaaagagtgtcgaaa

SEQ ID NO: 50383 - DNA, 20 bp, Human papillomavirus
tccacaaagagtgtcgaaaa

SEQ ID NO: 50384 - DNA, 20 bp, Human papillomavirus
cccctccagaagacgaagaa

SEQ ID NO: 50385 - DNA, 20 bp, Human papillomavirus
tcagtggtgtcccatctcct

SEQ ID NO: 50386 - DNA, 20 bp, Human papillomavirus
aaagaaaaaatcttacacga

SEQ ID NO: 50387 - DNA, 20 bp, Human papillomavirus
cacgagttggaagattgcaa

SEQ ID NO: 50388 - DNA, 20 bp, Human papillomavirus
gaagattgcaagcagaagct

SEQ ID NO: 50389 - DNA, 20 bp, Human papillomavirus
ggttacagaccattaggtga

SEQ ID NO: 50390 - DNA, 20 bp, Human papillomavirus
cagaccattaggtgaagctg

SEQ ID NO: 50391 - DNA, 20 bp, Human papillomavirus
ggtgaagctggtggatcacg

SEQ ID NO: 50392 - DNA, 20 bp, Human papillomavirus
tggtagaccaataacatcaa

SEQ ID NO: 50393 - DNA, 20 bp, Human papillomavirus
caggagttgatgttattggt

SEQ ID NO: 50394 - DNA, 20 bp, Human papillomavirus
gggtggaagaattagaatta

SEQ ID NO: 50395 - DNA, 20 bp, Human papillomavirus
gaattatatacaatcactga

SEQ ID NO: 50396 - DNA, 20 bp, Human papillomavirus
tatacaatcactgactctac

SEQ ID NO: 50397 - DNA, 20 bp, Human papillomavirus
gttgtaacagtagtagattg

SEQ ID NO: 50398 - DNA, 20 bp, Human papillomavirus
taacagtagtagattgagtg

SEQ ID NO: 50399 - DNA, 20 bp, Human papillomavirus
gagcgggacttggcagaagt

SEQ ID NO: 50400 - DNA, 20 bp, Human papillomavirus
agcgggacttggcagaagta

SEQ ID NO: 50401 - DNA, 20 bp, Human papillomavirus
gcagaagtagcagcagcacc

SEQ ID NO: 50402 - DNA, 20 bp, Human papillomavirus
agagacgttactagattaca

SEQ ID NO: 50403 - DNA, 20 bp, Human papillomavirus
tctggtgctgctgctacttc

SEQ ID NO: 50404 - DNA, 20 bp, Human papillomavirus
acgacatactagctacaacg

SEQ ID NO: 50405 - DNA, 20 bp, Human papillomavirus
tacacaatgatgatatttta

SEQ ID NO: 50406 - DNA, 20 bp, Human papillomavirus
tgtataacatctgttgcatt

SEQ ID NO: 50407 - DNA, 20 bp, Human papillomavirus
catttatagggtctatcacc

SEQ ID NO: 50408 - DNA, 20 bp, Human papillomavirus
atagggtctatcaccgttgt

SEQ ID NO: 50409 - DNA, 20 bp, Human papillomavirus
aggaataggtactacaggcc

SEQ ID NO: 50410 - DNA, 20 bp, Human papillomavirus
ggaataggtactacaggcca

SEQ ID NO: 50411 - DNA, 20 bp, Human papillomavirus
ctttaacaaagtaggtgata

SEQ ID NO: 50412 - DNA, 20 bp, Human papillomavirus
aacaaagtaggtgatacaga

SEQ ID NO: 50413 - DNA, 20 bp, Human papillomavirus
acaaagtaggtgatacagag

SEQ ID NO: 50414 - DNA, 20 bp, Human papillomavirus
ggacatgctaattttagccg

SEQ ID NO: 50415 - DNA, 20 bp, Human papillomavirus
gacatgctaattttagccgt

SEQ ID NO: 50416 - DNA, 20 bp, Human papillomavirus
tagccgtttacaagaagata

SEQ ID NO: 50417 - DNA, 20 bp, Human papillomavirus
agccgtttacaagaagataa

SEQ ID NO: 50418 - DNA, 20 bp, Human papillomavirus
gccgtttacaagaagataaa

SEQ ID NO: 50419 - DNA, 20 bp, Human papillomavirus
tatttattactcatgggggt

SEQ ID NO: 50420 - DNA, 20 bp, Human papillomavirus
atttattactcatgggggtg

SEQ ID NO: 50421 - DNA, 20 bp, Human papillomavirus
tttattactcatgggggtgc

SEQ ID NO: 50422 - DNA, 20 bp, Human papillomavirus
attactcatgggggtgcatt

SEQ ID NO: 50423 - DNA, 20 bp, Human papillomavirus
ttactcatgggggtgcattc

SEQ ID NO: 50424 - DNA, 20 bp, Human papillomavirus type 103
tgagaagtcattgtgtatgt

SEQ ID NO: 50425 - DNA, 20 bp, Human papillomavirus type 103
tgtatgtatgtggtagccac

SEQ ID NO: 50426 - DNA, 20 bp, Human papillomavirus type 103
gaaactttgaacaacagctg

SEQ ID NO: 50427 - DNA, 20 bp, Human papillomavirus type 103
gaacaacagctgtgtggaaa

SEQ ID NO: 50428 - DNA, 20 bp, Human papillomavirus type 103
aacaacagctgtgtggaaac

SEQ ID NO: 50429 - DNA, 20 bp, Human papillomavirus type 103
actaattcagggacattgac

SEQ ID NO: 50430 - DNA, 20 bp, Human papillomavirus type 103
agggacattgactaatgggg

SEQ ID NO: 50431 - DNA, 20 bp, Human papillomavirus type 103
actaatggggatgaaaatgc

SEQ ID NO: 50432 - DNA, 20 bp, Human papillomavirus type 103
tacacagcagtaatagacaa

SEQ ID NO: 50433 - DNA, 20 bp, Human papillomavirus type 103
acacagcagtaatagacaag

SEQ ID NO: 50434 - DNA, 20 bp, Human papillomavirus type 103
gcaatgtgctaaacgtgcag

SEQ ID NO: 50435 - DNA, 20 bp, Human papillomavirus type 103
tttttttataaacaaagcat

SEQ ID NO: 50436 - DNA, 20 bp, Human papillomavirus type 103
ttttataaacaaagcatgtc

SEQ ID NO: 50437 - DNA, 20 bp, Human papillomavirus type 103
tttataaacaaagcatgtct

SEQ ID NO: 50438 - DNA, 20 bp, Human papillomavirus type 103
ttataaacaaagcatgtcta

SEQ ID NO: 50439 - DNA, 20 bp, Human papillomavirus type 103
gggcttatagacgatgctac

SEQ ID NO: 50440 - DNA, 20 bp, Human papillomavirus type 103
tagacgatgctacatttcca

SEQ ID NO: 50441 - DNA, 20 bp, Human papillomavirus type 103
ccatgtttccaatttatgga

SEQ ID NO: 50442 - DNA, 20 bp, Human papillomavirus type 103
catgtttccaatttatggat

SEQ ID NO: 50443 - DNA, 20 bp, Human papillomavirus type 103
ccaatttatggatgtgtata

SEQ ID NO: 50444 - DNA, 20 bp, Human papillomavirus type 103
taaggcaggagcatgtactg

SEQ ID NO: 50445 - DNA, 20 bp, Human papillomavirus type 103
ggcctacaaaaagtgccccc

SEQ ID NO: 50446 - DNA, 20 bp, Human papillomavirus type 103
gcagcatctgaaagcaaagc

SEQ ID NO: 50447 - DNA, 20 bp, Human papillomavirus type 103
tgatgcagttggtgctgaaa

SEQ ID NO: 50448 - DNA, 20 bp, Human papillomavirus type 103
tcagcaccaactgcatcata

SEQ ID NO: 50449 - DNA, 20 bp, Human papillomavirus type 103
atagacatggtaaagcaaaa

SEQ ID NO: 50450 - DNA, 20 bp, Human papillomavirus type 103
tagacatggtaaagcaaaaa

SEQ ID NO: 50451 - DNA, 20 bp, Human papillomavirus type 103
tgtgcattttaccaaggaag

SEQ ID NO: 50452 - DNA, 20 bp, Human papillomavirus type 103
taccaaggaagcagtaaaat

SEQ ID NO: 50453 - DNA, 20 bp, Human papillomavirus type 103
accaaggaagcagtaaaata

SEQ ID NO: 50454 - DNA, 20 bp, Human papillomavirus type 103
tttcagtgtattagcacagc

SEQ ID NO: 50455 - DNA, 20 bp, Human papillomavirus type 103
cagtgtattagcacagcttt

SEQ ID NO: 50456 - DNA, 20 bp, Human papillomavirus type 103
agtgtattagcacagctttt

SEQ ID NO: 50457 - DNA, 20 bp, Human papillomavirus type 103
gcacagcttttacatgggtg

SEQ ID NO: 50458 - DNA, 20 bp, Human papillomavirus type 103
tacatgggtggcggatgcgg

SEQ ID NO: 50459 - DNA, 20 bp, Human papillomavirus type 103
ccattgggtcggggtctgca

SEQ ID NO: 50460 - DNA, 20 bp, Human papillomavirus type 103
ggtcggggtctgcaggtggg

SEQ ID NO: 50461 - DNA, 20 bp, Human papillomavirus type 103
cccgacccccacctgcagac

SEQ ID NO: 50462 - DNA, 20 bp, Human papillomavirus type 103
cgccatcatacatctctgta

SEQ ID NO: 50463 - DNA, 20 bp, Human papillomavirus type 103
cacaatctgcagctgaggtg

SEQ ID NO: 50464 - DNA, 20 bp, Human papillomavirus type 103
tgtaacagggtctgtaggat

SEQ ID NO: 50465 - DNA, 20 bp, Human papillomavirus type 103
ggtcaacgtggcactattcg

SEQ ID NO: 50466 - DNA, 20 bp, Human papillomavirus type 103
gtacaagaagtggcctgcaa

SEQ ID NO: 50467 - DNA, 20 bp, Human papillomavirus type 103
ttattatgatttaagtagta

SEQ ID NO: 50468 - DNA, 20 bp, Human papillomavirus type 103
ttatgatttaagtagtatcc

SEQ ID NO: 50469 - DNA, 20 bp, Human papillomavirus type 103
tgatttaagtagtatccacc

SEQ ID NO: 50470 - DNA, 20 bp, Human papillomavirus type 103
gcatatgttttaatattttg

SEQ ID NO: 50471 - DNA, 20 bp, Human papillomavirus type 103
taatattttgcagatgtctt

SEQ ID NO: 50472 - DNA, 20 bp, Human papillomavirus type 103
aatattttgcagatgtcttt

SEQ ID NO: 50473 - DNA, 20 bp, Human papillomavirus type 103
atattttgcagatgtctttg

SEQ ID NO: 50474 - DNA, 20 bp, Human papillomavirus type 103
tgcagatgtctttgtggctg

SEQ ID NO: 50475 - DNA, 20 bp, Human papillomavirus type 103
gtagtaggctgtactccttg

SEQ ID NO: 50476 - DNA, 20 bp, Human papillomavirus type 103
tagtaggctgtactccttgt

SEQ ID NO: 50477 - DNA, 20 bp, Human papillomavirus type 103
tttgggggagcattgggatg

SEQ ID NO: 50478 - DNA, 20 bp, Human papillomavirus type 103
gggggagcattgggatgctg

SEQ ID NO: 50479 - DNA, 20 bp, Human papillomavirus type 103
ggggagcattgggatgctgc

SEQ ID NO: 50480 - DNA, 20 bp, Human papillomavirus type 103
tacaataaatgttaagtcag

SEQ ID NO: 50481 - DNA, 20 bp, Human papillomavirus type 103
acaataaatgttaagtcaga

SEQ ID NO: 50482 - DNA, 20 bp, Human papillomavirus type 103
caataaatgttaagtcagac

SEQ ID NO: 50483 - DNA, 20 bp, Human papillomavirus type 103
agtcagacgctggcgttgca

SEQ ID NO: 50484 - DNA, 20 bp, Human papillomavirus type 103
cacagcaatatgctgccacc

SEQ ID NO: 50485 - DNA, 20 bp, Human papillomavirus type 103
acagatatcctttgggtcgc

SEQ ID NO: 50486 - DNA, 20 bp, Human papillomavirus type 103
gggtcgcagatttttatctc

SEQ ID NO: 50487 - DNA, 20 bp, Human papillomavirus type 103
ggtcgcagatttttatctca

SEQ ID NO: 50488 - DNA, 20 bp, Human papillomavirus type 103
ttatctcaaactggggttag

SEQ ID NO: 50489 - DNA, 20 bp, Human papillomavirus type 103
tatctcaaactggggttagc

SEQ ID NO: 50490 - DNA, 20 bp, Human papillomavirus type 103
cagcaaccgaattagttatc

SEQ ID NO: 50491 - DNA, 20 bp, Human papillomavirus type 103
gttatctggccgttggccac

SEQ ID NO: 50492 - DNA, 20 bp, Human papillomavirus type 103
tctggccgttggccacgacc

SEQ ID NO: 50493 - DNA, 20 bp, Human papillomavirus type 103
gccacgaccggcagcgatgt

SEQ ID NO: 50494 - DNA, 20 bp, Human papillomavirus type 103
tgtaatattcttgatcctat

SEQ ID NO: 50495 - DNA, 20 bp, Human papillomavirus type 60
tcacccgatggtgatcctga

SEQ ID NO: 50496 - DNA, 20 bp, Human papillomavirus type 60
gcaacaggtgtctattgtat

SEQ ID NO: 50497 - DNA, 20 bp, Human papillomavirus type 60
caacaggtgtctattgtata

SEQ ID NO: 50498 - DNA, 20 bp, Human papillomavirus type 60
tatagggatagtgctcctcc

SEQ ID NO: 50499 - DNA, 20 bp, Human papillomavirus type 60
ttcgacatggcagatcctaa

SEQ ID NO: 50500 - DNA, 20 bp, Human papillomavirus type 60
tcgacatggcagatcctaat

SEQ ID NO: 50501 - DNA, 20 bp, Human papillomavirus type 60
cgacatggcagatcctaata

SEQ ID NO: 50502 - DNA, 20 bp, Human papillomavirus type 60
gacatggcagatcctaataa

SEQ ID NO: 50503 - DNA, 20 bp, Human papillomavirus type 60
attctcttgaattaaatgag

SEQ ID NO: 50504 - DNA, 20 bp, Human papillomavirus type 60
ctgacctaagtccaaggttg

SEQ ID NO: 50505 - DNA, 20 bp, Human papillomavirus type 60
gaagctgtcacaatttcacc

SEQ ID NO: 50506 - DNA, 20 bp, Human papillomavirus type 60
cacctcagagacaaagcaaa

SEQ ID NO: 50507 - DNA, 20 bp, Human papillomavirus type 60
acctcagagacaaagcaaaa

SEQ ID NO: 50508 - DNA, 20 bp, Human papillomavirus type 60
tgctttgtctctgaggtgaa

SEQ ID NO: 50509 - DNA, 20 bp, Human papillomavirus type 60
aacgcgaccgtttaaaagtg

SEQ ID NO: 50510 - DNA, 20 bp, Human papillomavirus type 60
acgcgaccgtttaaaagtga

SEQ ID NO: 50511 - DNA, 20 bp, Human papillomavirus type 60
aaaagtgatagatcatgttg

SEQ ID NO: 50512 - DNA, 20 bp, Human papillomavirus type 60
aaagtgatagatcatgttgt

SEQ ID NO: 50513 - DNA, 20 bp, Human papillomavirus type 60
tgaaaactgggttataagtg

SEQ ID NO: 50514 - DNA, 20 bp, Human papillomavirus type 60
gatagtgatgcacaaacata

SEQ ID NO: 50515 - DNA, 20 bp, Human papillomavirus type 60
atagtgatgcacaaacatat

SEQ ID NO: 50516 - DNA, 20 bp, Human papillomavirus type 60
acaaactgggacatggacag

SEQ ID NO: 50517 - DNA, 20 bp, Human papillomavirus type 60
taaaaaccaaattatttctg

SEQ ID NO: 50518 - DNA, 20 bp, Human papillomavirus type 60
tttctgctcctgttaccagc

SEQ ID NO: 50519 - DNA, 20 bp, Human papillomavirus type 60
gattacgacgccgaagatcc

SEQ ID NO: 50520 - DNA, 20 bp, Human papillomavirus type 60
cgacgccgaagatccaacga

SEQ ID NO: 50521 - DNA, 20 bp, Human papillomavirus type 60
gtcgggtactctgcgtcttt

SEQ ID NO: 50522 - DNA, 20 bp, Human papillomavirus type 60
tggtacggggcgactctctg

SEQ ID NO: 50523 - DNA, 20 bp, Human papillomavirus type 60
ggtacggggcgactctctgg

SEQ ID NO: 50524 - DNA, 20 bp, Human papillomavirus type 60
atactcaaccaacagtatat

SEQ ID NO: 50525 - DNA, 20 bp, Human papillomavirus type 60
ataatacagttgctacatta

SEQ ID NO: 50526 - DNA, 20 bp, Human papillomavirus type 60
ctacattagacattacacca

SEQ ID NO: 50527 - DNA, 20 bp, Human papillomavirus type 60
gacattacaccagctacacc

SEQ ID NO: 50528 - DNA, 20 bp, Human papillomavirus type 60
caccagctacaccaccagtg

SEQ ID NO: 50529 - DNA, 20 bp, Human papillomavirus type 60
gaaatagaagaacctccacg

SEQ ID NO: 50530 - DNA, 20 bp, Human papillomavirus type 60
aaatagaagaacctccacgt

SEQ ID NO: 50531 - DNA, 20 bp, Human papillomavirus type 60
caacgtgttacaacacgggc

SEQ ID NO: 50532 - DNA, 20 bp, Human papillomavirus type 60
aacgtgttacaacacgggca

SEQ ID NO: 50533 - DNA, 20 bp, Human papillomavirus type 60
caacacgggcaagggaatta

SEQ ID NO: 50534 - DNA, 20 bp, Human papillomavirus type 60
cagatgtcagggaattagga

SEQ ID NO: 50535 - DNA, 20 bp, Human papillomavirus type 60
ggacgagctcggttttcaga

SEQ ID NO: 50536 - DNA, 20 bp, Human papillomavirus type 60
tcagaaacatctgcaggaac

SEQ ID NO: 50537 - DNA, 20 bp, Human papillomavirus type 60
cagaaacatctgcaggaaca

SEQ ID NO: 50538 - DNA, 20 bp, Human papillomavirus type 60
agaaacatctgcaggaacaa

SEQ ID NO: 50539 - DNA, 20 bp, Human papillomavirus type 60
acagaaaactttaataatgc

SEQ ID NO: 50540 - DNA, 20 bp, Human papillomavirus type 60
cagaaaactttaataatgca

SEQ ID NO: 50541 - DNA, 20 bp, Human papillomavirus type 60
aataatgcacagctgatatt

SEQ ID NO: 50542 - DNA, 20 bp, Human papillomavirus type 60
ataatgcacagctgatattt

SEQ ID NO: 50543 - DNA, 20 bp, Human papillomavirus type 60
gcaacaatagatgaaggaga

SEQ ID NO: 50544 - DNA, 20 bp, Human papillomavirus type 60
tatttacatcctcatcttct

SEQ ID NO: 50545 - DNA, 20 bp, Human papillomavirus type 60
atttacatcctcatcttctt

SEQ ID NO: 50546 - DNA, 20 bp, Human papillomavirus type 60
tttacatcctcatcttctta

SEQ ID NO: 50547 - DNA, 20 bp, Human papillomavirus type 60
acatcctcatcttcttaggc

SEQ ID NO: 50548 - DNA, 20 bp, Human papillomavirus type 60
catcctcatcttcttaggcg

SEQ ID NO: 50549 - DNA, 20 bp, Human papillomavirus type 60
tgcgactactatttccagat

SEQ ID NO: 50550 - DNA, 20 bp, Human papillomavirus type 60
ccagatccaaacaaatttgc

SEQ ID NO: 50551 - DNA, 20 bp, Human papillomavirus type 60
cagatccaaacaaatttgca

SEQ ID NO: 50552 - DNA, 20 bp, Human papillomavirus type 60
gcaatgatagacagagctgt

SEQ ID NO: 50553 - DNA, 20 bp, Human papillomavirus type 60
caatgatagacagagctgtc

SEQ ID NO: 50554 - DNA, 20 bp, Human papillomavirus type 60
caatggatccaaaacaaatg

SEQ ID NO: 50555 - DNA, 20 bp, Human papillomavirus type 60
aatggatccaaaacaaatgc

SEQ ID NO: 50556 - DNA, 20 bp, Human papillomavirus type 60
tttattgtaggatgtaaacc

SEQ ID NO: 50557 - DNA, 20 bp, Human papillomavirus type 60
attgtaggatgtaaaccagc

SEQ ID NO: 50558 - DNA, 20 bp, Human papillomavirus type 60
ttgtaggatgtaaaccagcc

SEQ ID NO: 50559 - DNA, 20 bp, Human papillomavirus type 60
ataattatcttggcattgca

SEQ ID NO: 50560 - DNA, 20 bp, Human papillomavirus type 60
tcttggcattgcatatcgag

SEQ ID NO: 50561 - DNA, 20 bp, Human papillomavirus type 60
gcattgcatatcgagactat

SEQ ID NO: 50562 - DNA, 20 bp, Human papillomavirus type 60
catatcgagactataagaaa

SEQ ID NO: 50563 - DNA, 20 bp, Human papillomavirus type 60
gcacactctcggatttaaca

SEQ ID NO: 50564 - DNA, 20 bp, Human herpesvirus 4
ctgcgactcctgggcgccac

SEQ ID NO: 50565 - DNA, 20 bp, Human herpesvirus 4
gcgtggagatgggcaggcag

SEQ ID NO: 50566 - DNA, 20 bp, Human herpesvirus 4
ggcttcgaggtgcatagaag

SEQ ID NO: 50567 - DNA, 20 bp, Human herpesvirus 4
gcttcgaggtgcatagaagc

SEQ ID NO: 50568 - DNA, 20 bp, Human herpesvirus 4
gaggtgcatagaagccggcc

SEQ ID NO: 50569 - DNA, 20 bp, Human herpesvirus 4
gaggtgcagcacggcccaga

SEQ ID NO: 50570 - DNA, 20 bp, Human herpesvirus 4
aggtgcagcacggcccagag

SEQ ID NO: 50571 - DNA, 20 bp, Human herpesvirus 4
cgccagtcgctgcgcctgct

SEQ ID NO: 50572 - DNA, 20 bp, Human herpesvirus 4
ccagcagcaggcgcagcgac

SEQ ID NO: 50573 - DNA, 20 bp, Human herpesvirus 4
gatctggaccttgctcgccc

SEQ ID NO: 50574 - DNA, 20 bp, Human herpesvirus 4
ccaatcaattctgtgacggg

SEQ ID NO: 50575 - DNA, 20 bp, Human herpesvirus 4
tgtgacggggtttcctggac

SEQ ID NO: 50576 - DNA, 20 bp, Human herpesvirus 4
cctggacacccagtcttagt

SEQ ID NO: 50577 - DNA, 20 bp, Human herpesvirus 4
ctggacacccagtcttagtt

SEQ ID NO: 50578 - DNA, 20 bp, Human herpesvirus 4
gttcaggtagacacccagtt

SEQ ID NO: 50579 - DNA, 20 bp, Human herpesvirus 4
ggcctggctccccatagact

SEQ ID NO: 50580 - DNA, 20 bp, Human herpesvirus 4
tgcccccctggcggcccagc

SEQ ID NO: 50581 - DNA, 20 bp, Human herpesvirus 4
gcccccctggcggcccagcc

SEQ ID NO: 50582 - DNA, 20 bp, Human herpesvirus 4
cccccctggcggcccagccc

SEQ ID NO: 50583 - DNA, 20 bp, Human herpesvirus 4
catgggagtctatggggagc

SEQ ID NO: 50584 - DNA, 20 bp, Human herpesvirus 4
gcagaaaaaattaaagtcca

SEQ ID NO: 50585 - DNA, 20 bp, Human herpesvirus 4
aagtccacttacctctggcc

SEQ ID NO: 50586 - DNA, 20 bp, Human herpesvirus 4
cctctggcccgataccgggg

SEQ ID NO: 50587 - DNA, 20 bp, Human herpesvirus 4
acttcggtctcccctaggct

SEQ ID NO: 50588 - DNA, 20 bp, Human herpesvirus 4
ggtctcccctaggcttggat

SEQ ID NO: 50589 - DNA, 20 bp, Human herpesvirus 4
ctaactttttccccttccct

SEQ ID NO: 50590 - DNA, 20 bp, Human herpesvirus 4
taactttttccccttccctc

SEQ ID NO: 50591 - DNA, 20 bp, Human herpesvirus 4
ttccccttccctccctcgtc

SEQ ID NO: 50592 - DNA, 20 bp, Human herpesvirus 4
tccccttccctccctcgtct

SEQ ID NO: 50593 - DNA, 20 bp, Human herpesvirus 4
ccccttccctccctcgtctt

SEQ ID NO: 50594 - DNA, 20 bp, Human herpesvirus 4
tcccgtggacaatgtccctc

SEQ ID NO: 50595 - DNA, 20 bp, Human herpesvirus 4
gggatgcatcactttgagcc

SEQ ID NO: 50596 - DNA, 20 bp, Human herpesvirus 4
ggatgcatcactttgagcca

SEQ ID NO: 50597 - DNA, 20 bp, Human herpesvirus 4
gagccactaagcccccgttg

SEQ ID NO: 50598 - DNA, 20 bp, Human herpesvirus 4
agccactaagcccccgttgc

SEQ ID NO: 50599 - DNA, 20 bp, Human herpesvirus 4
taagagttaaaagcaactac

SEQ ID NO: 50600 - DNA, 20 bp, Human herpesvirus 4
aagagttaaaagcaactact

SEQ ID NO: 50601 - DNA, 20 bp, Human herpesvirus 4
agagttaaaagcaactactg

SEQ ID NO: 50602 - DNA, 20 bp, Human herpesvirus 4
aaagcaactactgtttattt

SEQ ID NO: 50603 - DNA, 20 bp, Human herpesvirus 4
attttccaaaatgagctggg

SEQ ID NO: 50604 - DNA, 20 bp, Human herpesvirus 4
gaggccgtgtagtttctgtg

SEQ ID NO: 50605 - DNA, 20 bp, Human herpesvirus 4
aggccgtgtagtttctgtgg

SEQ ID NO: 50606 - DNA, 20 bp, Human herpesvirus 4
ctgtggtgcggatgcattag

SEQ ID NO: 50607 - DNA, 20 bp, Human herpesvirus 4
tgtggtgcggatgcattagg

SEQ ID NO: 50608 - DNA, 20 bp, Human herpesvirus 4
ggcggcgcaatgcgggatct

SEQ ID NO: 50609 - DNA, 20 bp, Human herpesvirus 4
cttcttccacggcgccgcct

SEQ ID NO: 50610 - DNA, 20 bp, Human herpesvirus 4
ttccacggcgccgcctcgga

SEQ ID NO: 50611 - DNA, 20 bp, Human herpesvirus 4
cacggcgccgcctcggattc

SEQ ID NO: 50612 - DNA, 20 bp, Human herpesvirus 4
cgaccacgagtctttgtccc

SEQ ID NO: 50613 - DNA, 20 bp, Human herpesvirus 4
tcccgctgggcccagtctca

SEQ ID NO: 50614 - DNA, 20 bp, Human herpesvirus 4
gcgacagagttacaccagcg

SEQ ID NO: 50615 - DNA, 20 bp, Human herpesvirus 4
caccagcgactgcaccttcg

SEQ ID NO: 50616 - DNA, 20 bp, Human herpesvirus 4
tctcgtgtctgctgaacgtg

SEQ ID NO: 50617 - DNA, 20 bp, Human herpesvirus 4
cagatcccacgcctccagac

SEQ ID NO: 50618 - DNA, 20 bp, Human herpesvirus 4
agatcccacgcctccagacc

SEQ ID NO: 50619 - DNA, 20 bp, Human herpesvirus 4
taggcccggggacccgcggc

SEQ ID NO: 50620 - DNA, 20 bp, Human herpesvirus 4
aagacgctgctgatggtgtg

SEQ ID NO: 50621 - DNA, 20 bp, Human herpesvirus 4
aacgacttttgggctccagc

SEQ ID NO: 50622 - DNA, 20 bp, Human herpesvirus 4
acgacttttgggctccagcc

SEQ ID NO: 50623 - DNA, 20 bp, Human herpesvirus 4
tgggctccagccccaggaca

SEQ ID NO: 50624 - DNA, 20 bp, Human herpesvirus 4
gggctccagccccaggacac

SEQ ID NO: 50625 - DNA, 20 bp, Human herpesvirus 4
ccatcaatcgggggcctggg

SEQ ID NO: 50626 - DNA, 20 bp, Human herpesvirus 4
ccccgggattggccgccccc

SEQ ID NO: 50627 - DNA, 20 bp, Human herpesvirus 4
gccgcccccatcactctccc

SEQ ID NO: 50628 - DNA, 20 bp, Human herpesvirus 4
atggcaaggccctatttcgg

SEQ ID NO: 50629 - DNA, 20 bp, Human herpesvirus 4
ctgggcgccccatcgttcta

SEQ ID NO: 50630 - DNA, 20 bp, Human herpesvirus 4
tacgcaggactcggcctggt

SEQ ID NO: 50631 - DNA, 20 bp, Human herpesvirus 4
agggggtcgcagggagactc

SEQ ID NO: 50632 - DNA, 20 bp, Human herpesvirus 4
ccagccagagggtgccggcg

SEQ ID NO: 50633 - DNA, 20 bp, Human herpesvirus 4
cagccagagggtgccggcgt

SEQ ID NO: 50634 - DNA, 20 bp, Human herpesvirus 4
acccggcctacgtctccgca

SEQ ID NO: 50635 - DNA, 20 bp, Human herpesvirus 4
ccgccatctcgtgggccttc

SEQ ID NO: 50636 - DNA, 20 bp, Human herpesvirus 4
gccatcagggtctggctctc

SEQ ID NO: 50637 - DNA, 20 bp, Human herpesvirus 4
cacacggctctggaggccgt

SEQ ID NO: 50638 - DNA, 20 bp, Human herpesvirus 4
acacggctctggaggccgtc

SEQ ID NO: 50639 - DNA, 20 bp, Human herpesvirus 4
ctaattctggcccaggcctc

SEQ ID NO: 50640 - DNA, 20 bp, Human herpesvirus 4
tggcccaggcctcattcgcc

SEQ ID NO: 50641 - DNA, 20 bp, Human herpesvirus 4
gcctctcgcgctcgccgctc

SEQ ID NO: 50642 - DNA, 20 bp, Human herpesvirus 4
ggaaggcgctgggggcacgc

SEQ ID NO: 50643 - DNA, 20 bp, Human herpesvirus 4
gtggccagggacggcaggca

SEQ ID NO: 50644 - DNA, 20 bp, Human herpesvirus 4
gcggccaggtgctcatggaa

SEQ ID NO: 50645 - DNA, 20 bp, Human herpesvirus 4
cggccaggtgctcatggaac

SEQ ID NO: 50646 - DNA, 20 bp, Human herpesvirus 4
catgagcacctggccgcaaa

SEQ ID NO: 50647 - DNA, 20 bp, Human herpesvirus 4
cagtgggcctggttgcacga

SEQ ID NO: 50648 - DNA, 20 bp, Human herpesvirus 4
cacgaggccgtgcctaggat

SEQ ID NO: 50649 - DNA, 20 bp, Human herpesvirus 4
ggccgctttgccggcatcca

SEQ ID NO: 50650 - DNA, 20 bp, Human herpesvirus 4
gccgctttgccggcatccag

SEQ ID NO: 50651 - DNA, 20 bp, Human herpesvirus 4
gggccggcacgaggtggtgg

SEQ ID NO: 50652 - DNA, 20 bp, Human herpesvirus 4
tcgccgcctttgctcgcacg

SEQ ID NO: 50653 - DNA, 20 bp, Human herpesvirus 4
gctcgcacggcccgggtcca

SEQ ID NO: 50654 - DNA, 20 bp, Human herpesvirus 4
ctcgcacggcccgggtccag

SEQ ID NO: 50655 - DNA, 20 bp, Human herpesvirus 4
tccttcaccgctaccaccgc

SEQ ID NO: 50656 - DNA, 20 bp, Human herpesvirus 4
ccttcaccgctaccaccgcc

SEQ ID NO: 50657 - DNA, 20 bp, Human herpesvirus 4
cttcaccgctaccaccgcct

SEQ ID NO: 50658 - DNA, 20 bp, Human herpesvirus 4
accgctaccaccgcctcctc

SEQ ID NO: 50659 - DNA, 20 bp, Human herpesvirus 4
cgtcgccagagggatctgca

SEQ ID NO: 50660 - DNA, 20 bp, Human herpesvirus 4
atccttttgaaggaggcctg

SEQ ID NO: 50661 - DNA, 20 bp, Human herpesvirus 4
tgaaggaggcctgcaacgcc

SEQ ID NO: 50662 - DNA, 20 bp, Human herpesvirus 4
gaaggaggcctgcaacgccc

SEQ ID NO: 50663 - DNA, 20 bp, Human herpesvirus 4
aaggaggcctgcaacgccca

SEQ ID NO: 50664 - DNA, 20 bp, Human herpesvirus 4
tggcgcgacctgcagggcga

SEQ ID NO: 50665 - DNA, 20 bp, Human herpesvirus 4
atccccctgcgtgtcggccc

SEQ ID NO: 50666 - DNA, 20 bp, Human herpesvirus 4
cggggccggttgacatcatg

SEQ ID NO: 50667 - DNA, 20 bp, Human herpesvirus 4
acatcatgagcaagggccca

SEQ ID NO: 50668 - DNA, 20 bp, Human herpesvirus 4
ctcatgatgtcaaccggccc

SEQ ID NO: 50669 - DNA, 20 bp, Human herpesvirus 4
catgggacgaggcggcatct

SEQ ID NO: 50670 - DNA, 20 bp, Human herpesvirus 4
tctgctcggtagcagcggac

SEQ ID NO: 50671 - DNA, 20 bp, Human herpesvirus 4
gcctctgccgcattccggcc

SEQ ID NO: 50672 - DNA, 20 bp, Human herpesvirus 4
cggccgttagcgtgccaatc

SEQ ID NO: 50673 - DNA, 20 bp, Human herpesvirus 4
gcgtgccaatcttgaggttt

SEQ ID NO: 50674 - DNA, 20 bp, Human herpesvirus 4
gcacgctaacggccggaatg

SEQ ID NO: 50675 - DNA, 20 bp, Human herpesvirus 4
ccagccactccagcaacacc

SEQ ID NO: 50676 - DNA, 20 bp, Human herpesvirus 4
agctcgcgaggaaaaggaca

SEQ ID NO: 50677 - DNA, 20 bp, Human herpesvirus 4
tcctcgcgagctgaacagcc

SEQ ID NO: 50678 - DNA, 20 bp, Human herpesvirus 4
cctcgcgagctgaacagcca

SEQ ID NO: 50679 - DNA, 20 bp, Human herpesvirus 4
ctcgcgagctgaacagccag

SEQ ID NO: 50680 - DNA, 20 bp, Human herpesvirus 4
gtcggggtggagacgacctc

SEQ ID NO: 50681 - DNA, 20 bp, Human herpesvirus 4
caaagtagtgcctgtctgca

SEQ ID NO: 50682 - DNA, 20 bp, Human herpesvirus 4
tgcagacaggcactactttg

SEQ ID NO: 50683 - DNA, 20 bp, Human herpesvirus 4
gcagacaggcactactttgt

SEQ ID NO: 50684 - DNA, 20 bp, Human herpesvirus 4
cagacaggcactactttgta

SEQ ID NO: 50685 - DNA, 20 bp, Human herpesvirus 4
acttccgagtctggtcagag

SEQ ID NO: 50686 - DNA, 20 bp, Human herpesvirus 4
cttccgagtctggtcagagc

SEQ ID NO: 50687 - DNA, 20 bp, Human herpesvirus 4
cgagtctggtcagagcctgg

SEQ ID NO: 50688 - DNA, 20 bp, Human herpesvirus 4
ggctcctcggcatgggcgga

SEQ ID NO: 50689 - DNA, 20 bp, Human herpesvirus 4
gctcctcggcatgggcggag

SEQ ID NO: 50690 - DNA, 20 bp, Human herpesvirus 4
acgcggtagatgcggcgcag

SEQ ID NO: 50691 - DNA, 20 bp, Human herpesvirus 4
ggacgcagccacgccacgcg

SEQ ID NO: 50692 - DNA, 20 bp, Human herpesvirus 4
acatctcggccaggtggttc

SEQ ID NO: 50693 - DNA, 20 bp, Human herpesvirus 4
tggcacaaacaaaacaggcg

SEQ ID NO: 50694 - DNA, 20 bp, Human herpesvirus 4
cggaggccatcctcgatgcc

SEQ ID NO: 50695 - DNA, 20 bp, Human herpesvirus 4
cgcctgttttgtttgtgcca

SEQ ID NO: 50696 - DNA, 20 bp, Human herpesvirus 4
tgtttgtgccacaacgcctc

SEQ ID NO: 50697 - DNA, 20 bp, Human herpesvirus 4
gtttgtgccacaacgcctcg

SEQ ID NO: 50698 - DNA, 20 bp, Human herpesvirus 4
catcaactccgcctttgagc

SEQ ID NO: 50699 - DNA, 20 bp, Human herpesvirus 4
atcaactccgcctttgagcc

SEQ ID NO: 50700 - DNA, 20 bp, Human herpesvirus 4
gagcccgaggtgcccacccc

SEQ ID NO: 50701 - DNA, 20 bp, Human herpesvirus 4
agcccgaggtgcccaccccc

SEQ ID NO: 50702 - DNA, 20 bp, Human herpesvirus 4
caccgcctcccgtggtgcgg

SEQ ID NO: 50703 - DNA, 20 bp, Human herpesvirus 4
tgagctccgatggacgcagc

SEQ ID NO: 50704 - DNA, 20 bp, Human herpesvirus 4
gagctccgatggacgcagcg

SEQ ID NO: 50705 - DNA, 20 bp, Human herpesvirus 4
agctccgatggacgcagcgt

SEQ ID NO: 50706 - DNA, 20 bp, Human herpesvirus 4
tagcgccgctgattctggag

SEQ ID NO: 50707 - DNA, 20 bp, Human herpesvirus 4
tggaggattagccggagttc

SEQ ID NO: 50708 - DNA, 20 bp, Human herpesvirus 4
cttctgctccagtgcctccg

SEQ ID NO: 50709 - DNA, 20 bp, Human herpesvirus 4
tgctccagtgcctccgcctg

SEQ ID NO: 50710 - DNA, 20 bp, Human herpesvirus 4
cttcagagccttattctcag

SEQ ID NO: 50711 - DNA, 20 bp, Human herpesvirus 4
agagccttattctcagactc

SEQ ID NO: 50712 - DNA, 20 bp, Human herpesvirus 4
ctttctgtgccgttgtcccg

SEQ ID NO: 50713 - DNA, 20 bp, Human herpesvirus 4
ctgtgccgttgtcccgtgga

SEQ ID NO: 50714 - DNA, 20 bp, Human herpesvirus 4
tgtgccgttgtcccgtggag

SEQ ID NO: 50715 - DNA, 20 bp, Human herpesvirus 4
tcccgtggagatggacttgg

SEQ ID NO: 50716 - DNA, 20 bp, Human herpesvirus 4
gtgtcaccggtgatgcgcct

SEQ ID NO: 50717 - DNA, 20 bp, Human herpesvirus 4
attccttgagcaaaacctga

SEQ ID NO: 50718 - DNA, 20 bp, Human herpesvirus 4
ttccttgagcaaaacctgaa

SEQ ID NO: 50719 - DNA, 20 bp, Human herpesvirus 4
cttgagcaaaacctgaacat

SEQ ID NO: 50720 - DNA, 20 bp, Human herpesvirus 4
agcaaaacctgaacatcgaa

SEQ ID NO: 50721 - DNA, 20 bp, Human herpesvirus 4
atatggatgtgcatgacagt

SEQ ID NO: 50722 - DNA, 20 bp, Human herpesvirus 4
gacgtggacccttggttgta

SEQ ID NO: 50723 - DNA, 20 bp, Human herpesvirus 4
gttgtagagggaggtgttgg

SEQ ID NO: 50724 - DNA, 20 bp, Human herpesvirus 4
tagagggaggtgttggttgg

SEQ ID NO: 50725 - DNA, 20 bp, Human herpesvirus 4
gttggcgacattggcttctg

SEQ ID NO: 50726 - DNA, 20 bp, Human herpesvirus 4
gcgacattggcttctgacat

SEQ ID NO: 50727 - DNA, 20 bp, Human herpesvirus 4
cgagttcatctgtaaaagca

SEQ ID NO: 50728 - DNA, 20 bp, Human herpesvirus 4
gagttcatctgtaaaagcat

SEQ ID NO: 50729 - DNA, 20 bp, Human herpesvirus 4
atctgtaaaagcatgaaact

SEQ ID NO: 50730 - DNA, 20 bp, Human herpesvirus 4
catgcttttacagatgaact

SEQ ID NO: 50731 - DNA, 20 bp, Human herpesvirus 4
atgcttttacagatgaactc

SEQ ID NO: 50732 - DNA, 20 bp, Human herpesvirus 4
tgcgtggccgtcatggaggg

SEQ ID NO: 50733 - DNA, 20 bp, Human herpesvirus 4
ccttcctcatacctatggag

SEQ ID NO: 50734 - DNA, 20 bp, Human herpesvirus 4
ctcatacctatggagatgcc

SEQ ID NO: 50735 - DNA, 20 bp, Human herpesvirus 4
gcagccaatgcaacttggac

SEQ ID NO: 50736 - DNA, 20 bp, Human herpesvirus 4
cagccaatgcaacttggacg

SEQ ID NO: 50737 - DNA, 20 bp, Human herpesvirus 4
gacgtttttggggtctccgg

SEQ ID NO: 50738 - DNA, 20 bp, Human herpesvirus 4
ttggggtctccggacaccat

SEQ ID NO: 50739 - DNA, 20 bp, Human herpesvirus 4
tggggtctccggacaccatc

SEQ ID NO: 50740 - DNA, 20 bp, Human herpesvirus 4
cacgacttccccccctggct

SEQ ID NO: 50741 - DNA, 20 bp, Human herpesvirus 4
acgacttccccccctggctc

SEQ ID NO: 50742 - DNA, 20 bp, Human herpesvirus 4
cccccctggctctttcacgt

SEQ ID NO: 50743 - DNA, 20 bp, Human herpesvirus 4
cacgtcctctaccccggcgg

SEQ ID NO: 50744 - DNA, 20 bp, Human herpesvirus 4
acgtcctctaccccggcggc

SEQ ID NO: 50745 - DNA, 20 bp, Human herpesvirus 4
ttagtattgtgttccaggca

SEQ ID NO: 50746 - DNA, 20 bp, Human herpesvirus 4
gtattgtgttccaggcagca

SEQ ID NO: 50747 - DNA, 20 bp, Human herpesvirus 4
tgttccaggcagcacacgaa

SEQ ID NO: 50748 - DNA, 20 bp, Human herpesvirus 4
caggcagcacacgaagcctg

SEQ ID NO: 50749 - DNA, 20 bp, Human herpesvirus 4
accattagcctgggcatgcg

SEQ ID NO: 50750 - DNA, 20 bp, Human herpesvirus 4
gttcgcctgaactcggcggc

SEQ ID NO: 50751 - DNA, 20 bp, Human herpesvirus 4
gcctgaactcggcggcaatg

SEQ ID NO: 50752 - DNA, 20 bp, Human herpesvirus 4
ccgccgagttcaggcgaacc

SEQ ID NO: 50753 - DNA, 20 bp, Human herpesvirus 4
aggcgaaccaagcccagggg

SEQ ID NO: 50754 - DNA, 20 bp, Human herpesvirus 4
gaggtcctgagagacatgca

SEQ ID NO: 50755 - DNA, 20 bp, Human herpesvirus 4
atgtggcggctcttgaaccc

SEQ ID NO: 50756 - DNA, 20 bp, Human herpesvirus 4
tgtggcggctcttgaaccca

SEQ ID NO: 50757 - DNA, 20 bp, Human herpesvirus 4
aacccaaaggcgctatagac

SEQ ID NO: 50758 - DNA, 20 bp, Human herpesvirus 4
ggcagtaggctcggagtgtc

SEQ ID NO: 50759 - DNA, 20 bp, Human herpesvirus 4
gggttcaagagccgccacat

SEQ ID NO: 50760 - DNA, 20 bp, Human herpesvirus 4
accgccataacgccatctgc

SEQ ID NO: 50761 - DNA, 20 bp, Human herpesvirus 4
tggcggttaacttccagcac

SEQ ID NO: 50762 - DNA, 20 bp, Human herpesvirus 4
acttccagcaccaggcgggg

SEQ ID NO: 50763 - DNA, 20 bp, Human herpesvirus 4
cagcaccaggcggggggtca

SEQ ID NO: 50764 - DNA, 20 bp, Human herpesvirus 4
ctttttgcatggtcaggctc

SEQ ID NO: 50765 - DNA, 20 bp, Human herpesvirus 4
gggtgaaggctcgacgcggg

SEQ ID NO: 50766 - DNA, 20 bp, Human herpesvirus 4
cagggggatctttacgtggg

SEQ ID NO: 50767 - DNA, 20 bp, Human herpesvirus 4
agggggatctttacgtgggt

SEQ ID NO: 50768 - DNA, 20 bp, Human herpesvirus 4
acgtgggtggatgtagggag

SEQ ID NO: 50769 - DNA, 20 bp, Human herpesvirus 4
cgtgggtggatgtagggagc

SEQ ID NO: 50770 - DNA, 20 bp, Human herpesvirus 4
gtgccacaaagcccaggatg

SEQ ID NO: 50771 - DNA, 20 bp, Human herpesvirus 4
tcctacacgcggccgctgac

SEQ ID NO: 50772 - DNA, 20 bp, Human herpesvirus 4
tgcagacgagttcatcctgg

SEQ ID NO: 50773 - DNA, 20 bp, Human herpesvirus 4
atcctgggctttgtggcacc

SEQ ID NO: 50774 - DNA, 20 bp, Human herpesvirus 4
ttggtcccgcccatcatccc

SEQ ID NO: 50775 - DNA, 20 bp, Human herpesvirus 4
gtcccgcccatcatcccccg

SEQ ID NO: 50776 - DNA, 20 bp, Human herpesvirus 4
ggcagaccacctgtgctgga

SEQ ID NO: 50777 - DNA, 20 bp, Human herpesvirus 4
gcagaccacctgtgctggaa

SEQ ID NO: 50778 - DNA, 20 bp, Human herpesvirus 4
cagcctctctttccagcaca

SEQ ID NO: 50779 - DNA, 20 bp, Human herpesvirus 4
ccccgtgctgcagcgtaaac

SEQ ID NO: 50780 - DNA, 20 bp, Human herpesvirus 4
gcagtgggacctggggccgt

SEQ ID NO: 50781 - DNA, 20 bp, Human herpesvirus 4
gatgtgggccctcttctacg

SEQ ID NO: 50782 - DNA, 20 bp, Human herpesvirus 4
tacggccccaggtcccactg

SEQ ID NO: 50783 - DNA, 20 bp, Human herpesvirus 4
acgctgcagcacggggcaag

SEQ ID NO: 50784 - DNA, 20 bp, Human herpesvirus 4
accgcgttgaacatgctgta

SEQ ID NO: 50785 - DNA, 20 bp, Human herpesvirus 4
aacatgctgtatgcctcgca

SEQ ID NO: 50786 - DNA, 20 bp, Human herpesvirus 4
cttaggttctcggtcagacg

SEQ ID NO: 50787 - DNA, 20 bp, Human herpesvirus 4
ttaggttctcggtcagacgg

SEQ ID NO: 50788 - DNA, 20 bp, Human herpesvirus 4
ggttctcggtcagacggccg

SEQ ID NO: 50789 - DNA, 20 bp, Human herpesvirus 4
caagggctactagctgggaa

SEQ ID NO: 50790 - DNA, 20 bp, Human herpesvirus 4
ccccaggccgaggccccttc

SEQ ID NO: 50791 - DNA, 20 bp, Human herpesvirus 4
gggctgcttcccagctagta

SEQ ID NO: 50792 - DNA, 20 bp, Human herpesvirus 4
ccagctagtagcccttggaa

SEQ ID NO: 50793 - DNA, 20 bp, Human herpesvirus 4
ggcacgcgattggggcaaag

SEQ ID NO: 50794 - DNA, 20 bp, Human herpesvirus 4
gcacgcgattggggcaaagc

SEQ ID NO: 50795 - DNA, 20 bp, Human herpesvirus 4
gggcaaagctctgccataac

SEQ ID NO: 50796 - DNA, 20 bp, Human herpesvirus 4
gttcccgacacggttatggc

SEQ ID NO: 50797 - DNA, 20 bp, Human herpesvirus 4
ttcccgacacggttatggca

SEQ ID NO: 50798 - DNA, 20 bp, Human herpesvirus 4
cctgtaagggcgcacaccac

SEQ ID NO: 50799 - DNA, 20 bp, Human herpesvirus 4
agacccatgagggagtggtg

SEQ ID NO: 50800 - DNA, 20 bp, Human herpesvirus 4
caggcaactacatggggccg

SEQ ID NO: 50801 - DNA, 20 bp, Human herpesvirus 4
ccagccggcgctgaggccct

SEQ ID NO: 50802 - DNA, 20 bp, Human herpesvirus 4
cagccggcgctgaggccctg

SEQ ID NO: 50803 - DNA, 20 bp, Human herpesvirus 4
acaccctcaacccccgagta

SEQ ID NO: 50804 - DNA, 20 bp, Human herpesvirus 4
agggtgtcaacccggcagag

SEQ ID NO: 50805 - DNA, 20 bp, Human herpesvirus 4
atggcatcgtcacgcacagt

SEQ ID NO: 50806 - DNA, 20 bp, Human herpesvirus 4
ttcctcaaggacctaacagg

SEQ ID NO: 50807 - DNA, 20 bp, Human herpesvirus 4
ctcaaggacctaacagggga

SEQ ID NO: 50808 - DNA, 20 bp, Human herpesvirus 4
ggtccttgaggaagaagtgt

SEQ ID NO: 50809 - DNA, 20 bp, Human herpesvirus 4
aggaagaagtgttccaggcc

SEQ ID NO: 50810 - DNA, 20 bp, Human herpesvirus 4
cttccgtttcatgcctccag

SEQ ID NO: 50811 - DNA, 20 bp, Human herpesvirus 4
cgtttcatgcctccagctgc

SEQ ID NO: 50812 - DNA, 20 bp, Human herpesvirus 4
catgcctccagctgcccctg

SEQ ID NO: 50813 - DNA, 20 bp, Human herpesvirus 4
atgcctccagctgcccctga

SEQ ID NO: 50814 - DNA, 20 bp, Human herpesvirus 4
ggacccttgacggatgtctt

SEQ ID NO: 50815 - DNA, 20 bp, Human herpesvirus 4
tcggcgggattcggggccag

SEQ ID NO: 50816 - DNA, 20 bp, Human herpesvirus 4
ggggccagctgctgcgtaac

SEQ ID NO: 50817 - DNA, 20 bp, Human herpesvirus 4
tccaccgacacgcgcacggt

SEQ ID NO: 50818 - DNA, 20 bp, Human herpesvirus 4
cacccgcaccgtgcgcgtgt

SEQ ID NO: 50819 - DNA, 20 bp, Human herpesvirus 4
acccgcaccgtgcgcgtgtc

SEQ ID NO: 50820 - DNA, 20 bp, Human herpesvirus 4
gcggtcgtgtaggtactgac

SEQ ID NO: 50821 - DNA, 20 bp, Human herpesvirus 4
agcacgctctccccggacac

SEQ ID NO: 50822 - DNA, 20 bp, Human herpesvirus 4
ccctcggtggtgtcctgcca

SEQ ID NO: 50823 - DNA, 20 bp, Human herpesvirus 4
cctcggtggtgtcctgccag

SEQ ID NO: 50824 - DNA, 20 bp, Human herpesvirus 4
aaggccgcaactgccaccat

SEQ ID NO: 50825 - DNA, 20 bp, Human herpesvirus 4
aggccgcaactgccaccata

SEQ ID NO: 50826 - DNA, 20 bp, Human herpesvirus 4
cggccttaaaccaggacacg

SEQ ID NO: 50827 - DNA, 20 bp, Human herpesvirus 4
cctcggcgctgggactgcct

SEQ ID NO: 50828 - DNA, 20 bp, Human herpesvirus 4
cgtgcctcgggcctcaacgt

SEQ ID NO: 50829 - DNA, 20 bp, Human herpesvirus 4
aggcccgaggcacggaagag

SEQ ID NO: 50830 - DNA, 20 bp, Human herpesvirus 4
tccccaggcagtcccagcgc

SEQ ID NO: 50831 - DNA, 20 bp, Human herpesvirus 4
ccccaggcagtcccagcgcc

SEQ ID NO: 50832 - DNA, 20 bp, Human herpesvirus 4
tccatggttgagtccgtaaa

SEQ ID NO: 50833 - DNA, 20 bp, Human herpesvirus 4
agtccgtaaaacgagtccgg

SEQ ID NO: 50834 - DNA, 20 bp, Human herpesvirus 4
gctccctcatcgacccggac

SEQ ID NO: 50835 - DNA, 20 bp, Human herpesvirus 4
ctccctcatcgacccggact

SEQ ID NO: 50836 - DNA, 20 bp, Human herpesvirus 4
tacggactcaaccatggaga

SEQ ID NO: 50837 - DNA, 20 bp, Human herpesvirus 4
cttcatacaggcccgcaatt

SEQ ID NO: 50838 - DNA, 20 bp, Human herpesvirus 4
ttcatacaggcccgcaattt

SEQ ID NO: 50839 - DNA, 20 bp, Human herpesvirus 4
atacaggcccgcaatttcca

SEQ ID NO: 50840 - DNA, 20 bp, Human herpesvirus 4
ccatgacagtcccgttggtg

SEQ ID NO: 50841 - DNA, 20 bp, Human herpesvirus 4
catgacagtcccgttggtgg

SEQ ID NO: 50842 - DNA, 20 bp, Human herpesvirus 4
gtatagggcaaggttgggcc

SEQ ID NO: 50843 - DNA, 20 bp, Human herpesvirus 4
ggcccctgggtagtcacgtt

SEQ ID NO: 50844 - DNA, 20 bp, Human herpesvirus 4
agccgcaactcgcgtagcac

SEQ ID NO: 50845 - DNA, 20 bp, Human herpesvirus 4
atcggcagccacgtggtgct

SEQ ID NO: 50846 - DNA, 20 bp, Human herpesvirus 4
tcggcagccacgtggtgcta

SEQ ID NO: 50847 - DNA, 20 bp, Human herpesvirus 4
atagaccccgcccgactgcc

SEQ ID NO: 50848 - DNA, 20 bp, Human herpesvirus 4
agcaggccggtggtggaggt

SEQ ID NO: 50849 - DNA, 20 bp, Human herpesvirus 4
ggcttgccgggcctctttgg

SEQ ID NO: 50850 - DNA, 20 bp, Human herpesvirus 4
gcttgccgggcctctttggc

SEQ ID NO: 50851 - DNA, 20 bp, Human herpesvirus 4
ccgggcctctttggcccccc

SEQ ID NO: 50852 - DNA, 20 bp, Human herpesvirus 4
ggcccccctccacccgtgcc

SEQ ID NO: 50853 - DNA, 20 bp, Human herpesvirus 4
gcccccctccacccgtgcct

SEQ ID NO: 50854 - DNA, 20 bp, Human herpesvirus 4
gactgagccactccggacgc

SEQ ID NO: 50855 - DNA, 20 bp, Human herpesvirus 4
ctttccgcggtggtggccct

SEQ ID NO: 50856 - DNA, 20 bp, Human herpesvirus 4
tttccgcggtggtggccctc

SEQ ID NO: 50857 - DNA, 20 bp, Human herpesvirus 4
ccgcggtggtggccctcggt

SEQ ID NO: 50858 - DNA, 20 bp, Human herpesvirus 4
cgcggtggtggccctcggtg

SEQ ID NO: 50859 - DNA, 20 bp, Human herpesvirus 4
ggacttaatcgctcctgtgc

SEQ ID NO: 50860 - DNA, 20 bp, Human herpesvirus 4
atcgctcctgtgccgctgga

SEQ ID NO: 50861 - DNA, 20 bp, Human herpesvirus 4
gtacatcctagctctggcca

SEQ ID NO: 50862 - DNA, 20 bp, Human herpesvirus 4
tacatcctagctctggccat

SEQ ID NO: 50863 - DNA, 20 bp, Human herpesvirus 4
gcgctccctcatccagcggc

SEQ ID NO: 50864 - DNA, 20 bp, Human herpesvirus 4
agtgcacgcatcttccgttg

SEQ ID NO: 50865 - DNA, 20 bp, Human herpesvirus 4
gtgcacgcatcttccgttgc

SEQ ID NO: 50866 - DNA, 20 bp, Human herpesvirus 4
cgttgcattgacggaagtca

SEQ ID NO: 50867 - DNA, 20 bp, Human herpesvirus 4
cattgacggaagtcatgttg

SEQ ID NO: 50868 - DNA, 20 bp, Human herpesvirus 4
acggaagtcatgttggccac

SEQ ID NO: 50869 - DNA, 20 bp, Human herpesvirus 4
ggctccacaaagacgtactg

SEQ ID NO: 50870 - DNA, 20 bp, Human herpesvirus 4
ctcgttgcgctcgacgaact

SEQ ID NO: 50871 - DNA, 20 bp, Human herpesvirus 4
cgctcgacgaacttctggta

SEQ ID NO: 50872 - DNA, 20 bp, Human herpesvirus 4
gtcgagcgcaacgaggaact

SEQ ID NO: 50873 - DNA, 20 bp, Human herpesvirus 4
gtggagcccaaggggggagt

SEQ ID NO: 50874 - DNA, 20 bp, Human herpesvirus 4
gtgttggcccgcaagaagcc

SEQ ID NO: 50875 - DNA, 20 bp, Human herpesvirus 4
gcccgcaagaagcccttgcc

SEQ ID NO: 50876 - DNA, 20 bp, Human herpesvirus 4
cccgcatcatggggtcgcct

SEQ ID NO: 50877 - DNA, 20 bp, Human herpesvirus 4
tgcccagagaggctgggttg

SEQ ID NO: 50878 - DNA, 20 bp, Human herpesvirus 4
gcccagagaggctgggttga

SEQ ID NO: 50879 - DNA, 20 bp, Human herpesvirus 4
ggcacgctggcgccaccaca

SEQ ID NO: 50880 - DNA, 20 bp, Human herpesvirus 4
ccatcctcgtcaccccccac

SEQ ID NO: 50881 - DNA, 20 bp, Human herpesvirus 4
catcctcgtcaccccccacc

SEQ ID NO: 50882 - DNA, 20 bp, Human herpesvirus 4
gtagaagcacagggggggct

SEQ ID NO: 50883 - DNA, 20 bp, Human herpesvirus 4
taccaagactccctgacggt

SEQ ID NO: 50884 - DNA, 20 bp, Human herpesvirus 4
tggtgaggcagcgtacctgc

SEQ ID NO: 50885 - DNA, 20 bp, Human herpesvirus 4
ctgggtgggggaaagagccc

SEQ ID NO: 50886 - DNA, 20 bp, Human herpesvirus 4
cccccacccagcaacgtggc

SEQ ID NO: 50887 - DNA, 20 bp, Human herpesvirus 4
ccccacccagcaacgtggcc

SEQ ID NO: 50888 - DNA, 20 bp, Human herpesvirus 4
tgatgtacttggaattctca

SEQ ID NO: 50889 - DNA, 20 bp, Human herpesvirus 4
gatgtacttggaattctcaa

SEQ ID NO: 50890 - DNA, 20 bp, Human herpesvirus 4
atgtacttggaattctcaaa

SEQ ID NO: 50891 - DNA, 20 bp, Human herpesvirus 4
gaattctcaaaggcggcacc

SEQ ID NO: 50892 - DNA, 20 bp, Human herpesvirus 4
tcaaaggcggcaccctcgcc

SEQ ID NO: 50893 - DNA, 20 bp, Human herpesvirus 4
attctcaaacagtcccgaga

SEQ ID NO: 50894 - DNA, 20 bp, Human herpesvirus 4
tcaaacagtcccgagaccgg

SEQ ID NO: 50895 - DNA, 20 bp, Human herpesvirus 4
accggcaccgccaggtggtt

SEQ ID NO: 50896 - DNA, 20 bp, Human herpesvirus 4
caggagacgtgggtcccctc

SEQ ID NO: 50897 - DNA, 20 bp, Human herpesvirus 4
cacggcagaggggacccacg

SEQ ID NO: 50898 - DNA, 20 bp, Human herpesvirus 4
aggctggccggggtctcgtg

SEQ ID NO: 50899 - DNA, 20 bp, Human herpesvirus 4
tggacagcgcggcctgcgag

SEQ ID NO: 50900 - DNA, 20 bp, Human herpesvirus 4
taacgatggaatggccacca

SEQ ID NO: 50901 - DNA, 20 bp, Human herpesvirus 4
aacgatggaatggccaccag

SEQ ID NO: 50902 - DNA, 20 bp, Human herpesvirus 4
acgatggaatggccaccagg

SEQ ID NO: 50903 - DNA, 20 bp, Human herpesvirus 4
ccgctgtagagtcgctcctt

SEQ ID NO: 50904 - DNA, 20 bp, Human herpesvirus 4
cgctgtagagtcgctccttg

SEQ ID NO: 50905 - DNA, 20 bp, Human herpesvirus 4
atgctgaagcccggctccac

SEQ ID NO: 50906 - DNA, 20 bp, Human herpesvirus 4
gtggcatcaccgtggagccg

SEQ ID NO: 50907 - DNA, 20 bp, Human herpesvirus 4
tggcatcaccgtggagccgg

SEQ ID NO: 50908 - DNA, 20 bp, Human herpesvirus 4
gcatgccgcccagcctcgca

SEQ ID NO: 50909 - DNA, 20 bp, Human herpesvirus 4
gtgctgggggcaatcgccca

SEQ ID NO: 50910 - DNA, 20 bp, Human herpesvirus 4
gcgaggctgggcggcatgcc

SEQ ID NO: 50911 - DNA, 20 bp, Human herpesvirus 4
cgaggctgggcggcatgcca

SEQ ID NO: 50912 - DNA, 20 bp, Human herpesvirus 4
tacactgcgcgcaggacgct

SEQ ID NO: 50913 - DNA, 20 bp, Human herpesvirus 4
gcccccgatgtcggctgtcc

SEQ ID NO: 50914 - DNA, 20 bp, Human herpesvirus 4
cccccgatgtcggctgtcct

SEQ ID NO: 50915 - DNA, 20 bp, Human herpesvirus 4
tcgtccggcggcgagggcgc

SEQ ID NO: 50916 - DNA, 20 bp, Human herpesvirus 4
agggccatgtacgcggtgtt

SEQ ID NO: 50917 - DNA, 20 bp, Human herpesvirus 4
cctggggggcctttgtcagg

SEQ ID NO: 50918 - DNA, 20 bp, Human herpesvirus 4
ctggggggcctttgtcaggg

SEQ ID NO: 50919 - DNA, 20 bp, Human herpesvirus 4
gtcagggttgtctgtgtcac

SEQ ID NO: 50920 - DNA, 20 bp, Human herpesvirus 4
tcagggttgtctgtgtcacc

SEQ ID NO: 50921 - DNA, 20 bp, Human herpesvirus 4
tctgtgtcacccagcggccc

SEQ ID NO: 50922 - DNA, 20 bp, Human papillomavirus type 71
ggaaatagctggaaaactaa

SEQ ID NO: 50923 - DNA, 20 bp, Human papillomavirus type 71
gaaatagctggaaaactaag

SEQ ID NO: 50924 - DNA, 20 bp, Human papillomavirus type 71
gatattggcaattttcaggc

SEQ ID NO: 50925 - DNA, 20 bp, Human papillomavirus type 71
gcaattttcaggctttgcaa

SEQ ID NO: 50926 - DNA, 20 bp, Human papillomavirus type 71
tcaggctttgcaaacacagt

SEQ ID NO: 50927 - DNA, 20 bp, Human papillomavirus type 71
ttgacctgtattgtcacgag

SEQ ID NO: 50928 - DNA, 20 bp, Human papillomavirus type 71
acctgtattgtcacgagcaa

SEQ ID NO: 50929 - DNA, 20 bp, Human papillomavirus type 71
tcacgagcaatttgccagct

SEQ ID NO: 50930 - DNA, 20 bp, Human papillomavirus type 71
gccagctcagacgaggaaga

SEQ ID NO: 50931 - DNA, 20 bp, Human papillomavirus type 71
ccagctcagacgaggaagat

SEQ ID NO: 50932 - DNA, 20 bp, Human papillomavirus type 71
aaagacttatatgggttatc

SEQ ID NO: 50933 - DNA, 20 bp, Human papillomavirus type 71
aagacttatatgggttatca

SEQ ID NO: 50934 - DNA, 20 bp, Human papillomavirus type 71
tatgggttatcatatatgga

SEQ ID NO: 50935 - DNA, 20 bp, Human papillomavirus type 71
tcatatatggaattggtacg

SEQ ID NO: 50936 - DNA, 20 bp, Human papillomavirus type 71
gtacggcaatttaaaagtaa

SEQ ID NO: 50937 - DNA, 20 bp, Human papillomavirus type 71
agcatgttattaaatatacc

SEQ ID NO: 50938 - DNA, 20 bp, Human papillomavirus type 71
ttaaatataccagaaacaaa

SEQ ID NO: 50939 - DNA, 20 bp, Human papillomavirus type 71
aatataccagaaacaaacat

SEQ ID NO: 50940 - DNA, 20 bp, Human papillomavirus type 71
tattggtttagggcgagcat

SEQ ID NO: 50941 - DNA, 20 bp, Human papillomavirus type 71
ttatttttggtggttctatt

SEQ ID NO: 50942 - DNA, 20 bp, Human papillomavirus type 71
ttagcaagcaattgtcaagc

SEQ ID NO: 50943 - DNA, 20 bp, Human papillomavirus type 71
tagcaagcaattgtcaagcc

SEQ ID NO: 50944 - DNA, 20 bp, Human papillomavirus type 71
agcaagcaattgtcaagcca

SEQ ID NO: 50945 - DNA, 20 bp, Human papillomavirus type 71
gcaagcaattgtcaagccaa

SEQ ID NO: 50946 - DNA, 20 bp, Human papillomavirus type 71
tcaagccaaatatgtgaaag

SEQ ID NO: 50947 - DNA, 20 bp, Human papillomavirus type 71
ttgcatgagcctattacggt

SEQ ID NO: 50948 - DNA, 20 bp, Human papillomavirus type 71
tgcatgagcctattacggtt

SEQ ID NO: 50949 - DNA, 20 bp, Human papillomavirus type 71
gcatgagcctattacggttt

SEQ ID NO: 50950 - DNA, 20 bp, Human papillomavirus type 71
catgagcctattacggtttt

SEQ ID NO: 50951 - DNA, 20 bp, Human papillomavirus type 71
cggtttttgggtggggttgt

SEQ ID NO: 50952 - DNA, 20 bp, Human papillomavirus type 71
aacactggcaacacgtgcga

SEQ ID NO: 50953 - DNA, 20 bp, Human papillomavirus type 71
ttatttaaggcaagggaagc

SEQ ID NO: 50954 - DNA, 20 bp, Human papillomavirus type 71
tttaaggcaagggaagcagg

SEQ ID NO: 50955 - DNA, 20 bp, Human papillomavirus type 71
aaggcaagggaagcaggaat

SEQ ID NO: 50956 - DNA, 20 bp, Human papillomavirus type 71
aggcaagggaagcaggaatt

SEQ ID NO: 50957 - DNA, 20 bp, Human papillomavirus type 71
cgtgacacgagccaggaaat

SEQ ID NO: 50958 - DNA, 20 bp, Human papillomavirus type 71
gcaatcgtatcgcacttcta

SEQ ID NO: 50959 - DNA, 20 bp, Human papillomavirus type 71
caatcgtatcgcacttctac

SEQ ID NO: 50960 - DNA, 20 bp, Human papillomavirus type 71
tacagtgtagcctttttttt

SEQ ID NO: 50961 - DNA, 20 bp, Human papillomavirus type 71
ttttttccagcattgcttag

SEQ ID NO: 50962 - DNA, 20 bp, Human papillomavirus type 71
atgatgcattcgactcctct

SEQ ID NO: 50963 - DNA, 20 bp, Human papillomavirus type 71
tgatgcattcgactcctctg

SEQ ID NO: 50964 - DNA, 20 bp, Human papillomavirus type 71
gactcctctgtgtctagcac

SEQ ID NO: 50965 - DNA, 20 bp, Human papillomavirus type 71
aacctactgaccacggaccc

SEQ ID NO: 50966 - DNA, 20 bp, Human papillomavirus type 71
ggtggtggtggaggcctgtt

SEQ ID NO: 50967 - DNA, 20 bp, Human papillomavirus type 71
ctagccactgtacatattcc

SEQ ID NO: 50968 - DNA, 20 bp, Human papillomavirus type 71
tagccactgtacatattcct

SEQ ID NO: 50969 - DNA, 20 bp, Human papillomavirus type 71
ctaagggcatagaggcctta

SEQ ID NO: 50970 - DNA, 20 bp, Human papillomavirus type 71
ccaggatatatgtcattgtt

SEQ ID NO: 50971 - DNA, 20 bp, Human papillomavirus type 71
tttgcataatctttgtaaat

SEQ ID NO: 50972 - DNA, 20 bp, Human papillomavirus type 71
cctaactgtgacttgtgact

SEQ ID NO: 50973 - DNA, 20 bp, Human papillomavirus type 71
tgactaccacacaaccagcc

SEQ ID NO: 50974 - DNA, 20 bp, Human papillomavirus type 71
tgtacacgtagtagcagtat

SEQ ID NO: 50975 - DNA, 20 bp, Human papillomavirus type 71
gctggttgtgtggtagtcac

SEQ ID NO: 50976 - DNA, 20 bp, Human papillomavirus type 71
tgtggtagtcacaagtcaca

SEQ ID NO: 50977 - DNA, 20 bp, Human papillomavirus type 71
gatggccctgacattgattt

SEQ ID NO: 50978 - DNA, 20 bp, Human papillomavirus type 71
atggccctgacattgatttt

SEQ ID NO: 50979 - DNA, 20 bp, Human papillomavirus type 71
atttttccacctcccatgcc

SEQ ID NO: 50980 - DNA, 20 bp, Human papillomavirus type 71
ttccacctcccatgccacta

SEQ ID NO: 50981 - DNA, 20 bp, Human papillomavirus type 71
tccacctcccatgccactac

SEQ ID NO: 50982 - DNA, 20 bp, Human papillomavirus type 71
ctgttggccatccatatttt

SEQ ID NO: 50983 - DNA, 20 bp, Human papillomavirus type 71
gccatccatattttcctatt

SEQ ID NO: 50984 - DNA, 20 bp, Human papillomavirus type 71
tcctattcgccaggcaagtg

SEQ ID NO: 50985 - DNA, 20 bp, Human papillomavirus type 71
cctattcgccaggcaagtgg

SEQ ID NO: 50986 - DNA, 20 bp, Human papillomavirus type 71
ctattcgccaggcaagtggt

SEQ ID NO: 50987 - DNA, 20 bp, Human papillomavirus type 71
gtggccatccattgtttaac

SEQ ID NO: 50988 - DNA, 20 bp, Human papillomavirus type 71
tttaacaagcttaatgacac

SEQ ID NO: 50989 - DNA, 20 bp, Human papillomavirus type 71
aacaagcttaatgacactga

SEQ ID NO: 50990 - DNA, 20 bp, Human papillomavirus type 71
acaagcttaatgacactgaa

SEQ ID NO: 50991 - DNA, 20 bp, Human papillomavirus type 71
atgacactgaaaatgccacg

SEQ ID NO: 50992 - DNA, 20 bp, Human papillomavirus type 71
tgcagccctgcaaacaaata

SEQ ID NO: 50993 - DNA, 20 bp, Human papillomavirus type 71
gcagccctgcaaacaaatag

SEQ ID NO: 50994 - DNA, 20 bp, Human papillomavirus type 71
cagccctgcaaacaaatagg

SEQ ID NO: 50995 - DNA, 20 bp, Human papillomavirus type 71
ccttggatattgttactaca

SEQ ID NO: 50996 - DNA, 20 bp, Human papillomavirus type 71
gatattgttactacaacatg

SEQ ID NO: 50997 - DNA, 20 bp, Human papillomavirus type 71
cctcagagtcacagttgttt

SEQ ID NO: 50998 - DNA, 20 bp, Human papillomavirus type 71
tttaacaagccttactggct

SEQ ID NO: 50999 - DNA, 20 bp, Human papillomavirus type 71
aacaagccttactggctaca

SEQ ID NO: 51000 - DNA, 20 bp, Human papillomavirus type 71
acaagccttactggctacaa

SEQ ID NO: 51001 - DNA, 20 bp, Human papillomavirus type 71
ctggctacaacgtgcacagg

SEQ ID NO: 51002 - DNA, 20 bp, Human papillomavirus type 71
tggttccttaccacctccta

SEQ ID NO: 51003 - DNA, 20 bp, Human papillomavirus type 71
ggttccttaccacctcctac

SEQ ID NO: 51004 - DNA, 20 bp, Human papillomavirus type 71
gttccttaccacctcctact

SEQ ID NO: 51005 - DNA, 20 bp, Human papillomavirus type 71
cttaccacctcctactgcta

SEQ ID NO: 51006 - DNA, 20 bp, Human papillomavirus type 71
ccacctcctactgctagtct

SEQ ID NO: 51007 - DNA, 20 bp, Human papillomavirus type 71
tttggttgcacccctgtgag

SEQ ID NO: 51008 - DNA, 20 bp, Human papillomavirus type 71
ggttgcacccctgtgagtaa

SEQ ID NO: 51009 - DNA, 20 bp, Human papillomavirus type 71
gttgcacccctgtgagtaag

SEQ ID NO: 51010 - DNA, 20 bp, Human papillomavirus type 71
cacccctgtgagtaagtgtg

SEQ ID NO: 51011 - DNA, 20 bp, Human papillomavirus type 71
ctgaccagtgaccatgccct

SEQ ID NO: 51012 - DNA, 20 bp, Human papillomavirus type 71
gcacactataaatgcatgtt

SEQ ID NO: 51013 - DNA, 20 bp, Human papillomavirus type 71
taattaactttaatacatgt

SEQ ID NO: 51014 - DNA, 20 bp, Human papillomavirus type 71
actttaatacatgtgttact

SEQ ID NO: 51015 - DNA, 20 bp, Human papillomavirus type 71
aatacatgtgttactcaccg

SEQ ID NO: 51016 - DNA, 20 bp, Human papillomavirus type 71
atacatgtgttactcaccgt

SEQ ID NO: 51017 - DNA, 20 bp, Human papillomavirus type 112
aaacagacaacaagtaaaga

SEQ ID NO: 51018 - DNA, 20 bp, Human papillomavirus type 112
ggctaataccacttctgtca

SEQ ID NO: 51019 - DNA, 20 bp, Human papillomavirus type 112
gctaataccacttctgtcac

SEQ ID NO: 51020 - DNA, 20 bp, Human papillomavirus type 112
tgtcactggctgtttgcctt

SEQ ID NO: 51021 - DNA, 20 bp, Human papillomavirus type 112
gcctttgtaccgggagtggt

SEQ ID NO: 51022 - DNA, 20 bp, Human papillomavirus type 112
gaaataaatttggaagaatt

SEQ ID NO: 51023 - DNA, 20 bp, Human papillomavirus type 112
ggaagaattagtattaccag

SEQ ID NO: 51024 - DNA, 20 bp, Human papillomavirus type 112
gaagaattagtattaccaga

SEQ ID NO: 51025 - DNA, 20 bp, Human papillomavirus type 112
gtattaccagaaaatctttt

SEQ ID NO: 51026 - DNA, 20 bp, Human papillomavirus type 112
ccagaaaatcttttagcaga

SEQ ID NO: 51027 - DNA, 20 bp, Human papillomavirus type 112
ccttgcatttttcaacagtc

SEQ ID NO: 51028 - DNA, 20 bp, Human papillomavirus type 112
catttttcaacagtcagtta

SEQ ID NO: 51029 - DNA, 20 bp, Human papillomavirus type 112
ttcaacagtcagttagcaga

SEQ ID NO: 51030 - DNA, 20 bp, Human papillomavirus type 112
tcaacagtcagttagcagag

SEQ ID NO: 51031 - DNA, 20 bp, Human papillomavirus type 112
caacagtcagttagcagagg

SEQ ID NO: 51032 - DNA, 20 bp, Human papillomavirus type 112
tagaatttaaaacaggaaaa

SEQ ID NO: 51033 - DNA, 20 bp, Human papillomavirus type 112
aaaacaggaaaaagtagaga

SEQ ID NO: 51034 - DNA, 20 bp, Human papillomavirus type 112
aaacaggaaaaagtagagaa

SEQ ID NO: 51035 - DNA, 20 bp, Human papillomavirus type 112
ccaacatgctttgtaaactt

SEQ ID NO: 51036 - DNA, 20 bp, Human papillomavirus type 112
gtaaacttttaaatataaaa

SEQ ID NO: 51037 - DNA, 20 bp, Human papillomavirus type 112
aagactgtgcaataatggta

SEQ ID NO: 51038 - DNA, 20 bp, Human papillomavirus type 112
taaaagatatgaaatgcgcc

SEQ ID NO: 51039 - DNA, 20 bp, Human papillomavirus type 112
cttagaatatgatgacactg

SEQ ID NO: 51040 - DNA, 20 bp, Human papillomavirus type 112
gaatatgatgacactgtaga

SEQ ID NO: 51041 - DNA, 20 bp, Human papillomavirus type 112
taagcaacatttatttatcc

SEQ ID NO: 51042 - DNA, 20 bp, Human papillomavirus type 112
caagactgtagtgctgaatt

SEQ ID NO: 51043 - DNA, 20 bp, Human papillomavirus type 112
ttaaatacccaacccaaaaa

SEQ ID NO: 51044 - DNA, 20 bp, Human papillomavirus type 112
aatacccaacccaaaaactg

SEQ ID NO: 51045 - DNA, 20 bp, Human papillomavirus type 112
caaaaaagctggctattccg

SEQ ID NO: 51046 - DNA, 20 bp, Human papillomavirus type 112
aaaaaagctggctattccgt

SEQ ID NO: 51047 - DNA, 20 bp, Human papillomavirus type 112
gtcttcgagctggaggacga

SEQ ID NO: 51048 - DNA, 20 bp, Human papillomavirus type 112
gagctggaggacgaagacaa

SEQ ID NO: 51049 - DNA, 20 bp, Human papillomavirus type 112
gtgcagcagatcgctgaggg

SEQ ID NO: 51050 - DNA, 20 bp, Human papillomavirus type 112
ttcttctcgttgatacggta

SEQ ID NO: 51051 - DNA, 20 bp, Human papillomavirus type 112
ttctcgttgatacggtagag

SEQ ID NO: 51052 - DNA, 20 bp, Human papillomavirus type 112
ggtggtttgggtatagggtc

SEQ ID NO: 51053 - DNA, 20 bp, Human papillomavirus type 112
gggtatagggtcgggttctg

SEQ ID NO: 51054 - DNA, 20 bp, Human papillomavirus type 112
ggtatagggtcgggttctgg

SEQ ID NO: 51055 - DNA, 20 bp, Human papillomavirus type 112
tggggcgggtgccactggat

SEQ ID NO: 51056 - DNA, 20 bp, Human papillomavirus type 112
cgtcccataacagaaaatat

SEQ ID NO: 51057 - DNA, 20 bp, Human papillomavirus type 112
atggtcaccctactgttcta

SEQ ID NO: 51058 - DNA, 20 bp, Human papillomavirus type 112
tacatggccaagaagacata

SEQ ID NO: 51059 - DNA, 20 bp, Human papillomavirus type 112
caagtcacaccccctgaccc

SEQ ID NO: 51060 - DNA, 20 bp, Human papillomavirus type 112
ctcccagattggcatttgaa

SEQ ID NO: 51061 - DNA, 20 bp, Human papillomavirus type 112
gcatttgaaaatccacgtga

SEQ ID NO: 51062 - DNA, 20 bp, Human papillomavirus type 112
ctaccagaagtggtaatatt

SEQ ID NO: 51063 - DNA, 20 bp, Human papillomavirus type 112
taccagaagtggtaatattt

SEQ ID NO: 51064 - DNA, 20 bp, Human papillomavirus type 112
tgacacaaaaggtgcattac

SEQ ID NO: 51065 - DNA, 20 bp, Human papillomavirus type 112
gacacaaaaggtgcattacc

SEQ ID NO: 51066 - DNA, 20 bp, Human papillomavirus type 112
acacaaaaggtgcattacca

SEQ ID NO: 51067 - DNA, 20 bp, Human papillomavirus type 112
acattgatccatttggatca

SEQ ID NO: 51068 - DNA, 20 bp, Human papillomavirus type 112
cattgatccatttggatcag

SEQ ID NO: 51069 - DNA, 20 bp, Human papillomavirus type 112
atccatttggatcagacttt

SEQ ID NO: 51070 - DNA, 20 bp, Human papillomavirus type 112
ggatcagacttttatttaca

SEQ ID NO: 51071 - DNA, 20 bp, Human papillomavirus type 112
gatcagacttttatttacat

SEQ ID NO: 51072 - DNA, 20 bp, Human papillomavirus type 112
tcctgctgcagaaacagacg

SEQ ID NO: 51073 - DNA, 20 bp, Human papillomavirus type 112
atcttagtatggatcctaag

SEQ ID NO: 51074 - DNA, 20 bp, Human papillomavirus type 112
gtatggatcctaagcaggta

SEQ ID NO: 51075 - DNA, 20 bp, Human papillomavirus type 112
ttaatagttggttgtgaacc

SEQ ID NO: 51076 - DNA, 20 bp, Human papillomavirus type 112
atagttggttgtgaaccagc

SEQ ID NO: 51077 - DNA, 20 bp, Human papillomavirus type 112
aatttttggaacgtagattt

SEQ ID NO: 51078 - DNA, 20 bp, Human papillomavirus type 112
atttttggaacgtagattta

SEQ ID NO: 51079 - DNA, 20 bp, Human papillomavirus type 112
ttggaacgtagatttaacag

SEQ ID NO: 51080 - DNA, 20 bp, Human papillomavirus type 112
tggaacgtagatttaacaga

SEQ ID NO: 51081 - DNA, 20 bp, Human papillomavirus type 112
ggaacgtagatttaacagag

SEQ ID NO: 51082 - DNA, 20 bp, Human papillomavirus type 90
tgcggaacagcattaacaga

SEQ ID NO: 51083 - DNA, 20 bp, Human papillomavirus type 90
gcggaacagcattaacagag

SEQ ID NO: 51084 - DNA, 20 bp, Human papillomavirus type 90
cggaacagcattaacagagg

SEQ ID NO: 51085 - DNA, 20 bp, Human papillomavirus type 90
acagaggaggaggttgtatc

SEQ ID NO: 51086 - DNA, 20 bp, Human papillomavirus type 90
tatgcaaacgatacaacctc

SEQ ID NO: 51087 - DNA, 20 bp, Human papillomavirus type 90
tcagtgaaggcaaacggttc

SEQ ID NO: 51088 - DNA, 20 bp, Human papillomavirus type 90
cataaaatagctgggctttg

SEQ ID NO: 51089 - DNA, 20 bp, Human papillomavirus type 90
ggcgaggcgcttgcctgcag

SEQ ID NO: 51090 - DNA, 20 bp, Human papillomavirus type 90
gcgaggcgcttgcctgcagt

SEQ ID NO: 51091 - DNA, 20 bp, Human papillomavirus type 90
cctgcagtgttggaaaccat

SEQ ID NO: 51092 - DNA, 20 bp, Human papillomavirus type 90
ttgtaggtgttgctgtacag

SEQ ID NO: 51093 - DNA, 20 bp, Human papillomavirus type 90
taggtgttgctgtacagtaa

SEQ ID NO: 51094 - DNA, 20 bp, Human papillomavirus type 90
ctgtacagtaaggctggtgg

SEQ ID NO: 51095 - DNA, 20 bp, Human papillomavirus type 90
tgttgggcgcactgcatata

SEQ ID NO: 51096 - DNA, 20 bp, Human papillomavirus type 90
ggcgcactgcatatagtgtg

SEQ ID NO: 51097 - DNA, 20 bp, Human papillomavirus type 90
attttattgataatagtagg

SEQ ID NO: 51098 - DNA, 20 bp, Human papillomavirus type 90
tattgataatagtaggcatc

SEQ ID NO: 51099 - DNA, 20 bp, Human papillomavirus type 90
attgataatagtaggcatcc

SEQ ID NO: 51100 - DNA, 20 bp, Human papillomavirus type 90
ttgataatagtaggcatccc

SEQ ID NO: 51101 - DNA, 20 bp, Human papillomavirus type 90
ataatagtaggcatcccggg

SEQ ID NO: 51102 - DNA, 20 bp, Human papillomavirus type 90
acgcgacagaggaccaggta

SEQ ID NO: 51103 - DNA, 20 bp, Human papillomavirus type 90
tcgctcctcctcctccgttt

SEQ ID NO: 51104 - DNA, 20 bp, Human papillomavirus type 90
cctgtaccccccctgtgcct

SEQ ID NO: 51105 - DNA, 20 bp, Human papillomavirus type 90
ctgtaccccccctgtgcctg

SEQ ID NO: 51106 - DNA, 20 bp, Human papillomavirus type 90
cccctactacctggtcctct

SEQ ID NO: 51107 - DNA, 20 bp, Human papillomavirus type 90
ggactgggtaatatgtgcat

SEQ ID NO: 51108 - DNA, 20 bp, Human papillomavirus type 90
gactgggtaatatgtgcatt

SEQ ID NO: 51109 - DNA, 20 bp, Human papillomavirus type 90
ggcgtgtactgcacagttgc

SEQ ID NO: 51110 - DNA, 20 bp, Human papillomavirus type 90
gcgtgtactgcacagttgca

SEQ ID NO: 51111 - DNA, 20 bp, Human papillomavirus type 90
cagagggtgtcaaaaccctt

SEQ ID NO: 51112 - DNA, 20 bp, Human papillomavirus type 90
gtataaagcaggcatgggca

SEQ ID NO: 51113 - DNA, 20 bp, Human papillomavirus type 90
gagaaacaccagaatggatt

SEQ ID NO: 51114 - DNA, 20 bp, Human papillomavirus type 90
taagacaaacagttgtgggg

SEQ ID NO: 51115 - DNA, 20 bp, Human papillomavirus type 90
tagactgtgccccacaactg

SEQ ID NO: 51116 - DNA, 20 bp, Human papillomavirus type 90
gtcttacaatccattctggt

SEQ ID NO: 51117 - DNA, 20 bp, Human papillomavirus type 90
caaacgggcagagcaggcac

SEQ ID NO: 51118 - DNA, 20 bp, Human papillomavirus type 90
agaagtgcaaagatatcaga

SEQ ID NO: 51119 - DNA, 20 bp, Human papillomavirus type 90
gaagtgcaaagatatcagag

SEQ ID NO: 51120 - DNA, 20 bp, Human papillomavirus type 90
gcacttctaaatcttatcca

SEQ ID NO: 51121 - DNA, 20 bp, Human papillomavirus type 90
cacttctaaatcttatccat

SEQ ID NO: 51122 - DNA, 20 bp, Human papillomavirus type 90
cgcttcctaggaggggttgt

SEQ ID NO: 51123 - DNA, 20 bp, Human papillomavirus type 90
ctaggaggggttgtgatttc

SEQ ID NO: 51124 - DNA, 20 bp, Human papillomavirus type 90
tgatttcctatgccaactcc

SEQ ID NO: 51125 - DNA, 20 bp, Human papillomavirus type 90
cctatgccaactccaccagc

SEQ ID NO: 51126 - DNA, 20 bp, Human papillomavirus type 90
ctatgccaactccaccagcc

SEQ ID NO: 51127 - DNA, 20 bp, Human papillomavirus type 90
ttacgtagtagactgcagct

SEQ ID NO: 51128 - DNA, 20 bp, Human papillomavirus type 90
tacgtagtagactgcagctg

SEQ ID NO: 51129 - DNA, 20 bp, Human papillomavirus type 90
acgtagtagactgcagctgt

SEQ ID NO: 51130 - DNA, 20 bp, Human papillomavirus type 90
cgtagtagactgcagctgtt

SEQ ID NO: 51131 - DNA, 20 bp, Human papillomavirus type 90
acctttcctaatgcatttcc

SEQ ID NO: 51132 - DNA, 20 bp, Human papillomavirus type 90
gtgtgtaaagtatagtcctg

SEQ ID NO: 51133 - DNA, 20 bp, Human papillomavirus type 90
gtccatgtatcatcatcacc

SEQ ID NO: 51134 - DNA, 20 bp, Human papillomavirus type 90
gtacatatatatacctccag

SEQ ID NO: 51135 - DNA, 20 bp, Human papillomavirus type 90
tacatatatatacctccagc

SEQ ID NO: 51136 - DNA, 20 bp, Human papillomavirus type 90
ggccccgcgtcgccacacgt

SEQ ID NO: 51137 - DNA, 20 bp, Human papillomavirus type 90
tcacgtgccagccgctggat

SEQ ID NO: 51138 - DNA, 20 bp, Human papillomavirus type 90
tgtggagtcgggatgctgat

SEQ ID NO: 51139 - DNA, 20 bp, Human papillomavirus type 90
tgcggcggcggcacgtgtgg

SEQ ID NO: 51140 - DNA, 20 bp, Human papillomavirus type 90
agcaaagtaacctccacctg

SEQ ID NO: 51141 - DNA, 20 bp, Human papillomavirus type 90
gcaaagtaacctccacctgg

SEQ ID NO: 51142 - DNA, 20 bp, Human papillomavirus type 90
caaaggctgatttttcattg

SEQ ID NO: 51143 - DNA, 20 bp, Human papillomavirus type 90
ttcattggtggtgttactgc

SEQ ID NO: 51144 - DNA, 20 bp, Human papillomavirus type 90
tcattggtggtgttactgca

SEQ ID NO: 51145 - DNA, 20 bp, Human papillomavirus type 90
ctacttgtctgcctggacac

SEQ ID NO: 51146 - DNA, 20 bp, Human papillomavirus type 90
tctgcctggacacaactgct

SEQ ID NO: 51147 - DNA, 20 bp, Human papillomavirus type 90
ttttggctgtctatccttcc

SEQ ID NO: 51148 - DNA, 20 bp, Human papillomavirus type 90
tggctgtctatccttcctgg

SEQ ID NO: 51149 - DNA, 20 bp, Human papillomavirus type 90
ggctgtctatccttcctggc

SEQ ID NO: 51150 - DNA, 20 bp, Human papillomavirus type 90
tagtacgtgatagagatggg

SEQ ID NO: 51151 - DNA, 20 bp, Human papillomavirus type 90
ccccccatctctatcacgta

SEQ ID NO: 51152 - DNA, 20 bp, Human papillomavirus type 90
gaacagggtccggcactggt

SEQ ID NO: 51153 - DNA, 20 bp, Human papillomavirus type 90
ggacccgaccccccactgtt

SEQ ID NO: 51154 - DNA, 20 bp, Human papillomavirus type 90
tggatgttggccctcctgcc

SEQ ID NO: 51155 - DNA, 20 bp, Human papillomavirus type 90
ttatcacagcctgaaacact

SEQ ID NO: 51156 - DNA, 20 bp, Human papillomavirus type 90
tatcacagcctgaaacactt

SEQ ID NO: 51157 - DNA, 20 bp, Human papillomavirus type 90
atcacagcctgaaacacttg

SEQ ID NO: 51158 - DNA, 20 bp, Human papillomavirus type 90
tcacagcctgaaacacttgt

SEQ ID NO: 51159 - DNA, 20 bp, Human papillomavirus type 90
ttacctatgacaatcctgta

SEQ ID NO: 51160 - DNA, 20 bp, Human papillomavirus type 90
gccatccttattttgctatc

SEQ ID NO: 51161 - DNA, 20 bp, Human papillomavirus type 90
ttttgctatcaaaaagcaat

SEQ ID NO: 51162 - DNA, 20 bp, Human papillomavirus type 90
tgctatcaaaaagcaatcag

SEQ ID NO: 51163 - DNA, 20 bp, Human papillomavirus type 90
gctatcaaaaagcaatcagg

SEQ ID NO: 51164 - DNA, 20 bp, Human papillomavirus type 90
ctatcaaaaagcaatcagga

SEQ ID NO: 51165 - DNA, 20 bp, Human papillomavirus type 90
atatgatgttgtgcctggcg

SEQ ID NO: 51166 - DNA, 20 bp, Human papillomavirus type 90
tatgatgttgtgcctggcga

SEQ ID NO: 51167 - DNA, 20 bp, Human papillomavirus type 90
tgcctggcgatgacacccgg

SEQ ID NO: 51168 - DNA, 20 bp, Human papillomavirus type 90
ctatggactataagcaaacc

SEQ ID NO: 51169 - DNA, 20 bp, Human papillomavirus type 90
attatagggtgcaaacctcc

SEQ ID NO: 51170 - DNA, 20 bp, Human papillomavirus type 90
tttgcagatggcagctgagc

SEQ ID NO: 51171 - DNA, 20 bp, Human papillomavirus type 90
ttgcagatggcagctgagcc

SEQ ID NO: 51172 - DNA, 20 bp, Human papillomavirus type 90
tgcagatggcagctgagcca

SEQ ID NO: 51173 - DNA, 20 bp, Human papillomavirus type 90
gcagatggcagctgagccat

SEQ ID NO: 51174 - DNA, 20 bp, Human papillomavirus type 90
cagatggcagctgagccata

SEQ ID NO: 51175 - DNA, 20 bp, Human papillomavirus type 90
ttgtaactgtggttgatact

SEQ ID NO: 51176 - DNA, 20 bp, Human papillomavirus type 90
tgtaactgtggttgatacta

SEQ ID NO: 51177 - DNA, 20 bp, Human papillomavirus type 90
gtaactgtggttgatactac

SEQ ID NO: 51178 - DNA, 20 bp, Human papillomavirus type 90
taactgtggttgatactaca

SEQ ID NO: 51179 - DNA, 20 bp, Human papillomavirus type 90
atactacacgtagcaccaat

SEQ ID NO: 51180 - DNA, 20 bp, Human papillomavirus type 90
tgtgtgtgtctgttgtatgc

SEQ ID NO: 51181 - DNA, 20 bp, Human papillomavirus type 90
tatgctgatgtttactgtgt

SEQ ID NO: 51182 - DNA, 20 bp, Human papillomavirus type 90
actgtgtctgtacacgggtt

SEQ ID NO: 51183 - DNA, 20 bp, Human papillomavirus type 90
ctgtgtctgtacacgggttc

SEQ ID NO: 51184 - DNA, 20 bp, Human papillomavirus type 90
cttgtactgttgtgtatgta

SEQ ID NO: 51185 - DNA, 20 bp, Human papillomavirus type 90
aatacccccggaccgatttc

SEQ ID NO: 51186 - DNA, 20 bp, Human papillomavirus type 90
atacccccggaccgatttcg

SEQ ID NO: 51187 - DNA, 20 bp, Human papillomavirus type 90
cggtcgctcccggtttcggt

SEQ ID NO: 51188 - DNA, 20 bp, Human papillomavirus type 90
ggtcgctcccggtttcggtc

SEQ ID NO: 51189 - DNA, 20 bp, Human papillomavirus type 90
cggtcgtgcacaacatggcg

SEQ ID NO: 51190 - DNA, 20 bp, Hepatitis C virus
acgcagaaagcgtctagcca

SEQ ID NO: 51191 - DNA, 20 bp, Hepatitis C virus
gtatgagtgtcgtacagcct

SEQ ID NO: 51192 - DNA, 20 bp, Hepatitis C virus
ctgcgtgaagacagtagttc

SEQ ID NO: 51193 - DNA, 20 bp, Hepatitis C virus
tgcgtgaagacagtagttcc

SEQ ID NO: 51194 - DNA, 20 bp, Hepatitis C virus
agtttccgggcggcggccag

SEQ ID NO: 51195 - DNA, 20 bp, Hepatitis C virus
ccgggcggcggccagatcgt

SEQ ID NO: 51196 - DNA, 20 bp, Hepatitis C virus
cgggcggcggccagatcgtt

SEQ ID NO: 51197 - DNA, 20 bp, Hepatitis C virus
gcggagtatacttgttgccg

SEQ ID NO: 51198 - DNA, 20 bp, Hepatitis C virus
ttgccgcgcaggggccccag

SEQ ID NO: 51199 - DNA, 20 bp, Hepatitis C virus
gccgacctcatggggtacat

SEQ ID NO: 51200 - DNA, 20 bp, Hepatitis C virus
ccgacctcatggggtacatc

SEQ ID NO: 51201 - DNA, 20 bp, Hepatitis C virus
accccgtcctccaggactct

SEQ ID NO: 51202 - DNA, 20 bp, Hepatitis C virus
gggtatcgatgaccttaccc

SEQ ID NO: 51203 - DNA, 20 bp, Hepatitis C virus
ggtgagaccggtatccagca

SEQ ID NO: 51204 - DNA, 20 bp, Hepatitis C virus
cccactttctcgcacgggac

SEQ ID NO: 51205 - DNA, 20 bp, Hepatitis C virus
ctcgcacgggacgcacccgg

SEQ ID NO: 51206 - DNA, 20 bp, Hepatitis C virus
tcgcacgggacgcacccggg

SEQ ID NO: 51207 - DNA, 20 bp, Hepatitis C virus
gcgtacgcgatgcgtgtccc

SEQ ID NO: 51208 - DNA, 20 bp, Hepatitis C virus
tagacatcattagcggggct

SEQ ID NO: 51209 - DNA, 20 bp, Hepatitis C virus
gcggggctcattggggcgtc

SEQ ID NO: 51210 - DNA, 20 bp, Hepatitis C virus
gggcgtcatgttcggcttgg

SEQ ID NO: 51211 - DNA, 20 bp, Hepatitis C virus
ggcttggcctacttctctat

SEQ ID NO: 51212 - DNA, 20 bp, Hepatitis C virus
atcgcgtctctgttctacac

SEQ ID NO: 51213 - DNA, 20 bp, Hepatitis C virus
tcgcgtctctgttctacacc

SEQ ID NO: 51214 - DNA, 20 bp, Hepatitis C virus
tacacccacagcttcaactc

SEQ ID NO: 51215 - DNA, 20 bp, Hepatitis C virus
aactcgtcaggatgtcccga

SEQ ID NO: 51216 - DNA, 20 bp, Hepatitis C virus
cgggtgggatggggcgcctt

SEQ ID NO: 51217 - DNA, 20 bp, Hepatitis C virus
tggctacaccaagacttgcg

SEQ ID NO: 51218 - DNA, 20 bp, Hepatitis C virus
cggcgcaccaccctgccgta

SEQ ID NO: 51219 - DNA, 20 bp, Hepatitis C virus
aacgccagcacggacctgtt

SEQ ID NO: 51220 - DNA, 20 bp, Hepatitis C virus
tgccccacggactgttttag

SEQ ID NO: 51221 - DNA, 20 bp, Hepatitis C virus
taggaagcatcctgatacca

SEQ ID NO: 51222 - DNA, 20 bp, Hepatitis C virus
caacttggaggacagagaca

SEQ ID NO: 51223 - DNA, 20 bp, Hepatitis C virus
gaggacagagacagaagtca

SEQ ID NO: 51224 - DNA, 20 bp, Hepatitis C virus
gttgcactccaccacggaat

SEQ ID NO: 51225 - DNA, 20 bp, Hepatitis C virus
ttgcactccaccacggaatg

SEQ ID NO: 51226 - DNA, 20 bp, Hepatitis C virus
cactccaccacggaatgggc

SEQ ID NO: 51227 - DNA, 20 bp, Hepatitis C virus
ctatattttgtcatcttttt

SEQ ID NO: 51228 - DNA, 20 bp, Hepatitis C virus
tgtcatctttttcgtggctg

SEQ ID NO: 51229 - DNA, 20 bp, Hepatitis C virus
gtcatctttttcgtggctgc

SEQ ID NO: 51230 - DNA, 20 bp, Hepatitis C virus
tcatctttttcgtggctgct

SEQ ID NO: 51231 - DNA, 20 bp, Hepatitis C virus
ttcgtggctgcttggtacat

SEQ ID NO: 51232 - DNA, 20 bp, Hepatitis C virus
gacataaccaagtggctctt

SEQ ID NO: 51233 - DNA, 20 bp, Hepatitis C virus
acataaccaagtggctcttg

SEQ ID NO: 51234 - DNA, 20 bp, Hepatitis C virus
gcggtgcttgggcctgctta

SEQ ID NO: 51235 - DNA, 20 bp, Hepatitis C virus
ggcctgcttacctcctaaaa

SEQ ID NO: 51236 - DNA, 20 bp, Hepatitis C virus
cctcctaaaaggtgctttga

SEQ ID NO: 51237 - DNA, 20 bp, Hepatitis C virus
tacacggacttcccgtgtcc

SEQ ID NO: 51238 - DNA, 20 bp, Hepatitis C virus
acacggacttcccgtgtccg

SEQ ID NO: 51239 - DNA, 20 bp, Hepatitis C virus
cacggacttcccgtgtccgc

SEQ ID NO: 51240 - DNA, 20 bp, Hepatitis C virus
ccgtgtccgcccgacttggt

SEQ ID NO: 51241 - DNA, 20 bp, Hepatitis C virus
gtcgggaggtcctccttggc

SEQ ID NO: 51242 - DNA, 20 bp, Hepatitis C virus
gtagggtggcccagcccccc

SEQ ID NO: 51243 - DNA, 20 bp, Hepatitis C virus
agtcccaggggggctgggcc

SEQ ID NO: 51244 - DNA, 20 bp, Hepatitis C virus
gtcccaggggggctgggcca

SEQ ID NO: 51245 - DNA, 20 bp, Hepatitis C virus
ttgccagctccatggtagac

SEQ ID NO: 51246 - DNA, 20 bp, Hepatitis C virus
ccagctccatggtagacagt

SEQ ID NO: 51247 - DNA, 20 bp, Hepatitis C virus
agtgacaacagcacaccacc

SEQ ID NO: 51248 - DNA, 20 bp, Hepatitis C virus
gtgacaacagcacaccacct

SEQ ID NO: 51249 - DNA, 20 bp, Hepatitis C virus
catgccccgactggcagtgg

SEQ ID NO: 51250 - DNA, 20 bp, Hepatitis C virus
ggtgctctttccactgccag

SEQ ID NO: 51251 - DNA, 20 bp, Hepatitis C virus
gtgctctttccactgccagt

SEQ ID NO: 51252 - DNA, 20 bp, Hepatitis C virus
gcatcggaacagtccttgat

SEQ ID NO: 51253 - DNA, 20 bp, Hepatitis C virus
atcaagcagagacagctggg

SEQ ID NO: 51254 - DNA, 20 bp, Hepatitis C virus
atcaaggactgttccgatgc

SEQ ID NO: 51255 - DNA, 20 bp, Hepatitis C virus
cgatgccaaggatggtggta

SEQ ID NO: 51256 - DNA, 20 bp, Hepatitis C virus
atcacatatgatgatgtcgt

SEQ ID NO: 51257 - DNA, 20 bp, Hepatitis C virus
gacgtctccgtaataccaac

SEQ ID NO: 51258 - DNA, 20 bp, Hepatitis C virus
gtattacggagacgtccaac

SEQ ID NO: 51259 - DNA, 20 bp, Hepatitis C virus
cggagacgtccaaccctctg

SEQ ID NO: 51260 - DNA, 20 bp, Hepatitis C virus
caacacgcccggtttgcctg

SEQ ID NO: 51261 - DNA, 20 bp, Hepatitis C virus
aacacgcccggtttgcctgt

SEQ ID NO: 51262 - DNA, 20 bp, Hepatitis C virus
gcctgtgtgccaagaccatc

SEQ ID NO: 51263 - DNA, 20 bp, Hepatitis C virus
cctgtgtgccaagaccatct

SEQ ID NO: 51264 - DNA, 20 bp, Hepatitis C virus
gcacacaggcaaaccgggcg

SEQ ID NO: 51265 - DNA, 20 bp, Hepatitis C virus
ggctctgttaccaacgaggt

SEQ ID NO: 51266 - DNA, 20 bp, Hepatitis C virus
ccaacgaggtcaccctcaca

SEQ ID NO: 51267 - DNA, 20 bp, Hepatitis C virus
catgcaggtggcgatgtatt

SEQ ID NO: 51268 - DNA, 20 bp, Hepatitis C virus
cgtcacgggatgtgtgaggg

SEQ ID NO: 51269 - DNA, 20 bp, Hepatitis C virus
gtcacgggatgtgtgagggt

SEQ ID NO: 51270 - DNA, 20 bp, Hepatitis C virus
ttgcagcaagcttccaaaca

SEQ ID NO: 51271 - DNA, 20 bp, Hepatitis C virus
cagcaagcttccaaacaagc

SEQ ID NO: 51272 - DNA, 20 bp, Hepatitis C virus
caaacaagctcaagacatac

SEQ ID NO: 51273 - DNA, 20 bp, Hepatitis C virus
atggcccaaggtagaacaat

SEQ ID NO: 51274 - DNA, 20 bp, Hepatitis C virus
tgggccaaacacatgtggaa

SEQ ID NO: 51275 - DNA, 20 bp, Hepatitis C virus
cgggggctctcgtcgcattc

SEQ ID NO: 51276 - DNA, 20 bp, Hepatitis C virus
gggggctctcgtcgcattca

SEQ ID NO: 51277 - DNA, 20 bp, Hepatitis C virus
aagatcatgtctggcgagaa

SEQ ID NO: 51278 - DNA, 20 bp, Hepatitis C virus
ctgcctggaattctgtctcc

SEQ ID NO: 51279 - DNA, 20 bp, Hepatitis C virus
tgtctccgggtgccttggta

SEQ ID NO: 51280 - DNA, 20 bp, Hepatitis C virus
cctatcaattgttacacgga

SEQ ID NO: 51281 - DNA, 20 bp, Hepatitis C virus
ctatcaattgttacacggag

SEQ ID NO: 51282 - DNA, 20 bp, Hepatitis C virus
ttacacggagggccagtgcg

SEQ ID NO: 51283 - DNA, 20 bp, Hepatitis C virus
cacggagggccagtgcgtgc

SEQ ID NO: 51284 - DNA, 20 bp, Hepatitis C virus
aaggtcgccatctggagggt

SEQ ID NO: 51285 - DNA, 20 bp, Hepatitis C virus
atgtccatgctaacagatcc

SEQ ID NO: 51286 - DNA, 20 bp, Hepatitis C virus
agcgcgggggtcacccccat

SEQ ID NO: 51287 - DNA, 20 bp, Hepatitis C virus
gcgcgggggtcacccccatc

SEQ ID NO: 51288 - DNA, 20 bp, Hepatitis C virus
cctcggatgggggtgacccc

SEQ ID NO: 51289 - DNA, 20 bp, Hepatitis C virus
gcatggacatcaatacgtct

SEQ ID NO: 51290 - DNA, 20 bp, Hepatitis C virus
ccaccagctttaccggcctg

SEQ ID NO: 51291 - DNA, 20 bp, Hepatitis C virus
accggcctgggcacggcctg

SEQ ID NO: 51292 - DNA, 20 bp, Hepatitis C virus
ccggcctgggcacggcctga

SEQ ID NO: 51293 - DNA, 20 bp, Hepatitis C virus
caacccaccgcttgtggaat

SEQ ID NO: 51294 - DNA, 20 bp, Hepatitis C virus
tccacgattccacaagcggt

SEQ ID NO: 51295 - DNA, 20 bp, Hepatitis C virus
cggagacaggttccatctct

SEQ ID NO: 51296 - DNA, 20 bp, Hepatitis C virus
ggagacaggttccatctctt

SEQ ID NO: 51297 - DNA, 20 bp, Hepatitis C virus
catctcttccatgccccccc

SEQ ID NO: 51298 - DNA, 20 bp, Hepatitis C virus
catgccccccctcgaggggg

SEQ ID NO: 51299 - DNA, 20 bp, Hepatitis C virus
gagatccagacctggagcct

SEQ ID NO: 51300 - DNA, 20 bp, Hepatitis C virus
aaggacattaagctagcggc

SEQ ID NO: 51301 - DNA, 20 bp, Hepatitis C virus
agctagcggcctccaaggtc

SEQ ID NO: 51302 - DNA, 20 bp, Hepatitis C virus
actggcaagcctcctccatg

SEQ ID NO: 51303 - DNA, 20 bp, Hepatitis C virus
cggtgaccttggaggccgct

SEQ ID NO: 51304 - DNA, 20 bp, Hepatitis C virus
gaggccgctagcttaatgtc

SEQ ID NO: 51305 - DNA, 20 bp, Hepatitis C virus
atgacattacacaaaaactt

SEQ ID NO: 51306 - DNA, 20 bp, Hepatitis C virus
tgacattacacaaaaacttc

SEQ ID NO: 51307 - DNA, 20 bp, Hepatitis C virus
cacaaaaacttcctcaggcg

SEQ ID NO: 51308 - DNA, 20 bp, Hepatitis C virus
ctcaggcggtgatgggggct

SEQ ID NO: 51309 - DNA, 20 bp, Hepatitis C virus
ttatggattccagtattccc

SEQ ID NO: 51310 - DNA, 20 bp, Hepatitis C virus
gcggcttgtaaagctgcagg

SEQ ID NO: 51311 - DNA, 20 bp, Hepatitis C virus
taaagctgcagggataatcg

SEQ ID NO: 51312 - DNA, 20 bp, Hepatitis C virus
tgggcgcgattatccctgca

SEQ ID NO: 51313 - DNA, 20 bp, Hepatitis C virus
tccctgcagctttacaagcc

SEQ ID NO: 51314 - DNA, 20 bp, Hepatitis C virus
acaagccgctaaggctttca

SEQ ID NO: 51315 - DNA, 20 bp, Hepatitis C virus
gacactcccctgtcaattca

SEQ ID NO: 51316 - DNA, 20 bp, Hepatitis C virus
acaggggagtgtctaactgt

SEQ ID NO: 51317 - DNA, 20 bp, Hepatitis C virus
cccaggcagcccgggcgatt

SEQ ID NO: 51318 - DNA, 20 bp, Hepatitis C virus
ccaggcagcccgggcgattg

SEQ ID NO: 51319 - DNA, 20 bp, Hepatitis C virus
gagtggtagggtctctggtc

SEQ ID NO: 51320 - DNA, 20 bp, Hepatitis C virus
agccctcagaaaacttgggg

SEQ ID NO: 51321 - DNA, 20 bp, Hepatitis C virus
gggcgccacccctcagagcg

SEQ ID NO: 51322 - DNA, 20 bp, Hepatitis C virus
cacgctctgaggggtggcgc

SEQ ID NO: 51323 - DNA, 20 bp, Hepatitis C virus
tctgagggctgaagccaccc

SEQ ID NO: 51324 - DNA, 20 bp, Hepatitis C virus
ctgagggctgaagccacccg

SEQ ID NO: 51325 - DNA, 20 bp, Neisseria gonorrhoeae
cgccttgtggcgaccgacgg

SEQ ID NO: 51326 - DNA, 20 bp, Neisseria gonorrhoeae
tggcgaccgacggacaccgc

SEQ ID NO: 51327 - DNA, 20 bp, Neisseria gonorrhoeae
cctatgcagcctgcgcgatt

SEQ ID NO: 51328 - DNA, 20 bp, Neisseria gonorrhoeae
atgcggatttgccgcgcgcc

SEQ ID NO: 51329 - DNA, 20 bp, Neisseria gonorrhoeae
gccgcgcgccgaagtgattt

SEQ ID NO: 51330 - DNA, 20 bp, Neisseria gonorrhoeae
gtggtagttgcccgtgccga

SEQ ID NO: 51331 - DNA, 20 bp, Neisseria gonorrhoeae
cccgtgccgaggtgggcgta

SEQ ID NO: 51332 - DNA, 20 bp, Neisseria gonorrhoeae
agcacgccgtcttcgcggcg

SEQ ID NO: 51333 - DNA, 20 bp, Neisseria gonorrhoeae
gcggcggatgaccagtgcca

SEQ ID NO: 51334 - DNA, 20 bp, Neisseria gonorrhoeae
cgcccacctcggcacgggca

SEQ ID NO: 51335 - DNA, 20 bp, Neisseria gonorrhoeae
gacgttcatgcccgggaaga

SEQ ID NO: 51336 - DNA, 20 bp, Neisseria gonorrhoeae
acgttcatgcccgggaagag

SEQ ID NO: 51337 - DNA, 20 bp, Neisseria gonorrhoeae
atgcccgggaagagtttgcc

SEQ ID NO: 51338 - DNA, 20 bp, Neisseria gonorrhoeae
gccgacgtgggcgtggagga

SEQ ID NO: 51339 - DNA, 20 bp, Neisseria gonorrhoeae
ccgacgtgggcgtggaggat

SEQ ID NO: 51340 - DNA, 20 bp, Neisseria gonorrhoeae
ggtcataaggttctcccaaa

SEQ ID NO: 51341 - DNA, 20 bp, Neisseria gonorrhoeae
tcccaaagatggttgttgtt

SEQ ID NO: 51342 - DNA, 20 bp, Neisseria gonorrhoeae
ttgttcggtcggagcgggcg

SEQ ID NO: 51343 - DNA, 20 bp, Neisseria gonorrhoeae
ttcggtcggagcgggcggac

SEQ ID NO: 51344 - DNA, 20 bp, Neisseria gonorrhoeae
ggtcggagcgggcggacaat

SEQ ID NO: 51345 - DNA, 20 bp, Neisseria gonorrhoeae
aaaccgatgacttcgccgcc

SEQ ID NO: 51346 - DNA, 20 bp, Neisseria gonorrhoeae
gccgccgtaaccgggcttgt

SEQ ID NO: 51347 - DNA, 20 bp, Neisseria gonorrhoeae
tcggtactgttcagcgtcag

SEQ ID NO: 51348 - DNA, 20 bp, Neisseria gonorrhoeae
agcgtcagtccgaacgtccc

SEQ ID NO: 51349 - DNA, 20 bp, Neisseria gonorrhoeae
ggtgtggcagtgccgatgag

SEQ ID NO: 51350 - DNA, 20 bp, Neisseria gonorrhoeae
gatgccgttgccgccaagct

SEQ ID NO: 51351 - DNA, 20 bp, Neisseria gonorrhoeae
atgccgttgccgccaagctg

SEQ ID NO: 51352 - DNA, 20 bp, Neisseria gonorrhoeae
ccgccaagctgcaaagccaa

SEQ ID NO: 51353 - DNA, 20 bp, Neisseria gonorrhoeae
gcgcgaaatgccccagtcgc

SEQ ID NO: 51354 - DNA, 20 bp, Neisseria gonorrhoeae
ggttttcggttcgcccgcac

SEQ ID NO: 51355 - DNA, 20 bp, Neisseria gonorrhoeae
gatgccgccgatgtattggt

SEQ ID NO: 51356 - DNA, 20 bp, Neisseria gonorrhoeae
gtcgaccgcgccccagtatt

SEQ ID NO: 51357 - DNA, 20 bp, Neisseria gonorrhoeae
cgcggattctgccgatacca

SEQ ID NO: 51358 - DNA, 20 bp, Neisseria gonorrhoeae
gcggattctgccgataccat

SEQ ID NO: 51359 - DNA, 20 bp, Neisseria gonorrhoeae
tgccgataccatgccgtctg

SEQ ID NO: 51360 - DNA, 20 bp, Neisseria gonorrhoeae
aagtcaacggcaaactgcgc

SEQ ID NO: 51361 - DNA, 20 bp, Neisseria gonorrhoeae
gaggtcggctttggaggcgt

SEQ ID NO: 51362 - DNA, 20 bp, Neisseria gonorrhoeae
ggaggcgtcggcggcgacgg

SEQ ID NO: 51363 - DNA, 20 bp, Neisseria gonorrhoeae
gaggcgtcggcggcgacggt

SEQ ID NO: 51364 - DNA, 20 bp, Neisseria gonorrhoeae
tgccgcgcagtttgccgttg

SEQ ID NO: 51365 - DNA, 20 bp, Neisseria gonorrhoeae
ttgacgatggtcagcagctt

SEQ ID NO: 51366 - DNA, 20 bp, Neisseria gonorrhoeae
tgacgatggtcagcagcttc

SEQ ID NO: 51367 - DNA, 20 bp, Neisseria gonorrhoeae
gacgatggtcagcagcttca

SEQ ID NO: 51368 - DNA, 20 bp, Neisseria gonorrhoeae
acgatggtcagcagcttcaa

SEQ ID NO: 51369 - DNA, 20 bp, Neisseria gonorrhoeae
aacgccgcgccgctcggctt

SEQ ID NO: 51370 - DNA, 20 bp, Neisseria gonorrhoeae
gctttggctgtagcctgcct

SEQ ID NO: 51371 - DNA, 20 bp, Neisseria gonorrhoeae
ctttggctgtagcctgcctg

SEQ ID NO: 51372 - DNA, 20 bp, Neisseria gonorrhoeae
ggctgtagcctgcctgtatc

SEQ ID NO: 51373 - DNA, 20 bp, Neisseria gonorrhoeae
gctgtagcctgcctgtatct

SEQ ID NO: 51374 - DNA, 20 bp, Neisseria gonorrhoeae
gggcgtgatgcggccgccga

SEQ ID NO: 51375 - DNA, 20 bp, Neisseria gonorrhoeae
ccggtcaatgacatgctggc

SEQ ID NO: 51376 - DNA, 20 bp, Neisseria gonorrhoeae
ccatcgaccacagcactgcc

SEQ ID NO: 51377 - DNA, 20 bp, Neisseria gonorrhoeae
catcgaccacagcactgccg

SEQ ID NO: 51378 - DNA, 20 bp, Neisseria gonorrhoeae
ccggttattggcacgccgat

SEQ ID NO: 51379 - DNA, 20 bp, Neisseria gonorrhoeae
ttggcacgccgatccgcgca

SEQ ID NO: 51380 - DNA, 20 bp, Neisseria gonorrhoeae
cgcgcagggtcatgggcagc

SEQ ID NO: 51381 - DNA, 20 bp, Neisseria gonorrhoeae
gcgcagggtcatgggcagcc

SEQ ID NO: 51382 - DNA, 20 bp, Neisseria gonorrhoeae
caacgacggctacaccgttt

SEQ ID NO: 51383 - DNA, 20 bp, Neisseria gonorrhoeae
ccggcacgcacaccccgttc

SEQ ID NO: 51384 - DNA, 20 bp, Neisseria gonorrhoeae
cggcacgcacaccccgttcg

SEQ ID NO: 51385 - DNA, 20 bp, Neisseria gonorrhoeae
aactgttccgccgcctgtat

SEQ ID NO: 51386 - DNA, 20 bp, Neisseria gonorrhoeae
cgccgcctgtatcaactgcc

SEQ ID NO: 51387 - DNA, 20 bp, Neisseria gonorrhoeae
gcggcaggcatgacgatgat

SEQ ID NO: 51388 - DNA, 20 bp, Neisseria gonorrhoeae
tcgcgggcggcgcgcggcag

SEQ ID NO: 51389 - DNA, 20 bp, Neisseria gonorrhoeae
atacaggcggcggaacagtt

SEQ ID NO: 51390 - DNA, 20 bp, Neisseria gonorrhoeae
cctgtaaccgacagcaccag

SEQ ID NO: 51391 - DNA, 20 bp, Neisseria gonorrhoeae
gcctttggcggcttcgcgct

SEQ ID NO: 51392 - DNA, 20 bp, Neisseria gonorrhoeae
cctttggcggcttcgcgctt

SEQ ID NO: 51393 - DNA, 20 bp, Neisseria gonorrhoeae
ggcggcttcgcgcttttggg

SEQ ID NO: 51394 - DNA, 20 bp, Neisseria gonorrhoeae
gcggcttcgcgcttttgggc

SEQ ID NO: 51395 - DNA, 20 bp, Neisseria gonorrhoeae
ttcgtcatggtatcggggca

SEQ ID NO: 51396 - DNA, 20 bp, Neisseria gonorrhoeae
gtcatggtatcggggcagaa

SEQ ID NO: 51397 - DNA, 20 bp, Neisseria gonorrhoeae
caaatgggcggcagggaata

SEQ ID NO: 51398 - DNA, 20 bp, Neisseria gonorrhoeae
cgccggcagacgggcggtat

SEQ ID NO: 51399 - DNA, 20 bp, Neisseria gonorrhoeae
gccggcagacgggcggtatt

SEQ ID NO: 51400 - DNA, 20 bp, Neisseria gonorrhoeae
gcggttcgcgcacgaaggcg

SEQ ID NO: 51401 - DNA, 20 bp, Neisseria gonorrhoeae
cggttcgcgcacgaaggcgg

SEQ ID NO: 51402 - DNA, 20 bp, Neisseria gonorrhoeae
gcgcacgaaggcggcggcgg

SEQ ID NO: 51403 - DNA, 20 bp, Neisseria gonorrhoeae
ctgccgccctgcaagccgat

SEQ ID NO: 51404 - DNA, 20 bp, Neisseria gonorrhoeae
gggcgaactcatgccgcgtt

SEQ ID NO: 51405 - DNA, 20 bp, Neisseria gonorrhoeae
gtcggtcatttccaacgcgc

SEQ ID NO: 51406 - DNA, 20 bp, Neisseria gonorrhoeae
ccaacgcgccggagggcagg

SEQ ID NO: 51407 - DNA, 20 bp, Neisseria gonorrhoeae
caacgcgccggagggcaggt

SEQ ID NO: 51408 - DNA, 20 bp, Neisseria gonorrhoeae
ctgccatttgctgtcggcaa

SEQ ID NO: 51409 - DNA, 20 bp, Neisseria gonorrhoeae
gctgtcggcaaaccgccacg

SEQ ID NO: 51410 - DNA, 20 bp, Neisseria gonorrhoeae
atcgggcgcaaacaaaagct

SEQ ID NO: 51411 - DNA, 20 bp, Neisseria gonorrhoeae
gccccgattcagtttcaccg

SEQ ID NO: 51412 - DNA, 20 bp, Neisseria gonorrhoeae
agtttcaccgccaccaacgc

SEQ ID NO: 51413 - DNA, 20 bp, Neisseria gonorrhoeae
caccgccaccaacgcgccac

SEQ ID NO: 51414 - DNA, 20 bp, Neisseria gonorrhoeae
accgccaccaacgcgccact

SEQ ID NO: 51415 - DNA, 20 bp, Neisseria gonorrhoeae
caccagccacacttcgcgcg

SEQ ID NO: 51416 - DNA, 20 bp, Neisseria gonorrhoeae
gcgcggatagcccgattcgg

SEQ ID NO: 51417 - DNA, 20 bp, Neisseria gonorrhoeae
ggtcaactggcgttcgtccc

SEQ ID NO: 51418 - DNA, 20 bp, Neisseria gonorrhoeae
gtcccaagccggacacaccc

SEQ ID NO: 51419 - DNA, 20 bp, Neisseria gonorrhoeae
ggacgaacgccagttgaccg

SEQ ID NO: 51420 - DNA, 20 bp, Neisseria gonorrhoeae
cgtccgttgctgcggtagtc

SEQ ID NO: 51421 - DNA, 20 bp, Neisseria gonorrhoeae
gtccgttgctgcggtagtct

SEQ ID NO: 51422 - DNA, 20 bp, Neisseria gonorrhoeae
ctgcggtagtctttgcgccg

SEQ ID NO: 51423 - DNA, 20 bp, Neisseria gonorrhoeae
gcgccgcgtttcgggcaact

SEQ ID NO: 51424 - DNA, 20 bp, Neisseria gonorrhoeae
cgccgcgtttcgggcaactc

SEQ ID NO: 51425 - DNA, 20 bp, Neisseria gonorrhoeae
cgcggcggcgaggcggtcga

SEQ ID NO: 51426 - DNA, 20 bp, Neisseria gonorrhoeae
ctcgaccgcctcgccgccgc

SEQ ID NO: 51427 - DNA, 20 bp, Neisseria gonorrhoeae
gaggatgttgtcgagcagga

SEQ ID NO: 51428 - DNA, 20 bp, Neisseria gonorrhoeae
aggatgttgtcgagcaggat

SEQ ID NO: 51429 - DNA, 20 bp, Neisseria gonorrhoeae
tcgagcaggatgcccgcttt

SEQ ID NO: 51430 - DNA, 20 bp, Neisseria gonorrhoeae
gccgtggaacagttgcccgt

SEQ ID NO: 51431 - DNA, 20 bp, Neisseria gonorrhoeae
ccgtggaacagttgcccgta

SEQ ID NO: 51432 - DNA, 20 bp, Neisseria gonorrhoeae
cagccacatcggacccaagc

SEQ ID NO: 51433 - DNA, 20 bp, Neisseria gonorrhoeae
agccacatcggacccaagcc

SEQ ID NO: 51434 - DNA, 20 bp, Neisseria gonorrhoeae
acatattttctccattaaga

SEQ ID NO: 51435 - DNA, 20 bp, Neisseria gonorrhoeae
atggagaaaatatgttaagc

SEQ ID NO: 51436 - DNA, 20 bp, Neisseria gonorrhoeae
agcgcgcgctacctccacct

SEQ ID NO: 51437 - DNA, 20 bp, Neisseria gonorrhoeae
cgcctgttctttggcagtca

SEQ ID NO: 51438 - DNA, 20 bp, Neisseria gonorrhoeae
tttggcagtcagggcgattt

SEQ ID NO: 51439 - DNA, 20 bp, Neisseria gonorrhoeae
ggcagtcagggcgattttgt

SEQ ID NO: 51440 - DNA, 20 bp, Neisseria gonorrhoeae
gcagtcagggcgattttgtt

SEQ ID NO: 51441 - DNA, 20 bp, Neisseria gonorrhoeae
tgttgcggacgtagagcagt

SEQ ID NO: 51442 - DNA, 20 bp, Neisseria gonorrhoeae
ataatcgctcaaacggcggc

SEQ ID NO: 51443 - DNA, 20 bp, Neisseria gonorrhoeae
gacacgctgaaccgccgccg

SEQ ID NO: 51444 - DNA, 20 bp, Neisseria gonorrhoeae
gagcgattatcaagtcggta

SEQ ID NO: 51445 - DNA, 20 bp, Neisseria gonorrhoeae
agcgattatcaagtcggtag

SEQ ID NO: 51446 - DNA, 20 bp, Neisseria gonorrhoeae
tcaagtcggtagggcggcag

SEQ ID NO: 51447 - DNA, 20 bp, Neisseria gonorrhoeae
ctcttcgccgccgtagcgcg

SEQ ID NO: 51448 - DNA, 20 bp, Neisseria gonorrhoeae
tcttcgccgccgtagcgcgt

SEQ ID NO: 51449 - DNA, 20 bp, Neisseria gonorrhoeae
gccgccgtagcgcgtgtcgc

SEQ ID NO: 51450 - DNA, 20 bp, Neisseria gonorrhoeae
tgggcgacacgcgctacggc

SEQ ID NO: 51451 - DNA, 20 bp, Neisseria gonorrhoeae
gggcgacacgcgctacggcg

SEQ ID NO: 51452 - DNA, 20 bp, Neisseria gonorrhoeae
accggcaggaacggcacgcg

SEQ ID NO: 51453 - DNA, 20 bp, Neisseria gonorrhoeae
ccggcaggaacggcacgcgc

SEQ ID NO: 51454 - DNA, 20 bp, Neisseria gonorrhoeae
cgccgcccacgattcgaggc

SEQ ID NO: 51455 - DNA, 20 bp, Neisseria gonorrhoeae
gaggcgtttttggatttggc

SEQ ID NO: 51456 - DNA, 20 bp, Neisseria gonorrhoeae
ttggatttggcgttggctca

SEQ ID NO: 51457 - DNA, 20 bp, Neisseria gonorrhoeae
gtcgttcggcgcgcccaccg

SEQ ID NO: 51458 - DNA, 20 bp, Neisseria gonorrhoeae
tcgttcggcgcgcccaccga

SEQ ID NO: 51459 - DNA, 20 bp, Neisseria gonorrhoeae
ggcgcgcccaccgaaggcga

SEQ ID NO: 51460 - DNA, 20 bp, Neisseria gonorrhoeae
ccgaacaaattgccgaaatt

SEQ ID NO: 51461 - DNA, 20 bp, Neisseria gonorrhoeae
ccgaaattatgccgtctgtc

SEQ ID NO: 51462 - DNA, 20 bp, Neisseria gonorrhoeae
gttttgcgtgccggcgcagg

SEQ ID NO: 51463 - DNA, 20 bp, Neisseria gonorrhoeae
tgcgtgccggcgcaggcatc

SEQ ID NO: 51464 - DNA, 20 bp, Neisseria gonorrhoeae
gcgtgccggcgcaggcatct

SEQ ID NO: 51465 - DNA, 20 bp, Neisseria gonorrhoeae
cgtgccggcgcaggcatctt

SEQ ID NO: 51466 - DNA, 20 bp, Neisseria gonorrhoeae
gatggcggcggagagtgcac

SEQ ID NO: 51467 - DNA, 20 bp, Neisseria gonorrhoeae
ggcggagactttgtcgccca

SEQ ID NO: 51468 - DNA, 20 bp, Neisseria gonorrhoeae
gcggagactttgtcgcccat

SEQ ID NO: 51469 - DNA, 20 bp, Neisseria gonorrhoeae
gtcgcccatcaggcggatgg

SEQ ID NO: 51470 - DNA, 20 bp, Neisseria gonorrhoeae
tcgcccatcaggcggatggt

SEQ ID NO: 51471 - DNA, 20 bp, Neisseria gonorrhoeae
cgggccgatgaaggtaaagc

SEQ ID NO: 51472 - DNA, 20 bp, Neisseria gonorrhoeae
agataactttgcgcagaagc

SEQ ID NO: 51473 - DNA, 20 bp, Neisseria gonorrhoeae
gcgcagaagcggcaggaccg

SEQ ID NO: 51474 - DNA, 20 bp, Neisseria gonorrhoeae
cgcagaagcggcaggaccga

SEQ ID NO: 51475 - DNA, 20 bp, Neisseria gonorrhoeae
gtcggcgagtttgacgtgca

SEQ ID NO: 51476 - DNA, 20 bp, Neisseria gonorrhoeae
gacgtgcaggctgcctttgt

SEQ ID NO: 51477 - DNA, 20 bp, Neisseria gonorrhoeae
ggcgagcggcacgccggtgg

SEQ ID NO: 51478 - DNA, 20 bp, Neisseria gonorrhoeae
gcgagcggcacgccggtggc

SEQ ID NO: 51479 - DNA, 20 bp, Neisseria gonorrhoeae
ggagacaaaggggacggtac

SEQ ID NO: 51480 - DNA, 20 bp, Neisseria gonorrhoeae
gagacaaaggggacggtacg

SEQ ID NO: 51481 - DNA, 20 bp, Neisseria gonorrhoeae
gtctccaaagccaccggcgt

SEQ ID NO: 51482 - DNA, 20 bp, Neisseria gonorrhoeae
tcggtgcggacgatttccaa

SEQ ID NO: 51483 - DNA, 20 bp, Neisseria gonorrhoeae
cggtgcggacgatttccaac

SEQ ID NO: 51484 - DNA, 20 bp, Neisseria gonorrhoeae
ggtgcggacgatttccaaca

SEQ ID NO: 51485 - DNA, 20 bp, Neisseria gonorrhoeae
ccaacacgtcttccaatgtc

SEQ ID NO: 51486 - DNA, 20 bp, Neisseria gonorrhoeae
caacacgtcttccaatgtca

SEQ ID NO: 51487 - DNA, 20 bp, Neisseria gonorrhoeae
cgcgcctttttcgcgcaaca

SEQ ID NO: 51488 - DNA, 20 bp, Neisseria gonorrhoeae
ttcgcgcaacagcatggtca

SEQ ID NO: 51489 - DNA, 20 bp, Neisseria gonorrhoeae
tcgcgcaacagcatggtcag

SEQ ID NO: 51490 - DNA, 20 bp, Neisseria gonorrhoeae
cgcgcaacagcatggtcagg

SEQ ID NO: 51491 - DNA, 20 bp, Neisseria gonorrhoeae
gcgcaacagcatggtcaggc

SEQ ID NO: 51492 - DNA, 20 bp, Neisseria gonorrhoeae
cgggcatcagggtttcttgt

SEQ ID NO: 51493 - DNA, 20 bp, Neisseria gonorrhoeae
gggcatcagggtttcttgta

SEQ ID NO: 51494 - DNA, 20 bp, Neisseria gonorrhoeae
cttgtacggcatcggcgagg

SEQ ID NO: 51495 - DNA, 20 bp, Neisseria gonorrhoeae
ttgtacggcatcggcgaggg

SEQ ID NO: 51496 - DNA, 20 bp, Neisseria gonorrhoeae
tacggcatcggcgagggcgg

SEQ ID NO: 51497 - DNA, 20 bp, Neisseria gonorrhoeae
gtcgacgggcgcgacttgcg

SEQ ID NO: 51498 - DNA, 20 bp, Neisseria gonorrhoeae
tcgacgggcgcgacttgcgg

SEQ ID NO: 51499 - DNA, 20 bp, Neisseria gonorrhoeae
cggggcgttgcccagttgca

SEQ ID NO: 51500 - DNA, 20 bp, Neisseria gonorrhoeae
cccagttgcagggctttgaa

SEQ ID NO: 51501 - DNA, 20 bp, Neisseria gonorrhoeae
cagggctttgaagtaggcga

SEQ ID NO: 51502 - DNA, 20 bp, Neisseria gonorrhoeae
ctttatgccttccgcgctcg

SEQ ID NO: 51503 - DNA, 20 bp, Neisseria gonorrhoeae
atgccttccgcgctcgataa

SEQ ID NO: 51504 - DNA, 20 bp, Neisseria gonorrhoeae
tgccttccgcgctcgataaa

SEQ ID NO: 51505 - DNA, 20 bp, Neisseria gonorrhoeae
cgcgctcgataaatattacc

SEQ ID NO: 51506 - DNA, 20 bp, Neisseria gonorrhoeae
cctgccccacctgcgcgcct

SEQ ID NO: 51507 - DNA, 20 bp, Neisseria gonorrhoeae
tggcgatgcgctggggcagc

SEQ ID NO: 51508 - DNA, 20 bp, Neisseria gonorrhoeae
ggcgatgcgctggggcagcc

SEQ ID NO: 51509 - DNA, 20 bp, Neisseria gonorrhoeae
gcgatgcgctggggcagcca

SEQ ID NO: 51510 - DNA, 20 bp, Neisseria gonorrhoeae
cctacgatgccggttttttc

SEQ ID NO: 51511 - DNA, 20 bp, Neisseria gonorrhoeae
ttggaaaaaaccggcatcgt

SEQ ID NO: 51512 - DNA, 20 bp, Neisseria gonorrhoeae
cactggtgggcggcgcgacc

SEQ ID NO: 51513 - DNA, 20 bp, Neisseria gonorrhoeae
aaagccgccgaacgcagctt

SEQ ID NO: 51514 - DNA, 20 bp, Neisseria gonorrhoeae
aattccgccgaaaccgttgc

SEQ ID NO: 51515 - DNA, 20 bp, Neisseria gonorrhoeae
cggcggaattcaagctgcgt

SEQ ID NO: 51516 - DNA, 20 bp, Neisseria gonorrhoeae
ggcggaattcaagctgcgtt

SEQ ID NO: 51517 - DNA, 20 bp, Neisseria gonorrhoeae
gccgagttgaacaaacgcca

SEQ ID NO: 51518 - DNA, 20 bp, Neisseria gonorrhoeae
aacaaacgccacggcgcggt

SEQ ID NO: 51519 - DNA, 20 bp, Neisseria gonorrhoeae
tggaaatcggcggttccgac

SEQ ID NO: 51520 - DNA, 20 bp, Neisseria gonorrhoeae
ggaaatcggcggttccgacc

SEQ ID NO: 51521 - DNA, 20 bp, Neisseria gonorrhoeae
gaaatcggcggttccgacca

SEQ ID NO: 51522 - DNA, 20 bp, Neisseria gonorrhoeae
ttcgcactccgtaccggcaa

SEQ ID NO: 51523 - DNA, 20 bp, Neisseria gonorrhoeae
tcgcactccgtaccggcaaa

SEQ ID NO: 51524 - DNA, 20 bp, Neisseria gonorrhoeae
cgcactccgtaccggcaaaa

SEQ ID NO: 51525 - DNA, 20 bp, Neisseria gonorrhoeae
gcactccgtaccggcaaaac

SEQ ID NO: 51526 - DNA, 20 bp, Neisseria gonorrhoeae
ctggaagggacgggttgcgt

SEQ ID NO: 51527 - DNA, 20 bp, Neisseria gonorrhoeae
accgagcgacaggtcagtgg

SEQ ID NO: 51528 - DNA, 20 bp, Neisseria gonorrhoeae
ccgagcgacaggtcagtggt

SEQ ID NO: 51529 - DNA, 20 bp, Neisseria gonorrhoeae
gtcggcatggacaaagccgg

SEQ ID NO: 51530 - DNA, 20 bp, Neisseria gonorrhoeae
tcggcatggacaaagccggc

SEQ ID NO: 51531 - DNA, 20 bp, Neisseria gonorrhoeae
taccgtcgctgccggctttg

SEQ ID NO: 51532 - DNA, 20 bp, Neisseria gonorrhoeae
gcgcgccgacaaaaccgtcg

SEQ ID NO: 51533 - DNA, 20 bp, Neisseria gonorrhoeae
cgcgccgacaaaaccgtcgg

SEQ ID NO: 51534 - DNA, 20 bp, Neisseria gonorrhoeae
tgtcggcgcgcaaaggctcg

SEQ ID NO: 51535 - DNA, 20 bp, Neisseria gonorrhoeae
gtcggcgcgcaaaggctcga

SEQ ID NO: 51536 - DNA, 20 bp, Neisseria gonorrhoeae
tcggcgcgcaaaggctcgat

SEQ ID NO: 51537 - DNA, 20 bp, Neisseria gonorrhoeae
caaacgcagggaagaacgcg

SEQ ID NO: 51538 - DNA, 20 bp, Neisseria gonorrhoeae
gttcggcctgccctgccatg

SEQ ID NO: 51539 - DNA, 20 bp, Neisseria gonorrhoeae
ttcggcctgccctgccatgt

SEQ ID NO: 51540 - DNA, 20 bp, Neisseria gonorrhoeae
ggcctgccctgccatgtcgc

SEQ ID NO: 51541 - DNA, 20 bp, Neisseria gonorrhoeae
ttccctgcgtttgcaaccgc

SEQ ID NO: 51542 - DNA, 20 bp, Neisseria gonorrhoeae
tccagcgtttgtccgccgac

SEQ ID NO: 51543 - DNA, 20 bp, Neisseria gonorrhoeae
ccagcgtttgtccgccgacc

SEQ ID NO: 51544 - DNA, 20 bp, Neisseria gonorrhoeae
cagcgtttgtccgccgacca

SEQ ID NO: 51545 - DNA, 20 bp, Neisseria gonorrhoeae
gtccgccgaccatgatttca

SEQ ID NO: 51546 - DNA, 20 bp, Neisseria gonorrhoeae
tccgccgaccatgatttcag

SEQ ID NO: 51547 - DNA, 20 bp, Neisseria gonorrhoeae
gtcggcgttgtccatggcaa

SEQ ID NO: 51548 - DNA, 20 bp, Neisseria gonorrhoeae
tccatggcaaggtcgatgtt

SEQ ID NO: 51549 - DNA, 20 bp, Neisseria gonorrhoeae
gccaagagcatggcgcggtt

SEQ ID NO: 51550 - DNA, 20 bp, Neisseria gonorrhoeae
ggttcgatgctgtcgaacgc

SEQ ID NO: 51551 - DNA, 20 bp, Neisseria gonorrhoeae
gatgctgtcgaacgcgccgc

SEQ ID NO: 51552 - DNA, 20 bp, Neisseria gonorrhoeae
cacgtcgcccttgtcgtaca

SEQ ID NO: 51553 - DNA, 20 bp, Neisseria gonorrhoeae
tcgtacatggatacgggcga

SEQ ID NO: 51554 - DNA, 20 bp, Neisseria gonorrhoeae
gtccgcctgatacacggggc

SEQ ID NO: 51555 - DNA, 20 bp, Neisseria gonorrhoeae
cgccgggcaagatttccgat

SEQ ID NO: 51556 - DNA, 20 bp, Neisseria gonorrhoeae
ccgattacagccccgtgtat

SEQ ID NO: 51557 - DNA, 20 bp, Neisseria gonorrhoeae
tggacgaacccgtccgcccc

SEQ ID NO: 51558 - DNA, 20 bp, Neisseria gonorrhoeae
ggacgaacccgtccgccccg

SEQ ID NO: 51559 - DNA, 20 bp, Neisseria gonorrhoeae
gacgaacccgtccgccccga

SEQ ID NO: 51560 - DNA, 20 bp, Neisseria gonorrhoeae
agacgatttactgggcggac

SEQ ID NO: 51561 - DNA, 20 bp, Neisseria gonorrhoeae
actgggcggacaaggcacgc

SEQ ID NO: 51562 - DNA, 20 bp, Neisseria gonorrhoeae
cgtaggcgttgtcgataatc

SEQ ID NO: 51563 - DNA, 20 bp, Neisseria gonorrhoeae
tcgataatcggcggaatgcc

SEQ ID NO: 51564 - DNA, 20 bp, Neisseria gonorrhoeae
acgcgccaaagcgtccaaac

SEQ ID NO: 51565 - DNA, 20 bp, Neisseria gonorrhoeae
cgccgtcggtcaacacgttg

SEQ ID NO: 51566 - DNA, 20 bp, Neisseria gonorrhoeae
gccgtcggtcaacacgttgc

SEQ ID NO: 51567 - DNA, 20 bp, Neisseria gonorrhoeae
gtgccacggcagcatggtct

SEQ ID NO: 51568 - DNA, 20 bp, Neisseria gonorrhoeae
gacggcgtttttcagccgct

SEQ ID NO: 51569 - DNA, 20 bp, Neisseria gonorrhoeae
ttcagccgctctttgggccg

SEQ ID NO: 51570 - DNA, 20 bp, Neisseria gonorrhoeae
tcagccgctctttgggccgc

SEQ ID NO: 51571 - DNA, 20 bp, Neisseria gonorrhoeae
cagccgctctttgggccgcc

SEQ ID NO: 51572 - DNA, 20 bp, Neisseria gonorrhoeae
agccgctctttgggccgcca

SEQ ID NO: 51573 - DNA, 20 bp, Neisseria gonorrhoeae
tcgggtgaagctcggccatg

SEQ ID NO: 51574 - DNA, 20 bp, Neisseria gonorrhoeae
agcatggtgtttggtccgtc

SEQ ID NO: 51575 - DNA, 20 bp, Neisseria gonorrhoeae
ggtccgtcgggttcggacgg

SEQ ID NO: 51576 - DNA, 20 bp, Neisseria gonorrhoeae
gtccgtcgggttcggacggc

SEQ ID NO: 51577 - DNA, 20 bp, Neisseria gonorrhoeae
ggacggcatttccgacccta

SEQ ID NO: 51578 - DNA, 20 bp, Neisseria gonorrhoeae
gagcggctgccacaggcggc

SEQ ID NO: 51579 - DNA, 20 bp, Neisseria gonorrhoeae
agcggctgccacaggcggca

SEQ ID NO: 51580 - DNA, 20 bp, Neisseria gonorrhoeae
ctgtcttgaaaacaaaaaac

SEQ ID NO: 51581 - DNA, 20 bp, Neisseria gonorrhoeae
tgtcttgaaaacaaaaaaca

SEQ ID NO: 51582 - DNA, 20 bp, Neisseria gonorrhoeae
aaaacaaaaaacaaccagaa

SEQ ID NO: 51583 - DNA, 20 bp, Neisseria gonorrhoeae
cggacgacgttcaaaccgat

SEQ ID NO: 51584 - DNA, 20 bp, Neisseria gonorrhoeae
aaaccgatgccgctgatttc

SEQ ID NO: 51585 - DNA, 20 bp, Neisseria gonorrhoeae
cggtcagcgtgtaaaacagc

SEQ ID NO: 51586 - DNA, 20 bp, Neisseria gonorrhoeae
ggtcagcgtgtaaaacagcg

SEQ ID NO: 51587 - DNA, 20 bp, Neisseria gonorrhoeae
accgtcgtatcgtgcatgtt

SEQ ID NO: 51588 - DNA, 20 bp, Neisseria gonorrhoeae
gccggaaagtgcagcagccc

SEQ ID NO: 51589 - DNA, 20 bp, Neisseria gonorrhoeae
tgctgctgttgccgctgacg

SEQ ID NO: 51590 - DNA, 20 bp, Neisseria gonorrhoeae
ccgctgacggtcgggctgct

SEQ ID NO: 51591 - DNA, 20 bp, Neisseria gonorrhoeae
ccggcgaacacctccgtcct

SEQ ID NO: 51592 - DNA, 20 bp, Neisseria gonorrhoeae
cggcgaacacctccgtcctg

SEQ ID NO: 51593 - DNA, 20 bp, Neisseria gonorrhoeae
tgcctcgggctggatcaggc

SEQ ID NO: 51594 - DNA, 20 bp, Neisseria gonorrhoeae
tctgccaacaccgtgccgat

SEQ ID NO: 51595 - DNA, 20 bp, Neisseria gonorrhoeae
cggcacgcaaaacctgtacg

SEQ ID NO: 51596 - DNA, 20 bp, Neisseria gonorrhoeae
ggcacgcaaaacctgtacgt

SEQ ID NO: 51597 - DNA, 20 bp, Neisseria gonorrhoeae
ccggcgaggaagcgcgtgcc

SEQ ID NO: 51598 - DNA, 20 bp, Neisseria gonorrhoeae
tgcgtgccgaaagctgcgcg

SEQ ID NO: 51599 - DNA, 20 bp, Neisseria gonorrhoeae
tcgggcggcggcggtcaggt

SEQ ID NO: 51600 - DNA, 20 bp, Neisseria gonorrhoeae
cgggcggcggcggtcaggtc

SEQ ID NO: 51601 - DNA, 20 bp, Neisseria gonorrhoeae
gggcggcggcggtcaggtcg

SEQ ID NO: 51602 - DNA, 20 bp, Neisseria gonorrhoeae
cggaggcgttgtgcattgaa

SEQ ID NO: 51603 - DNA, 20 bp, Neisseria gonorrhoeae
tgcattgaagggcgaacgtt

SEQ ID NO: 51604 - DNA, 20 bp, Neisseria gonorrhoeae
tccgatttaatctggtaggc

SEQ ID NO: 51605 - DNA, 20 bp, Neisseria gonorrhoeae
ccgatttaatctggtaggcg

SEQ ID NO: 51606 - DNA, 20 bp, Neisseria gonorrhoeae
cgatttaatctggtaggcgc

SEQ ID NO: 51607 - DNA, 20 bp, Neisseria gonorrhoeae
aatctggtaggcgcgcacga

SEQ ID NO: 51608 - DNA, 20 bp, Neisseria gonorrhoeae
atctggtaggcgcgcacgag

SEQ ID NO: 51609 - DNA, 20 bp, Neisseria gonorrhoeae
ccgcttcgacggcgtgtccg

SEQ ID NO: 51610 - DNA, 20 bp, Neisseria gonorrhoeae
cgcttcgacggcgtgtccga

SEQ ID NO: 51611 - DNA, 20 bp, Neisseria gonorrhoeae
gacggcgtgtccgaaggtgt

SEQ ID NO: 51612 - DNA, 20 bp, Neisseria gonorrhoeae
ggacacgccgtcgaagcgga

SEQ ID NO: 51613 - DNA, 20 bp, Neisseria gonorrhoeae
cggcgtatggctgcacggcg

SEQ ID NO: 51614 - DNA, 20 bp, Neisseria gonorrhoeae
gcctatatttcgggcgcggt

SEQ ID NO: 51615 - DNA, 20 bp, Neisseria gonorrhoeae
cgggcgcggttttggcaagc

SEQ ID NO: 51616 - DNA, 20 bp, Neisseria gonorrhoeae
gggcgcggttttggcaagcg

SEQ ID NO: 51617 - DNA, 20 bp, Neisseria gonorrhoeae
tggcaagcgtgaaaaatgtg

SEQ ID NO: 51618 - DNA, 20 bp, Neisseria gonorrhoeae
ggcaagcgtgaaaaatgtgc

SEQ ID NO: 51619 - DNA, 20 bp, Neisseria gonorrhoeae
gacaaaacggcgaaactgct

SEQ ID NO: 51620 - DNA, 20 bp, Neisseria gonorrhoeae
gccgtatccgggcggtgcga

SEQ ID NO: 51621 - DNA, 20 bp, Neisseria gonorrhoeae
ccgtatccgggcggtgcgaa

SEQ ID NO: 51622 - DNA, 20 bp, Neisseria gonorrhoeae
cgcaagttccgacagtttcg

SEQ ID NO: 51623 - DNA, 20 bp, Neisseria gonorrhoeae
cgacagtttcgcaccgcccg

SEQ ID NO: 51624 - DNA, 20 bp, Neisseria gonorrhoeae
tgtctatcgctttgattttc

SEQ ID NO: 51625 - DNA, 20 bp, Neisseria gonorrhoeae
gtctatcgctttgattttcg

SEQ ID NO: 51626 - DNA, 20 bp, Neisseria gonorrhoeae
tctatcgctttgattttcgg

SEQ ID NO: 51627 - DNA, 20 bp, Neisseria gonorrhoeae
gattttcggcggcttgtaca

SEQ ID NO: 51628 - DNA, 20 bp, Neisseria gonorrhoeae
attttcggcggcttgtacat

SEQ ID NO: 51629 - DNA, 20 bp, Neisseria gonorrhoeae
gggggcgtcataaacggcga

SEQ ID NO: 51630 - DNA, 20 bp, Neisseria gonorrhoeae
ggggcgtcataaacggcgaa

SEQ ID NO: 51631 - DNA, 20 bp, Neisseria gonorrhoeae
aaaatggtcgggactgccga

SEQ ID NO: 51632 - DNA, 20 bp, Neisseria gonorrhoeae
tgaagccgacagcggttcgc

SEQ ID NO: 51633 - DNA, 20 bp, Neisseria gonorrhoeae
gaagccgacagcggttcgcc

SEQ ID NO: 51634 - DNA, 20 bp, Neisseria gonorrhoeae
gcaggaagggcagggttcgc

SEQ ID NO: 51635 - DNA, 20 bp, Neisseria gonorrhoeae
gcagaggacttggtttaagt

SEQ ID NO: 51636 - DNA, 20 bp, Neisseria gonorrhoeae
gtttaagttttcgcgcgagc

SEQ ID NO: 51637 - DNA, 20 bp, Neisseria gonorrhoeae
aagttttcgcgcgagcgttt

SEQ ID NO: 51638 - DNA, 20 bp, Neisseria gonorrhoeae
agttttcgcgcgagcgtttg

SEQ ID NO: 51639 - DNA, 20 bp, Neisseria gonorrhoeae
tcggcgttggtgcggatgat

SEQ ID NO: 51640 - DNA, 20 bp, Neisseria gonorrhoeae
cggcgttggtgcggatgatg

SEQ ID NO: 51641 - DNA, 20 bp, Neisseria gonorrhoeae
ggcgttggtgcggatgatgt

SEQ ID NO: 51642 - DNA, 20 bp, Neisseria gonorrhoeae
gtgcggatgatgtagccccg

SEQ ID NO: 51643 - DNA, 20 bp, Neisseria gonorrhoeae
tccggcaggagcttgtcgag

SEQ ID NO: 51644 - DNA, 20 bp, Neisseria gonorrhoeae
gccgaaatgcagcggctttc

SEQ ID NO: 51645 - DNA, 20 bp, Neisseria gonorrhoeae
ccgaaatgcagcggctttcg

SEQ ID NO: 51646 - DNA, 20 bp, Neisseria gonorrhoeae
cgggacagcgcagcgtgccg

SEQ ID NO: 51647 - DNA, 20 bp, Neisseria gonorrhoeae
gggacagcgcagcgtgccgc

SEQ ID NO: 51648 - DNA, 20 bp, Neisseria gonorrhoeae
tcatcggcgaaacgcacgtc

SEQ ID NO: 51649 - DNA, 20 bp, Neisseria gonorrhoeae
ccgaaagcctgcgccttttg

SEQ ID NO: 51650 - DNA, 20 bp, Neisseria gonorrhoeae
tgcattcgccgccgccgagt

SEQ ID NO: 51651 - DNA, 20 bp, Neisseria gonorrhoeae
gcattcgccgccgccgagtt

SEQ ID NO: 51652 - DNA, 20 bp, Neisseria gonorrhoeae
cattcgccgccgccgagttt

SEQ ID NO: 51653 - DNA, 20 bp, Neisseria gonorrhoeae
gccgccgccgagtttcacta

SEQ ID NO: 51654 - DNA, 20 bp, Neisseria gonorrhoeae
gccgcaggccgtctgaacgt

SEQ ID NO: 51655 - DNA, 20 bp, Neisseria gonorrhoeae
ccgcaggccgtctgaacgtc

SEQ ID NO: 51656 - DNA, 20 bp, Neisseria gonorrhoeae
gttgccaccaccgtcatcga

SEQ ID NO: 51657 - DNA, 20 bp, Neisseria gonorrhoeae
ccaccaccgtcatcgaagtc

SEQ ID NO: 51658 - DNA, 20 bp, Neisseria gonorrhoeae
gatcaccatcagggcggcgt

SEQ ID NO: 51659 - DNA, 20 bp, Neisseria gonorrhoeae
caccttttggaacaagcgcg

SEQ ID NO: 51660 - DNA, 20 bp, Neisseria gonorrhoeae
tggaacaagcgcgcgaaacc

SEQ ID NO: 51661 - DNA, 20 bp, Neisseria gonorrhoeae
ggaacaagcgcgcgaaaccg

SEQ ID NO: 51662 - DNA, 20 bp, Neisseria gonorrhoeae
gaacaagcgcgcgaaaccgc

SEQ ID NO: 51663 - DNA, 20 bp, Neisseria gonorrhoeae
aacaaaaccctgaaatcgtc

SEQ ID NO: 51664 - DNA, 20 bp, Neisseria gonorrhoeae
gcgccgcgcacgctgcgggt

SEQ ID NO: 51665 - DNA, 20 bp, Neisseria gonorrhoeae
cgccgcgcacgctgcgggtt

SEQ ID NO: 51666 - DNA, 20 bp, Neisseria gonorrhoeae
cgggtgtcgaaccggcgggc

SEQ ID NO: 51667 - DNA, 20 bp, Neisseria gonorrhoeae
gggtgtcgaaccggcgggca

SEQ ID NO: 51668 - DNA, 20 bp, Neisseria gonorrhoeae
atggacatcctgcccgccgg

SEQ ID NO: 51669 - DNA, 20 bp, Neisseria gonorrhoeae
ggcgatgccgtcctgaagcc

SEQ ID NO: 51670 - DNA, 20 bp, Neisseria gonorrhoeae
cgggcaggtggcggtgtccg

SEQ ID NO: 51671 - DNA, 20 bp, Neisseria gonorrhoeae
gggcaggtggcggtgtccgg

SEQ ID NO: 51672 - DNA, 20 bp, Neisseria gonorrhoeae
aggacggcatcgccgaagga

SEQ ID NO: 51673 - DNA, 20 bp, Neisseria gonorrhoeae
gtgttcacgccgcacctcgc

SEQ ID NO: 51674 - DNA, 20 bp, Neisseria gonorrhoeae
ccaggtcggaatgtcccgta

SEQ ID NO: 51675 - DNA, 20 bp, Neisseria gonorrhoeae
tggaacagggcgtgcgcgtc

SEQ ID NO: 51676 - DNA, 20 bp, Neisseria gonorrhoeae
ggaacagggcgtgcgcgtca

SEQ ID NO: 51677 - DNA, 20 bp, Neisseria gonorrhoeae
gaacagggcgtgcgcgtcat

SEQ ID NO: 51678 - DNA, 20 bp, Neisseria gonorrhoeae
ccgccgacttccgcatacgg

SEQ ID NO: 51679 - DNA, 20 bp, Neisseria gonorrhoeae
ggaaggcgaggccgtacacg

SEQ ID NO: 51680 - DNA, 20 bp, Neisseria gonorrhoeae
gaaggcgaggccgtacacgc

SEQ ID NO: 51681 - DNA, 20 bp, Neisseria gonorrhoeae
gaaagtaatcggcaactgcg

SEQ ID NO: 51682 - DNA, 20 bp, Neisseria gonorrhoeae
ccgcttcgctgcggctggtt

SEQ ID NO: 51683 - DNA, 20 bp, Neisseria gonorrhoeae
gctgcggctggttacggcgg

SEQ ID NO: 51684 - DNA, 20 bp, Neisseria gonorrhoeae
tcatctcgaacagttcgcga

SEQ ID NO: 51685 - DNA, 20 bp, Neisseria gonorrhoeae
catctcgaacagttcgcgaa

SEQ ID NO: 51686 - DNA, 20 bp, Neisseria gonorrhoeae
atctcgaacagttcgcgaat

SEQ ID NO: 51687 - DNA, 20 bp, Neisseria gonorrhoeae
gcgaatcccaacgctactcc

SEQ ID NO: 51688 - DNA, 20 bp, Neisseria gonorrhoeae
cagacgacgtcaggttgaga

SEQ ID NO: 51689 - DNA, 20 bp, Neisseria gonorrhoeae
ggagcacaggggcagagtct

SEQ ID NO: 51690 - DNA, 20 bp, Neisseria gonorrhoeae
agggtcgtttgccggagcat

SEQ ID NO: 51691 - DNA, 20 bp, Neisseria gonorrhoeae
gggtcgtttgccggagcatt

SEQ ID NO: 51692 - DNA, 20 bp, Neisseria gonorrhoeae
gccggagcattcacgggaat

SEQ ID NO: 51693 - DNA, 20 bp, Neisseria gonorrhoeae
ccggagcattcacgggaatg

SEQ ID NO: 51694 - DNA, 20 bp, Neisseria gonorrhoeae
cgaggcaggggaagaaaagc

SEQ ID NO: 51695 - DNA, 20 bp, Neisseria gonorrhoeae
gaggcaggggaagaaaagca

SEQ ID NO: 51696 - DNA, 20 bp, Neisseria gonorrhoeae
cgcgggatttctgggctggg

SEQ ID NO: 51697 - DNA, 20 bp, Neisseria gonorrhoeae
ctgggctggggcggacattg

SEQ ID NO: 51698 - DNA, 20 bp, Neisseria gonorrhoeae
tgggctggggcggacattgt

SEQ ID NO: 51699 - DNA, 20 bp, Neisseria gonorrhoeae
gtgtccacttgcggataaac

SEQ ID NO: 51700 - DNA, 20 bp, Neisseria gonorrhoeae
tgtccacttgcggataaacg

SEQ ID NO: 51701 - DNA, 20 bp, Neisseria gonorrhoeae
cggataaacgacgtgggcgg

SEQ ID NO: 51702 - DNA, 20 bp, Neisseria gonorrhoeae
gcggctcatagtgcggaagg

SEQ ID NO: 51703 - DNA, 20 bp, Neisseria gonorrhoeae
cgcactatgagccgcgaagg

SEQ ID NO: 51704 - DNA, 20 bp, Neisseria gonorrhoeae
cgaggtaacgtggtcgatgt

SEQ ID NO: 51705 - DNA, 20 bp, Neisseria gonorrhoeae
cagcgcgcgccggtggacga

SEQ ID NO: 51706 - DNA, 20 bp, Neisseria gonorrhoeae
cctcgcaactgccttatgcc

SEQ ID NO: 51707 - DNA, 20 bp, Neisseria gonorrhoeae
tgccctgacggttgccgccg

SEQ ID NO: 51708 - DNA, 20 bp, Neisseria gonorrhoeae
ccgccgccgccgcatcgggc

SEQ ID NO: 51709 - DNA, 20 bp, Neisseria gonorrhoeae
gactttgaccgccatggcgg

SEQ ID NO: 51710 - DNA, 20 bp, Neisseria gonorrhoeae
gaccgccatggcggcggcaa

SEQ ID NO: 51711 - DNA, 20 bp, Neisseria gonorrhoeae
accgccatggcggcggcaat

SEQ ID NO: 51712 - DNA, 20 bp, Neisseria gonorrhoeae
tgcctgtggcaaacgccatc

SEQ ID NO: 51713 - DNA, 20 bp, Neisseria gonorrhoeae
gccacaggcacaagctgggg

SEQ ID NO: 51714 - DNA, 20 bp, Neisseria gonorrhoeae
aaacgggcatcagcacgcac

SEQ ID NO: 51715 - DNA, 20 bp, Neisseria gonorrhoeae
ggcgcgggaaactttaaact

SEQ ID NO: 51716 - DNA, 20 bp, Neisseria gonorrhoeae
gcgcgggaaactttaaactt

SEQ ID NO: 51717 - DNA, 20 bp, Neisseria gonorrhoeae
aaagtttcccgcgccaaact

SEQ ID NO: 51718 - DNA, 20 bp, Neisseria gonorrhoeae
aagtttcccgcgccaaactc

SEQ ID NO: 51719 - DNA, 20 bp, Neisseria gonorrhoeae
caggtgtgtcagaccgtcga

SEQ ID NO: 51720 - DNA, 20 bp, Neisseria gonorrhoeae
aggtgtgtcagaccgtcgac

SEQ ID NO: 51721 - DNA, 20 bp, Neisseria gonorrhoeae
ccgccgaccaaaaaggcaac

SEQ ID NO: 51722 - DNA, 20 bp, Neisseria gonorrhoeae
tggtcggcgttgcctttttg

SEQ ID NO: 51723 - DNA, 20 bp, Neisseria gonorrhoeae
ggtcggcgttgcctttttgg

SEQ ID NO: 51724 - DNA, 20 bp, Neisseria gonorrhoeae
gcgaattgatgccgacgacc

SEQ ID NO: 51725 - DNA, 20 bp, Neisseria gonorrhoeae
cgaattgatgccgacgacct

SEQ ID NO: 51726 - DNA, 20 bp, Neisseria gonorrhoeae
atgccgacgacctgtccttt

SEQ ID NO: 51727 - DNA, 20 bp, Neisseria gonorrhoeae
taagttgaacagcgggccgc

SEQ ID NO: 51728 - DNA, 20 bp, Neisseria gonorrhoeae
aagttgaacagcgggccgcc

SEQ ID NO: 51729 - DNA, 20 bp, Neisseria gonorrhoeae
gccgtcgccttgtttacgcc

SEQ ID NO: 51730 - DNA, 20 bp, Neisseria gonorrhoeae
tttacgccgacatcggtcgc

SEQ ID NO: 51731 - DNA, 20 bp, Neisseria gonorrhoeae
acgccgacatcggtcgcctg

SEQ ID NO: 51732 - DNA, 20 bp, Neisseria gonorrhoeae
cgccgacatcggtcgcctgc

SEQ ID NO: 51733 - DNA, 20 bp, Neisseria gonorrhoeae
ggcgcaggcgaccgatgtcg

SEQ ID NO: 51734 - DNA, 20 bp, Neisseria gonorrhoeae
cctcggttcggcggtaatgg

SEQ ID NO: 51735 - DNA, 20 bp, Neisseria gonorrhoeae
ctcggttcggcggtaatggc

SEQ ID NO: 51736 - DNA, 20 bp, Neisseria gonorrhoeae
ggcggtaatggcgaaattcg

SEQ ID NO: 51737 - DNA, 20 bp, Neisseria gonorrhoeae
gcgcccaaccgttatttggc

SEQ ID NO: 51738 - DNA, 20 bp, Neisseria gonorrhoeae
tttggcgtttaacgcatcgg

SEQ ID NO: 51739 - DNA, 20 bp, Neisseria gonorrhoeae
ggcggtgtgcgaaatgctgg

SEQ ID NO: 51740 - DNA, 20 bp, Neisseria gonorrhoeae
tgccgatgaaggcggcatcg

SEQ ID NO: 51741 - DNA, 20 bp, Neisseria gonorrhoeae
gccgatgaaggcggcatcgt

SEQ ID NO: 51742 - DNA, 20 bp, Neisseria gonorrhoeae
ccgatgaaggcggcatcgtt

SEQ ID NO: 51743 - DNA, 20 bp, Neisseria gonorrhoeae
atcggcaaaatcactgcggt

SEQ ID NO: 51744 - DNA, 20 bp, Neisseria gonorrhoeae
gacgttgcacactttcttgg

SEQ ID NO: 51745 - DNA, 20 bp, Neisseria gonorrhoeae
cacactttcttggcggggca

SEQ ID NO: 51746 - DNA, 20 bp, Neisseria gonorrhoeae
cttggcggggcagcccatat

SEQ ID NO: 51747 - DNA, 20 bp, Neisseria gonorrhoeae
ttggcggggcagcccatatt

SEQ ID NO: 51748 - DNA, 20 bp, Neisseria gonorrhoeae
gcggggcagcccatattgat

SEQ ID NO: 51749 - DNA, 20 bp, Neisseria gonorrhoeae
ttccgcgatttgaagcatta

SEQ ID NO: 51750 - DNA, 20 bp, Neisseria gonorrhoeae
tccgcgatttgaagcattat

SEQ ID NO: 51751 - DNA, 20 bp, Neisseria gonorrhoeae
ccgcgatttgaagcattatg

SEQ ID NO: 51752 - DNA, 20 bp, Neisseria gonorrhoeae
cgcgatttgaagcattatgc

SEQ ID NO: 51753 - DNA, 20 bp, Neisseria gonorrhoeae
ggcataatgcttcaaatcgc

SEQ ID NO: 51754 - DNA, 20 bp, Neisseria gonorrhoeae
ccatgccgccgttcgggttc

SEQ ID NO: 51755 - DNA, 20 bp, Neisseria gonorrhoeae
gggttcggacggcatctgtc

SEQ ID NO: 51756 - DNA, 20 bp, Neisseria gonorrhoeae
ggacggcatctgtctgcatg

SEQ ID NO: 51757 - DNA, 20 bp, Neisseria gonorrhoeae
ggaggtcgggcggaatcccg

SEQ ID NO: 51758 - DNA, 20 bp, Neisseria gonorrhoeae
cgcccgacctccgaaccatg

SEQ ID NO: 51759 - DNA, 20 bp, Neisseria gonorrhoeae
gcggctttggtcagccataa

SEQ ID NO: 51760 - DNA, 20 bp, Neisseria gonorrhoeae
ggtcagccataagctgcccg

SEQ ID NO: 51761 - DNA, 20 bp, Neisseria gonorrhoeae
gtcagccataagctgcccgt

SEQ ID NO: 51762 - DNA, 20 bp, Neisseria gonorrhoeae
cggaatacacggccttgcag

SEQ ID NO: 51763 - DNA, 20 bp, Neisseria gonorrhoeae
ggaatacacggccttgcagg

SEQ ID NO: 51764 - DNA, 20 bp, Neisseria gonorrhoeae
ccgggcaagctgggtatgga

SEQ ID NO: 51765 - DNA, 20 bp, Neisseria gonorrhoeae
cgggcaagctgggtatggac

SEQ ID NO: 51766 - DNA, 20 bp, Neisseria gonorrhoeae
ctgccgtccatacccagctt

SEQ ID NO: 51767 - DNA, 20 bp, Neisseria gonorrhoeae
cccggaaagccgcacagttt

SEQ ID NO: 51768 - DNA, 20 bp, Neisseria gonorrhoeae
cgccatatcgtccagcggca

SEQ ID NO: 51769 - DNA, 20 bp, Neisseria gonorrhoeae
agcgcgccggtgtatctgaa

SEQ ID NO: 51770 - DNA, 20 bp, Neisseria gonorrhoeae
ccagcacgtgaaagcgtcgc

SEQ ID NO: 51771 - DNA, 20 bp, Neisseria gonorrhoeae
agatacaccggcgcgctgaa

SEQ ID NO: 51772 - DNA, 20 bp, Neisseria gonorrhoeae
gcagaattcgacttcatgca

SEQ ID NO: 51773 - DNA, 20 bp, Neisseria gonorrhoeae
cagaattcgacttcatgcac

SEQ ID NO: 51774 - DNA, 20 bp, Neisseria gonorrhoeae
gacttcatgcactacgccct

SEQ ID NO: 51775 - DNA, 20 bp, Neisseria gonorrhoeae
atgcactacgccctcgcatc

SEQ ID NO: 51776 - DNA, 20 bp, Neisseria gonorrhoeae
tgcctgtccctcagcgccgc

SEQ ID NO: 51777 - DNA, 20 bp, Neisseria gonorrhoeae
cgacgggcgataaccacgcc

SEQ ID NO: 51778 - DNA, 20 bp, Neisseria gonorrhoeae
gtaggcttgcagacggctgc

SEQ ID NO: 51779 - DNA, 20 bp, Neisseria gonorrhoeae
cagacggctgcgggtacctt

SEQ ID NO: 51780 - DNA, 20 bp, Neisseria gonorrhoeae
cacgacgcgtacggatacga

SEQ ID NO: 51781 - DNA, 20 bp, Neisseria gonorrhoeae
acagtggtaatcggggttgc

SEQ ID NO: 51782 - DNA, 20 bp, Neisseria gonorrhoeae
cacaggcgtgccaacgtggc

SEQ ID NO: 51783 - DNA, 20 bp, Neisseria gonorrhoeae
gttggtgtgggtcatgaagc

SEQ ID NO: 51784 - DNA, 20 bp, Neisseria gonorrhoeae
gtgtgggtcatgaagcgtgt

SEQ ID NO: 51785 - DNA, 20 bp, Neisseria gonorrhoeae
atgacccacaccaacgaact

SEQ ID NO: 51786 - DNA, 20 bp, Neisseria gonorrhoeae
cggcggcatgttcgagggtt

SEQ ID NO: 51787 - DNA, 20 bp, Neisseria gonorrhoeae
gagggtttgggcggctttgc

SEQ ID NO: 51788 - DNA, 20 bp, Neisseria gonorrhoeae
gggcggctttgcctgtgttc

SEQ ID NO: 51789 - DNA, 20 bp, Neisseria gonorrhoeae
ggcggctttgcctgtgttct

SEQ ID NO: 51790 - DNA, 20 bp, Neisseria gonorrhoeae
gcctgtgttcttgcgtttgg

SEQ ID NO: 51791 - DNA, 20 bp, Neisseria gonorrhoeae
gtgtgccgtcgagttcggca

SEQ ID NO: 51792 - DNA, 20 bp, Neisseria gonorrhoeae
tgtgccgtcgagttcggcaa

SEQ ID NO: 51793 - DNA, 20 bp, Neisseria gonorrhoeae
ggcaaagcgggcaaggtggc

SEQ ID NO: 51794 - DNA, 20 bp, Neisseria gonorrhoeae
accacgctcgacagccgcca

SEQ ID NO: 51795 - DNA, 20 bp, Neisseria gonorrhoeae
ccacgctcgacagccgccac

SEQ ID NO: 51796 - DNA, 20 bp, Neisseria gonorrhoeae
ggcgagcagggcgggatttg

SEQ ID NO: 51797 - DNA, 20 bp, Neisseria gonorrhoeae
gccgctgcaagggctttttt

SEQ ID NO: 51798 - DNA, 20 bp, Neisseria gonorrhoeae
ccgctgcaagggcttttttg

SEQ ID NO: 51799 - DNA, 20 bp, Neisseria gonorrhoeae
tttgatgttttggggttgcg

SEQ ID NO: 51800 - DNA, 20 bp, Neisseria gonorrhoeae
ttgatgttttggggttgcgg

SEQ ID NO: 51801 - DNA, 20 bp, Neisseria gonorrhoeae
agggtgtgggtgtgccggtc

SEQ ID NO: 51802 - DNA, 20 bp, Neisseria gonorrhoeae
cggatgtggtggggaaggtt

SEQ ID NO: 51803 - DNA, 20 bp, Neisseria gonorrhoeae
cccaaccttccccaccacat

SEQ ID NO: 51804 - DNA, 20 bp, Neisseria gonorrhoeae
ccaaccttccccaccacatc

SEQ ID NO: 51805 - DNA, 20 bp, Neisseria gonorrhoeae
cccaccacatccgcaacgga

SEQ ID NO: 51806 - DNA, 20 bp, Neisseria gonorrhoeae
ggcgctcagtgcggcttcga

SEQ ID NO: 51807 - DNA, 20 bp, Neisseria gonorrhoeae
gaggtcgtcggcgttgaaac

SEQ ID NO: 51808 - DNA, 20 bp, Neisseria gonorrhoeae
aaactgatgaggaagttgca

SEQ ID NO: 51809 - DNA, 20 bp, Neisseria gonorrhoeae
cagtgtcgggcgaggcagtg

SEQ ID NO: 51810 - DNA, 20 bp, Neisseria gonorrhoeae
ctcatcagtttcaacgccga

SEQ ID NO: 51811 - DNA, 20 bp, Neisseria gonorrhoeae
agggttgtggtgtaggacgg

SEQ ID NO: 51812 - DNA, 20 bp, Neisseria gonorrhoeae
tggtgtaggacggcggtttt

SEQ ID NO: 51813 - DNA, 20 bp, Neisseria gonorrhoeae
tggtgtgcaggctgtgtccg

SEQ ID NO: 51814 - DNA, 20 bp, Neisseria gonorrhoeae
ggtgtgcaggctgtgtccga

SEQ ID NO: 51815 - DNA, 20 bp, Neisseria gonorrhoeae
gtgtgcaggctgtgtccgaa

SEQ ID NO: 51816 - DNA, 20 bp, Neisseria gonorrhoeae
ggcggggtataggacgacat

SEQ ID NO: 51817 - DNA, 20 bp, Neisseria gonorrhoeae
gcggggtataggacgacatc

SEQ ID NO: 51818 - DNA, 20 bp, Neisseria gonorrhoeae
ggtgcgttgttctgttcgcc

SEQ ID NO: 51819 - DNA, 20 bp, Neisseria gonorrhoeae
ttctgttcgccgctgtgttg

SEQ ID NO: 51820 - DNA, 20 bp, Neisseria gonorrhoeae
tgttcgccgctgtgttgtgc

SEQ ID NO: 51821 - DNA, 20 bp, Neisseria gonorrhoeae
gcggcttttttgaaggcgat

SEQ ID NO: 51822 - DNA, 20 bp, Neisseria gonorrhoeae
aaaaaagccgccaatctcgg

SEQ ID NO: 51823 - DNA, 20 bp, Neisseria gonorrhoeae
gcaggattgctgcacttgga

SEQ ID NO: 51824 - DNA, 20 bp, Neisseria gonorrhoeae
ctgcacttggactggacata

SEQ ID NO: 51825 - DNA, 20 bp, Neisseria gonorrhoeae
gactggacatacacccggct

SEQ ID NO: 51826 - DNA, 20 bp, Neisseria gonorrhoeae
ccgccatgcgcggtctttgt

SEQ ID NO: 51827 - DNA, 20 bp, Neisseria gonorrhoeae
gtcggtttccgcaggttcgg

SEQ ID NO: 51828 - DNA, 20 bp, Neisseria gonorrhoeae
tcggtttccgcaggttcggc

SEQ ID NO: 51829 - DNA, 20 bp, Neisseria gonorrhoeae
ccgcaggttcggctgtactg

SEQ ID NO: 51830 - DNA, 20 bp, Neisseria gonorrhoeae
cgcaggttcggctgtactgc

SEQ ID NO: 51831 - DNA, 20 bp, Neisseria gonorrhoeae
aaaccgatgcgggtgatgag

SEQ ID NO: 51832 - DNA, 20 bp, Neisseria gonorrhoeae
gagttcgggatcggagaggc

SEQ ID NO: 51833 - DNA, 20 bp, Neisseria gonorrhoeae
gggatcggagaggctgtgcc

SEQ ID NO: 51834 - DNA, 20 bp, Neisseria gonorrhoeae
caacctgttttgccgttttg

SEQ ID NO: 51835 - DNA, 20 bp, Neisseria gonorrhoeae
aacctgttttgccgttttga

SEQ ID NO: 51836 - DNA, 20 bp, Neisseria gonorrhoeae
ttcgatcggctgccaatcaa

SEQ ID NO: 51837 - DNA, 20 bp, Neisseria gonorrhoeae
gatcggctgccaatcaatca

SEQ ID NO: 51838 - DNA, 20 bp, Neisseria gonorrhoeae
ggcagtcatggcttgtgcgg

SEQ ID NO: 51839 - DNA, 20 bp, Neisseria gonorrhoeae
gcagtcatggcttgtgcggt

SEQ ID NO: 51840 - DNA, 20 bp, Neisseria gonorrhoeae
ccgctatcggagttggacca

SEQ ID NO: 51841 - DNA, 20 bp, Neisseria gonorrhoeae
ttcagcaggcagaatccgcc

SEQ ID NO: 51842 - DNA, 20 bp, Neisseria gonorrhoeae
agcaggcagaatccgccggc

SEQ ID NO: 51843 - DNA, 20 bp, Neisseria gonorrhoeae
gccgcttttcgcgtgatgcc

SEQ ID NO: 51844 - DNA, 20 bp, Neisseria gonorrhoeae
ccgcttttcgcgtgatgccc

SEQ ID NO: 51845 - DNA, 20 bp, Neisseria gonorrhoeae
tcgcgtgatgccccggcggg

SEQ ID NO: 51846 - DNA, 20 bp, Neisseria gonorrhoeae
gccccggggtcgtgcccggt

SEQ ID NO: 51847 - DNA, 20 bp, Neisseria gonorrhoeae
ccccggggtcgtgcccggtg

SEQ ID NO: 51848 - DNA, 20 bp, Neisseria gonorrhoeae
tccaccccgcctgcaccggg

SEQ ID NO: 51849 - DNA, 20 bp, Neisseria gonorrhoeae
ccaccccgcctgcaccgggc

SEQ ID NO: 51850 - DNA, 20 bp, Neisseria gonorrhoeae
caccccgcctgcaccgggca

SEQ ID NO: 51851 - DNA, 20 bp, Neisseria gonorrhoeae
atcggcccgcaagtcggtga

SEQ ID NO: 51852 - DNA, 20 bp, Neisseria gonorrhoeae
tcggcccgcaagtcggtgag

SEQ ID NO: 51853 - DNA, 20 bp, Neisseria gonorrhoeae
gtaaataatggattgatggc

SEQ ID NO: 51854 - DNA, 20 bp, Neisseria gonorrhoeae
atggctttaggttttgtcgt

SEQ ID NO: 51855 - DNA, 20 bp, Neisseria gonorrhoeae
aggttttgtcgttatcggca

SEQ ID NO: 51856 - DNA, 20 bp, Neisseria gonorrhoeae
gcacaagacggttttttcgc

SEQ ID NO: 51857 - DNA, 20 bp, Neisseria gonorrhoeae
tttcgccgttgatggcgtag

SEQ ID NO: 51858 - DNA, 20 bp, Neisseria gonorrhoeae
ttcgccgttgatggcgtagc

SEQ ID NO: 51859 - DNA, 20 bp, Neisseria gonorrhoeae
tcgccgttgatggcgtagcg

SEQ ID NO: 51860 - DNA, 20 bp, Neisseria gonorrhoeae
cgccgttgatggcgtagcgg

SEQ ID NO: 51861 - DNA, 20 bp, Neisseria gonorrhoeae
ttccgcaggcgtgcagcatg

SEQ ID NO: 51862 - DNA, 20 bp, Neisseria gonorrhoeae
tccgcaggcgtgcagcatgg

SEQ ID NO: 51863 - DNA, 20 bp, Neisseria gonorrhoeae
ccgcaggcgtgcagcatggg

SEQ ID NO: 51864 - DNA, 20 bp, Neisseria gonorrhoeae
cgcaggcgtgcagcatgggt

SEQ ID NO: 51865 - DNA, 20 bp, Neisseria gonorrhoeae
gatgctgggtttgggttcgc

SEQ ID NO: 51866 - DNA, 20 bp, Neisseria gonorrhoeae
caccgcatccaaaccggtcg

SEQ ID NO: 51867 - DNA, 20 bp, Neisseria gonorrhoeae
cgcccgccgtgggtaaagat

SEQ ID NO: 51868 - DNA, 20 bp, Neisseria gonorrhoeae
cccagcgtgtgttttcgggg

SEQ ID NO: 51869 - DNA, 20 bp, Neisseria gonorrhoeae
ccagcgtgtgttttcggggt

SEQ ID NO: 51870 - DNA, 20 bp, Neisseria gonorrhoeae
tcggggttgacggctttggc

SEQ ID NO: 51871 - DNA, 20 bp, Neisseria gonorrhoeae
agcaggcggcggatgtcggc

SEQ ID NO: 51872 - DNA, 20 bp, Neisseria gonorrhoeae
ccggacaagtcttcatcccg

SEQ ID NO: 51873 - DNA, 20 bp, Neisseria gonorrhoeae
atcccgctgaccgtcggcgg

SEQ ID NO: 51874 - DNA, 20 bp, Neisseria gonorrhoeae
ccgacatccgccgcctgctc

SEQ ID NO: 51875 - DNA, 20 bp, Neisseria gonorrhoeae
ttcggcggcacacagggcgc

SEQ ID NO: 51876 - DNA, 20 bp, Neisseria gonorrhoeae
tcggcggcacacagggcgcg

SEQ ID NO: 51877 - DNA, 20 bp, Neisseria gonorrhoeae
cggcggcacacagggcgcgg

SEQ ID NO: 51878 - DNA, 20 bp, Neisseria gonorrhoeae
ggcggcacacagggcgcgga

SEQ ID NO: 51879 - DNA, 20 bp, Neisseria gonorrhoeae
gacgacatccgcgccctgtg

SEQ ID NO: 51880 - DNA, 20 bp, Neisseria gonorrhoeae
accggtttgcgcaggccttg

SEQ ID NO: 51881 - DNA, 20 bp, Neisseria gonorrhoeae
gcgcaggccttgcagcagcg

SEQ ID NO: 51882 - DNA, 20 bp, Neisseria gonorrhoeae
cgcaggccttgcagcagcgg

SEQ ID NO: 51883 - DNA, 20 bp, Neisseria gonorrhoeae
cagcagcgggccgacgctca

SEQ ID NO: 51884 - DNA, 20 bp, Neisseria gonorrhoeae
gcactgcgttggacggcttt

SEQ ID NO: 51885 - DNA, 20 bp, Neisseria gonorrhoeae
ggcaaggttcaattggtgtg

SEQ ID NO: 51886 - DNA, 20 bp, Neisseria gonorrhoeae
gcaaggttcaattggtgtgc

SEQ ID NO: 51887 - DNA, 20 bp, Neisseria gonorrhoeae
aattggtgtgccagcgcgtc

SEQ ID NO: 51888 - DNA, 20 bp, Neisseria gonorrhoeae
gtgtgccagcgcgtcggcat

SEQ ID NO: 51889 - DNA, 20 bp, Neisseria gonorrhoeae
tcggaacggacggcgaagac

SEQ ID NO: 51890 - DNA, 20 bp, Neisseria gonorrhoeae
gcggcatcgagtgcggcaac

SEQ ID NO: 51891 - DNA, 20 bp, Neisseria gonorrhoeae
gccgaccagtgcgtcgaacc

SEQ ID NO: 51892 - DNA, 20 bp, Neisseria gonorrhoeae
ccgaccagtgcgtcgaacca

SEQ ID NO: 51893 - DNA, 20 bp, Neisseria gonorrhoeae
tgccttgcgcgagcagggtt

SEQ ID NO: 51894 - DNA, 20 bp, Neisseria gonorrhoeae
gccttgcgcgagcagggttt

SEQ ID NO: 51895 - DNA, 20 bp, Neisseria gonorrhoeae
ggaaatgccggtcaattcca

SEQ ID NO: 51896 - DNA, 20 bp, Neisseria gonorrhoeae
caacatggcttcgatgcgct

SEQ ID NO: 51897 - DNA, 20 bp, Neisseria gonorrhoeae
gatgcgctgtcgctcttgcg

SEQ ID NO: 51898 - DNA, 20 bp, Neisseria gonorrhoeae
cgccgtcctgcctttgccgt

SEQ ID NO: 51899 - DNA, 20 bp, Neisseria gonorrhoeae
gccgttgccgagaccgtagg

SEQ ID NO: 51900 - DNA, 20 bp, Neisseria gonorrhoeae
catcagcttgaggaagacga

SEQ ID NO: 51901 - DNA, 20 bp, Neisseria gonorrhoeae
atcagcttgaggaagacgag

SEQ ID NO: 51902 - DNA, 20 bp, Neisseria gonorrhoeae
gcactcgtcttcctcaagct

SEQ ID NO: 51903 - DNA, 20 bp, Neisseria gonorrhoeae
ctcaagctgatgaaagagtt

SEQ ID NO: 51904 - DNA, 20 bp, Neisseria gonorrhoeae
accgccaccctgctgctgac

SEQ ID NO: 51905 - DNA, 20 bp, Neisseria gonorrhoeae
tttggcggcaaccggtacgc

SEQ ID NO: 51906 - DNA, 20 bp, Neisseria gonorrhoeae
ttggcggcaaccggtacgcc

SEQ ID NO: 51907 - DNA, 20 bp, Neisseria gonorrhoeae
tggcggcaaccggtacgcct

SEQ ID NO: 51908 - DNA, 20 bp, Neisseria gonorrhoeae
ggcggcaaccggtacgcctt

SEQ ID NO: 51909 - DNA, 20 bp, Neisseria gonorrhoeae
gcggcaaccggtacgccttt

SEQ ID NO: 51910 - DNA, 20 bp, Neisseria gonorrhoeae
acgcgtttgcgacagtcggc

SEQ ID NO: 51911 - DNA, 20 bp, Neisseria gonorrhoeae
gcgacagtcggccatgcgtt

SEQ ID NO: 51912 - DNA, 20 bp, Neisseria gonorrhoeae
cgacagtcggccatgcgttc

SEQ ID NO: 51913 - DNA, 20 bp, Neisseria gonorrhoeae
gaaatcgcgtccgagcattt

SEQ ID NO: 51914 - DNA, 20 bp, Neisseria gonorrhoeae
cgaacgcatggccgactgtc

SEQ ID NO: 51915 - DNA, 20 bp, Neisseria gonorrhoeae
gagggcgcgtcttcgggctt

SEQ ID NO: 51916 - DNA, 20 bp, Neisseria gonorrhoeae
gggcttgggtttttcgacaa

SEQ ID NO: 51917 - DNA, 20 bp, Neisseria gonorrhoeae
ggtttttcgacaatgccggt

SEQ ID NO: 51918 - DNA, 20 bp, Neisseria gonorrhoeae
ttcgacaatgccggtaatgc

SEQ ID NO: 51919 - DNA, 20 bp, Neisseria gonorrhoeae
tcgacaatgccggtaatgcg

SEQ ID NO: 51920 - DNA, 20 bp, Neisseria gonorrhoeae
ttccgccgcttcttccaagc

SEQ ID NO: 51921 - DNA, 20 bp, Neisseria gonorrhoeae
tccgccgcttcttccaagcc

SEQ ID NO: 51922 - DNA, 20 bp, Neisseria gonorrhoeae
ccgccgcttcttccaagccg

SEQ ID NO: 51923 - DNA, 20 bp, Neisseria gonorrhoeae
cgccgcttcttccaagccga

SEQ ID NO: 51924 - DNA, 20 bp, Neisseria gonorrhoeae
ttccaagccgaaccagccgt

SEQ ID NO: 51925 - DNA, 20 bp, Neisseria gonorrhoeae
aacggcactgcagatatcgt

SEQ ID NO: 51926 - DNA, 20 bp, Neisseria gonorrhoeae
ttaacgatatctgcagtgcc

SEQ ID NO: 51927 - DNA, 20 bp, Neisseria gonorrhoeae
taacgatatctgcagtgccg

SEQ ID NO: 51928 - DNA, 20 bp, Neisseria gonorrhoeae
aacgatatctgcagtgccgt

SEQ ID NO: 51929 - DNA, 20 bp, Neisseria gonorrhoeae
acgatatctgcagtgccgtt

SEQ ID NO: 51930 - DNA, 20 bp, Neisseria gonorrhoeae
ccagcgcgtgacagacggca

SEQ ID NO: 51931 - DNA, 20 bp, Neisseria gonorrhoeae
tgccgggatgggttggttcg

SEQ ID NO: 51932 - DNA, 20 bp, Neisseria gonorrhoeae
gccgggatgggttggttcga

SEQ ID NO: 51933 - DNA, 20 bp, Neisseria gonorrhoeae
ccgggatgggttggttcgat

SEQ ID NO: 51934 - DNA, 20 bp, Neisseria gonorrhoeae
gttcgatgccgtctgtcacg

SEQ ID NO: 51935 - DNA, 20 bp, Neisseria gonorrhoeae
tggcggcatatgctcaactg

SEQ ID NO: 51936 - DNA, 20 bp, Neisseria gonorrhoeae
ggcggcatatgctcaactgg

SEQ ID NO: 51937 - DNA, 20 bp, Neisseria gonorrhoeae
gcggcatatgctcaactggc

SEQ ID NO: 51938 - DNA, 20 bp, Neisseria gonorrhoeae
ccgtcgccatcctgcctatg

SEQ ID NO: 51939 - DNA, 20 bp, Neisseria gonorrhoeae
tcctttatcctgctgatacc

SEQ ID NO: 51940 - DNA, 20 bp, Neisseria gonorrhoeae
cctttatcctgctgataccc

SEQ ID NO: 51941 - DNA, 20 bp, Neisseria gonorrhoeae
ctttatcctgctgatacccg

SEQ ID NO: 51942 - DNA, 20 bp, Neisseria gonorrhoeae
atcctgctgatacccgccgc

SEQ ID NO: 51943 - DNA, 20 bp, Neisseria gonorrhoeae
tcctgctgatacccgccgcc

SEQ ID NO: 51944 - DNA, 20 bp, Neisseria gonorrhoeae
aagccgattttgccgagcag

SEQ ID NO: 51945 - DNA, 20 bp, Neisseria gonorrhoeae
tgccgagcagcgcggtcagt

SEQ ID NO: 51946 - DNA, 20 bp, Neisseria gonorrhoeae
gccgagcagcgcggtcagtt

SEQ ID NO: 51947 - DNA, 20 bp, Neisseria gonorrhoeae
ccgagcagcgcggtcagttc

SEQ ID NO: 51948 - DNA, 20 bp, Neisseria gonorrhoeae
gtcgaaacagccttggatgt

SEQ ID NO: 51949 - DNA, 20 bp, Neisseria gonorrhoeae
ctgcccgcggcttctccggc

SEQ ID NO: 51950 - DNA, 20 bp, Neisseria gonorrhoeae
tccggcgacgacgtagtcgg

SEQ ID NO: 51951 - DNA, 20 bp, Neisseria gonorrhoeae
ttttggacacgctgccggac

SEQ ID NO: 51952 - DNA, 20 bp, Neisseria gonorrhoeae
tttggacacgctgccggaca

SEQ ID NO: 51953 - DNA, 20 bp, Neisseria gonorrhoeae
ttggacacgctgccggacac

SEQ ID NO: 51954 - DNA, 20 bp, Neisseria gonorrhoeae
tggagcggaacggattcggt

SEQ ID NO: 51955 - DNA, 20 bp, Neisseria gonorrhoeae
ggtttgcttggcggacggtg

SEQ ID NO: 51956 - DNA, 20 bp, Neisseria gonorrhoeae
gcttggcggacggtgtttcg

SEQ ID NO: 51957 - DNA, 20 bp, Neisseria gonorrhoeae
cttggcggacggtgtttcgg

SEQ ID NO: 51958 - DNA, 20 bp, Neisseria gonorrhoeae
gcggacggtgtttcggcaaa

SEQ ID NO: 51959 - DNA, 20 bp, Neisseria gonorrhoeae
caacgcttcgagttcgcgga

SEQ ID NO: 51960 - DNA, 20 bp, Neisseria gonorrhoeae
gagttcgcggaacaggcggt

SEQ ID NO: 51961 - DNA, 20 bp, Neisseria gonorrhoeae
gcggaacaggcggtcgtatt

SEQ ID NO: 51962 - DNA, 20 bp, Neisseria gonorrhoeae
ggcatcgggtatgctgggcg

SEQ ID NO: 51963 - DNA, 20 bp, Neisseria gonorrhoeae
cgcgaactcgaagcgttgga

SEQ ID NO: 51964 - DNA, 20 bp, Neisseria gonorrhoeae
gataaaggcggcaaggtcgg

SEQ ID NO: 51965 - DNA, 20 bp, Neisseria gonorrhoeae
ccgcctttatcgaagtggct

SEQ ID NO: 51966 - DNA, 20 bp, Neisseria gonorrhoeae
atcgaagtggcttccgcact

SEQ ID NO: 51967 - DNA, 20 bp, Neisseria gonorrhoeae
tcgaagtggcttccgcactg

SEQ ID NO: 51968 - DNA, 20 bp, Neisseria gonorrhoeae
cgcactggacgcattctgcg

SEQ ID NO: 51969 - DNA, 20 bp, Neisseria gonorrhoeae
ggcaatctggaaatggtcgt

SEQ ID NO: 51970 - DNA, 20 bp, Neisseria gonorrhoeae
tcggctgcaccatggacgac

SEQ ID NO: 51971 - DNA, 20 bp, Neisseria gonorrhoeae
ccagattgccgaacccatcc

SEQ ID NO: 51972 - DNA, 20 bp, Neisseria gonorrhoeae
cagattgccgaacccatccc

SEQ ID NO: 51973 - DNA, 20 bp, Neisseria gonorrhoeae
ccgaacccatcccgggcatc

SEQ ID NO: 51974 - DNA, 20 bp, Neisseria gonorrhoeae
ggcaaacggttcgaaatcgc

SEQ ID NO: 51975 - DNA, 20 bp, Neisseria gonorrhoeae
gaaatcgcagccttccagtt

SEQ ID NO: 51976 - DNA, 20 bp, Neisseria gonorrhoeae
cagttcgatgccgatggaaa

SEQ ID NO: 51977 - DNA, 20 bp, Neisseria gonorrhoeae
gatgccgatggaaaacgcgt

SEQ ID NO: 51978 - DNA, 20 bp, Neisseria gonorrhoeae
cacttctcccgcccccgaaa

SEQ ID NO: 51979 - DNA, 20 bp, Neisseria gonorrhoeae
gcaaacagcttttccaccgc

SEQ ID NO: 51980 - DNA, 20 bp, Neisseria gonorrhoeae
tccaccgcatccgtgccgta

SEQ ID NO: 51981 - DNA, 20 bp, Neisseria gonorrhoeae
ccaccgcatccgtgccgtat

SEQ ID NO: 51982 - DNA, 20 bp, Neisseria gonorrhoeae
caccgcatccgtgccgtatt

SEQ ID NO: 51983 - DNA, 20 bp, Neisseria gonorrhoeae
gaacggcggcagcgaaatgt

SEQ ID NO: 51984 - DNA, 20 bp, Neisseria gonorrhoeae
gaccctgctgttggatgtgc

SEQ ID NO: 51985 - DNA, 20 bp, Neisseria gonorrhoeae
accctgctgttggatgtgcc

SEQ ID NO: 51986 - DNA, 20 bp, Neisseria gonorrhoeae
gatgtgccgctggaagtatc

SEQ ID NO: 51987 - DNA, 20 bp, Neisseria gonorrhoeae
gagcaggagcaggcggattt

SEQ ID NO: 51988 - DNA, 20 bp, Neisseria gonorrhoeae
ctcgcgcgcctgtccgatac

SEQ ID NO: 51989 - DNA, 20 bp, Neisseria gonorrhoeae
gctgctgttccgtaaaacag

SEQ ID NO: 51990 - DNA, 20 bp, Neisseria gonorrhoeae
ctgctgttccgtaaaacagg

SEQ ID NO: 51991 - DNA, 20 bp, Neisseria gonorrhoeae
cgtaaaacaggtgcgccgac

SEQ ID NO: 51992 - DNA, 20 bp, Neisseria gonorrhoeae
tacggaacagcagcaaaggc

SEQ ID NO: 51993 - DNA, 20 bp, Neisseria gonorrhoeae
acggaacagcagcaaaggct

SEQ ID NO: 51994 - DNA, 20 bp, Neisseria gonorrhoeae
tttggcggtttcgacggcga

SEQ ID NO: 51995 - DNA, 20 bp, Neisseria gonorrhoeae
ggcggtttcgacggcgatgg

SEQ ID NO: 51996 - DNA, 20 bp, Neisseria gonorrhoeae
gcggtttcgacggcgatggg

SEQ ID NO: 51997 - DNA, 20 bp, Neisseria gonorrhoeae
cgacggcgatggggtagccg

SEQ ID NO: 51998 - DNA, 20 bp, Neisseria gonorrhoeae
gacggcgatggggtagccgt

SEQ ID NO: 51999 - DNA, 20 bp, Neisseria gonorrhoeae
gatgggttcggttgtgggcg

SEQ ID NO: 52000 - DNA, 20 bp, Neisseria gonorrhoeae
ggttgtgggcgagcgtttcg

SEQ ID NO: 52001 - DNA, 20 bp, Neisseria gonorrhoeae
tgggcgagcgtttcgtacag

SEQ ID NO: 52002 - DNA, 20 bp, Neisseria gonorrhoeae
cgtacagggtgtccgccgtg

SEQ ID NO: 52003 - DNA, 20 bp, Neisseria gonorrhoeae
gtacagggtgtccgccgtgc

SEQ ID NO: 52004 - DNA, 20 bp, Neisseria gonorrhoeae
cctacaaagcgcgcattatg

SEQ ID NO: 52005 - DNA, 20 bp, Neisseria gonorrhoeae
tggcggcgttgcccgaaggc

SEQ ID NO: 52006 - DNA, 20 bp, Neisseria gonorrhoeae
cccgaaggcagcgcgtttga

SEQ ID NO: 52007 - DNA, 20 bp, Neisseria gonorrhoeae
gagccgctgatgacgcttta

SEQ ID NO: 52008 - DNA, 20 bp, Neisseria gonorrhoeae
agccgctgatgacgctttac

SEQ ID NO: 52009 - DNA, 20 bp, Neisseria gonorrhoeae
gaacacatcaccaccgccga

SEQ ID NO: 52010 - DNA, 20 bp, Neisseria gonorrhoeae
tggaagcgggcgacaacgtt

SEQ ID NO: 52011 - DNA, 20 bp, Neisseria gonorrhoeae
ggaagcgggcgacaacgttg

SEQ ID NO: 52012 - DNA, 20 bp, Neisseria gonorrhoeae
gaagcgggcgacaacgttgc

SEQ ID NO: 52013 - DNA, 20 bp, Neisseria gonorrhoeae
tcgcccgcttccaaaacgag

SEQ ID NO: 52014 - DNA, 20 bp, Neisseria gonorrhoeae
gtcgccgccgttaccggcga

SEQ ID NO: 52015 - DNA, 20 bp, Neisseria gonorrhoeae
ccggcgagaaggcgcacaaa

SEQ ID NO: 52016 - DNA, 20 bp, Neisseria gonorrhoeae
ttcctcggcaccgactccgc

SEQ ID NO: 52017 - DNA, 20 bp, Neisseria gonorrhoeae
ctcggcaccgactccgcgcc

SEQ ID NO: 52018 - DNA, 20 bp, Neisseria gonorrhoeae
ggcgtgcggcgcggagtcgg

SEQ ID NO: 52019 - DNA, 20 bp, Neisseria gonorrhoeae
agacggccttcgatactggc

SEQ ID NO: 52020 - DNA, 20 bp, Neisseria gonorrhoeae
gatactggcggacgcgatgg

SEQ ID NO: 52021 - DNA, 20 bp, Neisseria gonorrhoeae
gccgccgtcagcttcgatgc

SEQ ID NO: 52022 - DNA, 20 bp, Neisseria gonorrhoeae
ccgccgtcagcttcgatgcc

SEQ ID NO: 52023 - DNA, 20 bp, Neisseria gonorrhoeae
gatgccgatttcaacacggc

SEQ ID NO: 52024 - DNA, 20 bp, Neisseria gonorrhoeae
ccgaggcgctcggcggtgtg

SEQ ID NO: 52025 - DNA, 20 bp, Neisseria gonorrhoeae
tcgtcgtggaggcgatgcgc

SEQ ID NO: 52026 - DNA, 20 bp, Neisseria gonorrhoeae
cgtcgtggaggcgatgcgcc

SEQ ID NO: 52027 - DNA, 20 bp, Neisseria gonorrhoeae
gtcgtggaggcgatgcgcct

SEQ ID NO: 52028 - DNA, 20 bp, Neisseria gonorrhoeae
tgattcagcctgtcgttgag

SEQ ID NO: 52029 - DNA, 20 bp, Neisseria gonorrhoeae
cctttagacgcttccacgcc

SEQ ID NO: 52030 - DNA, 20 bp, Neisseria gonorrhoeae
agacgcttccacgccgccgg

SEQ ID NO: 52031 - DNA, 20 bp, Neisseria gonorrhoeae
gacgcttccacgccgccgga

SEQ ID NO: 52032 - DNA, 20 bp, Neisseria gonorrhoeae
cacgccgccggatacgtcga

SEQ ID NO: 52033 - DNA, 20 bp, Neisseria gonorrhoeae
cgctccggtgatgcggacgg

SEQ ID NO: 52034 - DNA, 20 bp, Neisseria gonorrhoeae
aaggcgacggattcggaggc

SEQ ID NO: 52035 - DNA, 20 bp, Neisseria gonorrhoeae
ggaggcgacggcataggatt

SEQ ID NO: 52036 - DNA, 20 bp, Neisseria gonorrhoeae
cctgccttcgctgtcggttt

SEQ ID NO: 52037 - DNA, 20 bp, Neisseria gonorrhoeae
ctgccttcgctgtcggtttg

SEQ ID NO: 52038 - DNA, 20 bp, Neisseria gonorrhoeae
gctgtcggtttgcgaaccca

SEQ ID NO: 52039 - DNA, 20 bp, Neisseria gonorrhoeae
tcttcgcctgccaagtcctg

SEQ ID NO: 52040 - DNA, 20 bp, Neisseria gonorrhoeae
gcctgccaagtcctgcggtt

SEQ ID NO: 52041 - DNA, 20 bp, Neisseria gonorrhoeae
gtcggcggcggtttccccgt

SEQ ID NO: 52042 - DNA, 20 bp, Neisseria gonorrhoeae
tcggcggcggtttccccgtt

SEQ ID NO: 52043 - DNA, 20 bp, Neisseria gonorrhoeae
ccccgttttcggcggcggat

SEQ ID NO: 52044 - DNA, 20 bp, Neisseria gonorrhoeae
gattgcaccaatgtccaccg

SEQ ID NO: 52045 - DNA, 20 bp, Neisseria gonorrhoeae
attgcaccaatgtccaccgg

SEQ ID NO: 52046 - DNA, 20 bp, Neisseria gonorrhoeae
caccaatgtccaccggcagt

SEQ ID NO: 52047 - DNA, 20 bp, Neisseria gonorrhoeae
caatacggtcaacgcgcagg

SEQ ID NO: 52048 - DNA, 20 bp, Neisseria gonorrhoeae
ctaacgccgcctgcgcgttg

SEQ ID NO: 52049 - DNA, 20 bp, Neisseria gonorrhoeae
gggcgcaccgattggcgtac

SEQ ID NO: 52050 - DNA, 20 bp, Neisseria gonorrhoeae
gcgtactgcacggcttccgc

SEQ ID NO: 52051 - DNA, 20 bp, Neisseria gonorrhoeae
cgcagctatctgatgcagga

SEQ ID NO: 52052 - DNA, 20 bp, Neisseria gonorrhoeae
gggacgcactctgtttccgc

SEQ ID NO: 52053 - DNA, 20 bp, Neisseria gonorrhoeae
gccgttttcgtcctgcatca

SEQ ID NO: 52054 - DNA, 20 bp, Neisseria gonorrhoeae
ccttgagttacgcttatttt

SEQ ID NO: 52055 - DNA, 20 bp, Neisseria gonorrhoeae
agttacgcttatttttccgt

SEQ ID NO: 52056 - DNA, 20 bp, Neisseria gonorrhoeae
cgcttatttttccgtttaaa

SEQ ID NO: 52057 - DNA, 20 bp, Neisseria gonorrhoeae
tttttccgtttaaattcgcg

SEQ ID NO: 52058 - DNA, 20 bp, Neisseria gonorrhoeae
ttccgtttaaattcgcgccg

SEQ ID NO: 52059 - DNA, 20 bp, Neisseria gonorrhoeae
tgctttggcgtgtttgacgc

SEQ ID NO: 52060 - DNA, 20 bp, Neisseria gonorrhoeae
ggcgtgtttgacgctgacgg

SEQ ID NO: 52061 - DNA, 20 bp, Neisseria gonorrhoeae
gcgtgtttgacgctgacggc

SEQ ID NO: 52062 - DNA, 20 bp, Neisseria gonorrhoeae
gacgctgacggcatattggg

SEQ ID NO: 52063 - DNA, 20 bp, Neisseria gonorrhoeae
acgctgacggcatattgggg

SEQ ID NO: 52064 - DNA, 20 bp, Neisseria gonorrhoeae
gcgcattgccccgagctgtc

SEQ ID NO: 52065 - DNA, 20 bp, Neisseria gonorrhoeae
ccccgagctgtcccaaattc

SEQ ID NO: 52066 - DNA, 20 bp, Neisseria gonorrhoeae
cgcgcgcgggcatcgtacac

SEQ ID NO: 52067 - DNA, 20 bp, Neisseria gonorrhoeae
ggacaaagaaaccagcgggc

SEQ ID NO: 52068 - DNA, 20 bp, Neisseria gonorrhoeae
ctttgtccaaacggtgtacg

SEQ ID NO: 52069 - DNA, 20 bp, Neisseria gonorrhoeae
ccggcgacccggtttacggc

SEQ ID NO: 52070 - DNA, 20 bp, Neisseria gonorrhoeae
ccgtaaaccgggtcgccggc

SEQ ID NO: 52071 - DNA, 20 bp, Neisseria gonorrhoeae
gcctcgcgcatatggacgcg

SEQ ID NO: 52072 - DNA, 20 bp, Neisseria gonorrhoeae
ggtgcgtcctgcccgttccg

SEQ ID NO: 52073 - DNA, 20 bp, Neisseria gonorrhoeae
gtgcgtcctgcccgttccga

SEQ ID NO: 52074 - DNA, 20 bp, Neisseria gonorrhoeae
gggtatcgaggcagacgcat

SEQ ID NO: 52075 - DNA, 20 bp, Neisseria gonorrhoeae
ggtatcgaggcagacgcatt

SEQ ID NO: 52076 - DNA, 20 bp, Neisseria gonorrhoeae
gcactgtttgccgagcgcgt

SEQ ID NO: 52077 - DNA, 20 bp, Neisseria gonorrhoeae
gccgagcgcgtggaaggcaa

SEQ ID NO: 52078 - DNA, 20 bp, Neisseria gonorrhoeae
ccgagcgcgtggaaggcaat

SEQ ID NO: 52079 - DNA, 20 bp, Neisseria gonorrhoeae
ccaatgttgcccgcttcgac

SEQ ID NO: 52080 - DNA, 20 bp, Neisseria gonorrhoeae
cccgcttcgacgcgttccaa

SEQ ID NO: 52081 - DNA, 20 bp, Neisseria gonorrhoeae
gacgcgttccaactggcagg

SEQ ID NO: 52082 - DNA, 20 bp, Neisseria gonorrhoeae
caactggcaggcgcgtggat

SEQ ID NO: 52083 - DNA, 20 bp, Neisseria gonorrhoeae
atccacgcgcctgccagttg

SEQ ID NO: 52084 - DNA, 20 bp, Neisseria gonorrhoeae
ggggcgacaaacagacgctc

SEQ ID NO: 52085 - DNA, 20 bp, Neisseria gonorrhoeae
gggcgacaaacagacgctcg

SEQ ID NO: 52086 - DNA, 20 bp, Neisseria gonorrhoeae
accgcaagcggtgcgagcgt

SEQ ID NO: 52087 - DNA, 20 bp, Neisseria gonorrhoeae
gtcgccccaaagcctgaggc

SEQ ID NO: 52088 - DNA, 20 bp, Neisseria gonorrhoeae
tcgccccaaagcctgaggct

SEQ ID NO: 52089 - DNA, 20 bp, Neisseria gonorrhoeae
ggcggcaagctggtgcagcg

SEQ ID NO: 52090 - DNA, 20 bp, Neisseria gonorrhoeae
aagccagcggctttccacaa

SEQ ID NO: 52091 - DNA, 20 bp, Neisseria gonorrhoeae
ccacaatgcggcggctcctg

SEQ ID NO: 52092 - DNA, 20 bp, Neisseria gonorrhoeae
cacaatgcggcggctcctgt

SEQ ID NO: 52093 - DNA, 20 bp, Neisseria gonorrhoeae
gacgacaggagccgccgcat

SEQ ID NO: 52094 - DNA, 20 bp, Neisseria gonorrhoeae
agcccgtagccgtcatagcc

SEQ ID NO: 52095 - DNA, 20 bp, Neisseria gonorrhoeae
ccatcgcgcgcggctatgac

SEQ ID NO: 52096 - DNA, 20 bp, Neisseria gonorrhoeae
catcgcgcgcggctatgacg

SEQ ID NO: 52097 - DNA, 20 bp, Neisseria gonorrhoeae
gcccgaacgtgcggtgttgt

SEQ ID NO: 52098 - DNA, 20 bp, Neisseria gonorrhoeae
cccgaacgtgcggtgttgtc

SEQ ID NO: 52099 - DNA, 20 bp, Neisseria gonorrhoeae
tcgatcgccaaaaccagcca

SEQ ID NO: 52100 - DNA, 20 bp, Neisseria gonorrhoeae
tggcgatcgacaacaccgca

SEQ ID NO: 52101 - DNA, 20 bp, Neisseria gonorrhoeae
ggcgatcgacaacaccgcac

SEQ ID NO: 52102 - DNA, 20 bp, Neisseria gonorrhoeae
tactggatacacactgccct

SEQ ID NO: 52103 - DNA, 20 bp, Neisseria gonorrhoeae
ccggcctgcccgacctctat

SEQ ID NO: 52104 - DNA, 20 bp, Neisseria gonorrhoeae
cggcctgcccgacctctatg

SEQ ID NO: 52105 - DNA, 20 bp, Neisseria gonorrhoeae
gacgatgacggcgacgattc

SEQ ID NO: 52106 - DNA, 20 bp, Neisseria gonorrhoeae
acgatgacggcgacgattcc

SEQ ID NO: 52107 - DNA, 20 bp, Neisseria gonorrhoeae
cgtacaccaaaacagtcatg

SEQ ID NO: 52108 - DNA, 20 bp, Neisseria gonorrhoeae
ccgccatcacgagcgagcgc

SEQ ID NO: 52109 - DNA, 20 bp, Neisseria gonorrhoeae
tggtgtacggaatcgtcgcc

SEQ ID NO: 52110 - DNA, 20 bp, Neisseria gonorrhoeae
aaggttgccatgcccaacaa

SEQ ID NO: 52111 - DNA, 20 bp, Neisseria gonorrhoeae
ccatgcccaacaagcccgaa

SEQ ID NO: 52112 - DNA, 20 bp, Neisseria gonorrhoeae
ggctggcggaaaaggaaatt

SEQ ID NO: 52113 - DNA, 20 bp, Neisseria gonorrhoeae
gctggcggaaaaggaaattg

SEQ ID NO: 52114 - DNA, 20 bp, Neisseria gonorrhoeae
tgacaatttccttttccgcc

SEQ ID NO: 52115 - DNA, 20 bp, Neisseria gonorrhoeae
cgggtgggcatcacgcagtc

SEQ ID NO: 52116 - DNA, 20 bp, Neisseria gonorrhoeae
cggcgtgcctacgcccatca

SEQ ID NO: 52117 - DNA, 20 bp, Neisseria gonorrhoeae
cctgatgggcgtaggcacgc

SEQ ID NO: 52118 - DNA, 20 bp, Neisseria gonorrhoeae
gactgcgtgatgcccacccg

SEQ ID NO: 52119 - DNA, 20 bp, Neisseria gonorrhoeae
aagagggcttttattacgac

SEQ ID NO: 52120 - DNA, 20 bp, Neisseria gonorrhoeae
tattacgacatcgccacgga

SEQ ID NO: 52121 - DNA, 20 bp, Neisseria gonorrhoeae
attacgacatcgccacggaa

SEQ ID NO: 52122 - DNA, 20 bp, Neisseria gonorrhoeae
ttacgacatcgccacggaaa

SEQ ID NO: 52123 - DNA, 20 bp, Neisseria gonorrhoeae
cgacatcgccacggaaaaac

SEQ ID NO: 52124 - DNA, 20 bp, Neisseria gonorrhoeae
cccaaaatggaaggccgtca

SEQ ID NO: 52125 - DNA, 20 bp, Neisseria gonorrhoeae
ccaaaatggaaggccgtcaa

SEQ ID NO: 52126 - DNA, 20 bp, Neisseria gonorrhoeae
cgccgaagaaaaaataaagc

SEQ ID NO: 52127 - DNA, 20 bp, Neisseria gonorrhoeae
tagctttattttttcttcgg

SEQ ID NO: 52128 - DNA, 20 bp, Neisseria gonorrhoeae
attttttcttcggcgcaatc

SEQ ID NO: 52129 - DNA, 20 bp, Neisseria gonorrhoeae
tggattgccaaaattgagcg

SEQ ID NO: 52130 - DNA, 20 bp, Neisseria gonorrhoeae
ggattgccaaaattgagcgc

SEQ ID NO: 52131 - DNA, 20 bp, Neisseria gonorrhoeae
gattgccaaaattgagcgca

SEQ ID NO: 52132 - DNA, 20 bp, Neisseria gonorrhoeae
ccaaaattgagcgcaatatc

SEQ ID NO: 52133 - DNA, 20 bp, Neisseria gonorrhoeae
agcgcaatatccaaagggat

SEQ ID NO: 52134 - DNA, 20 bp, Neisseria gonorrhoeae
ccgacgacttctggctgtac

SEQ ID NO: 52135 - DNA, 20 bp, Neisseria gonorrhoeae
tggctgtacgacaccccggg

SEQ ID NO: 52136 - DNA, 20 bp, Neisseria gonorrhoeae
tagccgctttcttcgacgat

SEQ ID NO: 52137 - DNA, 20 bp, Neisseria gonorrhoeae
cttcgacgatgattttcggc

SEQ ID NO: 52138 - DNA, 20 bp, Neisseria gonorrhoeae
ttcgacgatgattttcggcc

SEQ ID NO: 52139 - DNA, 20 bp, Neisseria gonorrhoeae
gtccgcgtatttgcctgagg

SEQ ID NO: 52140 - DNA, 20 bp, Neisseria gonorrhoeae
tccgcgtatttgcctgaggg

SEQ ID NO: 52141 - DNA, 20 bp, Neisseria gonorrhoeae
gcctgaggggtagggcggcg

SEQ ID NO: 52142 - DNA, 20 bp, Neisseria gonorrhoeae
cctgaggggtagggcggcga

SEQ ID NO: 52143 - DNA, 20 bp, Neisseria gonorrhoeae
gtttcgggcaggcaggggct

SEQ ID NO: 52144 - DNA, 20 bp, Neisseria gonorrhoeae
cctgatccaaacggtgcttc

SEQ ID NO: 52145 - DNA, 20 bp, Neisseria gonorrhoeae
agacggcattccgagtccga

SEQ ID NO: 52146 - DNA, 20 bp, Neisseria gonorrhoeae
cgagtccgaagcatcttgtg

SEQ ID NO: 52147 - DNA, 20 bp, Neisseria gonorrhoeae
tgcggtttgaaaatcgggaa

SEQ ID NO: 52148 - DNA, 20 bp, Neisseria gonorrhoeae
gaaaatcgggaatctgatta

SEQ ID NO: 52149 - DNA, 20 bp, Neisseria gonorrhoeae
tgcccaatgcatgggtggcg

SEQ ID NO: 52150 - DNA, 20 bp, Neisseria gonorrhoeae
tcgctgctcatcaggctaag

SEQ ID NO: 52151 - DNA, 20 bp, Neisseria gonorrhoeae
cgctgctcatcaggctaagg

SEQ ID NO: 52152 - DNA, 20 bp, Neisseria gonorrhoeae
gctgctcatcaggctaaggt

SEQ ID NO: 52153 - DNA, 20 bp, Neisseria gonorrhoeae
cacgtaaagaactgctgcac

SEQ ID NO: 52154 - DNA, 20 bp, Neisseria gonorrhoeae
agacggcatttttttcaaat

SEQ ID NO: 52155 - DNA, 20 bp, Neisseria gonorrhoeae
ttttcaaatcaacgttcttt

SEQ ID NO: 52156 - DNA, 20 bp, Neisseria gonorrhoeae
tttcaaatcaacgttcttta

SEQ ID NO: 52157 - DNA, 20 bp, Neisseria gonorrhoeae
ttcaaatcaacgttctttac

SEQ ID NO: 52158 - DNA, 20 bp, Neisseria gonorrhoeae
tcaaatcaacgttctttacg

SEQ ID NO: 52159 - DNA, 20 bp, Neisseria gonorrhoeae
cggggcgtgggcttcgacca

SEQ ID NO: 52160 - DNA, 20 bp, Neisseria gonorrhoeae
gaccagcttttggtggtcgg

SEQ ID NO: 52161 - DNA, 20 bp, Neisseria gonorrhoeae
tggtggtcgggtgttcggaa

SEQ ID NO: 52162 - DNA, 20 bp, Neisseria gonorrhoeae
ggtggtcgggtgttcggaaa

SEQ ID NO: 52163 - DNA, 20 bp, Neisseria gonorrhoeae
gtggtcgggtgttcggaaac

SEQ ID NO: 52164 - DNA, 20 bp, Neisseria gonorrhoeae
ttgcagatttggcataatgc

SEQ ID NO: 52165 - DNA, 20 bp, Neisseria gonorrhoeae
tgcagatttggcataatgct

SEQ ID NO: 52166 - DNA, 20 bp, Neisseria gonorrhoeae
gcagatttggcataatgctt

SEQ ID NO: 52167 - DNA, 20 bp, Neisseria gonorrhoeae
cagatttggcataatgcttt

SEQ ID NO: 52168 - DNA, 20 bp, Neisseria gonorrhoeae
ggcataatgctttaatcgga

SEQ ID NO: 52169 - DNA, 20 bp, Neisseria gonorrhoeae
gggcaggctgcaggcggcaa

SEQ ID NO: 52170 - DNA, 20 bp, Neisseria gonorrhoeae
ggcaggctgcaggcggcaag

SEQ ID NO: 52171 - DNA, 20 bp, Neisseria gonorrhoeae
atgtcggcggttgtgggcgt

SEQ ID NO: 52172 - DNA, 20 bp, Neisseria gonorrhoeae
tgggcgtggcgatgattgcc

SEQ ID NO: 52173 - DNA, 20 bp, Neisseria gonorrhoeae
ccggtgcggaattcggctac

SEQ ID NO: 52174 - DNA, 20 bp, Neisseria gonorrhoeae
atgacgcagtccggtgcgaa

SEQ ID NO: 52175 - DNA, 20 bp, Neisseria gonorrhoeae
acggataagccaagccgttg

SEQ ID NO: 52176 - DNA, 20 bp, Neisseria gonorrhoeae
caaccgccgcgttgaccttg

SEQ ID NO: 52177 - DNA, 20 bp, Neisseria gonorrhoeae
caacggcttggcttatccgt

SEQ ID NO: 52178 - DNA, 20 bp, Neisseria gonorrhoeae
gcttatccgtcaattcgcac

SEQ ID NO: 52179 - DNA, 20 bp, Neisseria gonorrhoeae
gcgtatctgcgcgacagggg

SEQ ID NO: 52180 - DNA, 20 bp, Neisseria gonorrhoeae
ccattcgggcgcgccgctgt

SEQ ID NO: 52181 - DNA, 20 bp, Neisseria gonorrhoeae
cattcgggcgcgccgctgtt

SEQ ID NO: 52182 - DNA, 20 bp, Neisseria gonorrhoeae
gggcgcgccgctgtttcagg

SEQ ID NO: 52183 - DNA, 20 bp, Neisseria gonorrhoeae
ctcctgaaacagcggcgcgc

SEQ ID NO: 52184 - DNA, 20 bp, Neisseria gonorrhoeae
tattgtgctgctatttttgc

SEQ ID NO: 52185 - DNA, 20 bp, Neisseria gonorrhoeae
attgtgctgctatttttgcc

SEQ ID NO: 52186 - DNA, 20 bp, Neisseria gonorrhoeae
ttgtgctgctatttttgcca

SEQ ID NO: 52187 - DNA, 20 bp, Neisseria gonorrhoeae
tgctgctatttttgccaatg

SEQ ID NO: 52188 - DNA, 20 bp, Neisseria gonorrhoeae
ttgccaatgcctaccgtttt

SEQ ID NO: 52189 - DNA, 20 bp, Neisseria gonorrhoeae
tgcgcctgccggtttggaac

SEQ ID NO: 52190 - DNA, 20 bp, Neisseria gonorrhoeae
gcgcctgccggtttggaaca

SEQ ID NO: 52191 - DNA, 20 bp, Neisseria gonorrhoeae
cgcctgccggtttggaacag

SEQ ID NO: 52192 - DNA, 20 bp, Neisseria gonorrhoeae
ggaacagtctgcccgaaggt

SEQ ID NO: 52193 - DNA, 20 bp, Neisseria gonorrhoeae
gaacagtctgcccgaaggtg

SEQ ID NO: 52194 - DNA, 20 bp, Neisseria gonorrhoeae
cgaaccggcaaacgaaaaca

SEQ ID NO: 52195 - DNA, 20 bp, Neisseria gonorrhoeae
cgaaccggctgccgcatcgg

SEQ ID NO: 52196 - DNA, 20 bp, Neisseria gonorrhoeae
acatccgatgcggcagccgg

SEQ ID NO: 52197 - DNA, 20 bp, Neisseria gonorrhoeae
ggaagctgtgttttcgtttg

SEQ ID NO: 52198 - DNA, 20 bp, Neisseria gonorrhoeae
tcgtttgccggttcggaagc

SEQ ID NO: 52199 - DNA, 20 bp, Neisseria gonorrhoeae
aaccggcgcgattacgaagc

SEQ ID NO: 52200 - DNA, 20 bp, Neisseria gonorrhoeae
cgaagcggcggaagccaatc

SEQ ID NO: 52201 - DNA, 20 bp, Neisseria gonorrhoeae
atgcggcggcgaagatgaat

SEQ ID NO: 52202 - DNA, 20 bp, Neisseria gonorrhoeae
cgcgcctcgtgcgtctgcaa

SEQ ID NO: 52203 - DNA, 20 bp, Neisseria gonorrhoeae
cagacgcacgaggcgcgtaa

SEQ ID NO: 52204 - DNA, 20 bp, Neisseria gonorrhoeae
ggggtaaggcaaaaggctac

SEQ ID NO: 52205 - DNA, 20 bp, Neisseria gonorrhoeae
gggtaaggcaaaaggctacc

SEQ ID NO: 52206 - DNA, 20 bp, Neisseria gonorrhoeae
aagcgagtattgcactgaag

SEQ ID NO: 52207 - DNA, 20 bp, Neisseria gonorrhoeae
cactgaagccgagtattccg

SEQ ID NO: 52208 - DNA, 20 bp, Neisseria gonorrhoeae
cggcgcgtttggtgttggca

SEQ ID NO: 52209 - DNA, 20 bp, Neisseria gonorrhoeae
aacctcggacacggcatcaa

SEQ ID NO: 52210 - DNA, 20 bp, Neisseria gonorrhoeae
gtcgacaccgtgcacgagct

SEQ ID NO: 52211 - DNA, 20 bp, Neisseria gonorrhoeae
tggcgtgttcggggtcggcg

SEQ ID NO: 52212 - DNA, 20 bp, Neisseria gonorrhoeae
ggcgtgttcggggtcggcgt

SEQ ID NO: 52213 - DNA, 20 bp, Neisseria gonorrhoeae
gcgtgttcggggtcggcgtg

SEQ ID NO: 52214 - DNA, 20 bp, Neisseria gonorrhoeae
tacgatgacatcgccgatat

SEQ ID NO: 52215 - DNA, 20 bp, Neisseria gonorrhoeae
ttacggaaactttcgcaagc

SEQ ID NO: 52216 - DNA, 20 bp, Neisseria gonorrhoeae
tacggaaactttcgcaagcc

SEQ ID NO: 52217 - DNA, 20 bp, Neisseria gonorrhoeae
acggaaactttcgcaagccc

SEQ ID NO: 52218 - DNA, 20 bp, Neisseria gonorrhoeae
cggaaactttcgcaagccca

SEQ ID NO: 52219 - DNA, 20 bp, Neisseria gonorrhoeae
caatcttgggcggcggacgc

SEQ ID NO: 52220 - DNA, 20 bp, Neisseria gonorrhoeae
ggcggcggacgcttcgaccg

SEQ ID NO: 52221 - DNA, 20 bp, Neisseria gonorrhoeae
gaccgtccaatccctctccg

SEQ ID NO: 52222 - DNA, 20 bp, Neisseria gonorrhoeae
ccgctgccgaagtgccgcgc

SEQ ID NO: 52223 - DNA, 20 bp, Neisseria gonorrhoeae
ggcagcggtaacggcggaga

SEQ ID NO: 52224 - DNA, 20 bp, Neisseria gonorrhoeae
tccgcgcagtttgaagtagc

SEQ ID NO: 52225 - DNA, 20 bp, Neisseria gonorrhoeae
gaagtagcgcgcggcggcaa

SEQ ID NO: 52226 - DNA, 20 bp, Neisseria gonorrhoeae
aagtagcgcgcggcggcaac

SEQ ID NO: 52227 - DNA, 20 bp, Neisseria gonorrhoeae
ccttcaggcactgatttacg

SEQ ID NO: 52228 - DNA, 20 bp, Neisseria gonorrhoeae
aggcactgatttacgccgtt

SEQ ID NO: 52229 - DNA, 20 bp, Neisseria gonorrhoeae
cgtttgagcatcgttatgcc

SEQ ID NO: 52230 - DNA, 20 bp, Neisseria gonorrhoeae
gagcatcgttatgccgtctt

SEQ ID NO: 52231 - DNA, 20 bp, Neisseria gonorrhoeae
agcatcgttatgccgtcttt

SEQ ID NO: 52232 - DNA, 20 bp, Neisseria gonorrhoeae
tgccgtctttttcacacgca

SEQ ID NO: 52233 - DNA, 20 bp, Neisseria gonorrhoeae
ttcacacgcataggtacggc

SEQ ID NO: 52234 - DNA, 20 bp, Neisseria gonorrhoeae
gcggattgtttcatcgcctt

SEQ ID NO: 52235 - DNA, 20 bp, Neisseria gonorrhoeae
tttcatcgccttgcgggttt

SEQ ID NO: 52236 - DNA, 20 bp, Neisseria gonorrhoeae
catcgccttgcgggttttcc

SEQ ID NO: 52237 - DNA, 20 bp, Neisseria gonorrhoeae
atcgccttgcgggttttccg

SEQ ID NO: 52238 - DNA, 20 bp, Neisseria gonorrhoeae
cgggttttccgtgccgtcga

SEQ ID NO: 52239 - DNA, 20 bp, Neisseria gonorrhoeae
gttgacggctgcgaagtaga

SEQ ID NO: 52240 - DNA, 20 bp, Neisseria gonorrhoeae
acggctgcgaagtagagcat

SEQ ID NO: 52241 - DNA, 20 bp, Neisseria gonorrhoeae
agtacgccgataccgctgtc

SEQ ID NO: 52242 - DNA, 20 bp, Neisseria gonorrhoeae
ccactcctatgctctacttc

SEQ ID NO: 52243 - DNA, 20 bp, Neisseria gonorrhoeae
gcagccgtcaacgaatgcgg

SEQ ID NO: 52244 - DNA, 20 bp, Neisseria gonorrhoeae
ttcgggcagccccatctgca

SEQ ID NO: 52245 - DNA, 20 bp, Neisseria gonorrhoeae
gggcagccccatctgcatag

SEQ ID NO: 52246 - DNA, 20 bp, Neisseria gonorrhoeae
tctccggcatcgctatgcag

SEQ ID NO: 52247 - DNA, 20 bp, Neisseria gonorrhoeae
ctccggcatcgctatgcaga

SEQ ID NO: 52248 - DNA, 20 bp, Neisseria gonorrhoeae
tccggcatcgctatgcagat

SEQ ID NO: 52249 - DNA, 20 bp, Neisseria gonorrhoeae
gaaatgccgaaggcggtttt

SEQ ID NO: 52250 - DNA, 20 bp, Neisseria gonorrhoeae
tgattttggagccgaatatc

SEQ ID NO: 52251 - DNA, 20 bp, Neisseria gonorrhoeae
gattttggagccgaatatcc

SEQ ID NO: 52252 - DNA, 20 bp, Neisseria gonorrhoeae
attttggagccgaatatcca

SEQ ID NO: 52253 - DNA, 20 bp, Neisseria gonorrhoeae
tggagccgaatatccacgcg

SEQ ID NO: 52254 - DNA, 20 bp, Neisseria gonorrhoeae
ctcgcctgacgatgacggtt

SEQ ID NO: 52255 - DNA, 20 bp, Neisseria gonorrhoeae
atctgcccgccgagcagaaa

SEQ ID NO: 52256 - DNA, 20 bp, Neisseria gonorrhoeae
tctgcccgccgagcagaaag

SEQ ID NO: 52257 - DNA, 20 bp, Neisseria gonorrhoeae
ctgctcggcgggcagataaa

SEQ ID NO: 52258 - DNA, 20 bp, Neisseria gonorrhoeae
tgctcggcgggcagataaac

SEQ ID NO: 52259 - DNA, 20 bp, Neisseria gonorrhoeae
gtccgatgcgcgggaacgca

SEQ ID NO: 52260 - DNA, 20 bp, Neisseria gonorrhoeae
ccgcgcatcggacgaattgg

SEQ ID NO: 52261 - DNA, 20 bp, Neisseria gonorrhoeae
gcacggattttcggcacgca

SEQ ID NO: 52262 - DNA, 20 bp, Neisseria gonorrhoeae
tcggcacgcaggcaggcatc

SEQ ID NO: 52263 - DNA, 20 bp, Neisseria gonorrhoeae
cggcacgcaggcaggcatcg

SEQ ID NO: 52264 - DNA, 20 bp, Neisseria gonorrhoeae
ggaacgccgttgtcgagcag

SEQ ID NO: 52265 - DNA, 20 bp, Neisseria gonorrhoeae
tcgagcaggtgttgttcggc

SEQ ID NO: 52266 - DNA, 20 bp, Neisseria gonorrhoeae
ttcggcggcaaggatttgtc

SEQ ID NO: 52267 - DNA, 20 bp, Neisseria gonorrhoeae
ggcggcaaggatttgtcggg

SEQ ID NO: 52268 - DNA, 20 bp, Neisseria gonorrhoeae
gtcgggcggactcggtttgc

SEQ ID NO: 52269 - DNA, 20 bp, Neisseria gonorrhoeae
atgtcgtccgaagtcaggct

SEQ ID NO: 52270 - DNA, 20 bp, Neisseria gonorrhoeae
tatggcggcgacgcggctgc

SEQ ID NO: 52271 - DNA, 20 bp, Neisseria gonorrhoeae
atggcggcgacgcggctgcc

SEQ ID NO: 52272 - DNA, 20 bp, Neisseria gonorrhoeae
tggcggcgacgcggctgccg

SEQ ID NO: 52273 - DNA, 20 bp, Neisseria gonorrhoeae
tgtgccagcggcaggccgag

SEQ ID NO: 52274 - DNA, 20 bp, Neisseria gonorrhoeae
gaccgaaccgtcgggctgcg

SEQ ID NO: 52275 - DNA, 20 bp, Neisseria gonorrhoeae
accgaaccgtcgggctgcgg

SEQ ID NO: 52276 - DNA, 20 bp, Neisseria gonorrhoeae
cagcggcatcccgatatgcc

SEQ ID NO: 52277 - DNA, 20 bp, Neisseria gonorrhoeae
ggtcaaactcgccgccggct

SEQ ID NO: 52278 - DNA, 20 bp, Neisseria gonorrhoeae
gtcggcgtgtttaagcgcga

SEQ ID NO: 52279 - DNA, 20 bp, Neisseria gonorrhoeae
aagcgcgataaaggcccggg

SEQ ID NO: 52280 - DNA, 20 bp, Neisseria gonorrhoeae
agcgcgataaaggcccgggc

SEQ ID NO: 52281 - DNA, 20 bp, Neisseria gonorrhoeae
atcgcgcttaaacacgccga

SEQ ID NO: 52282 - DNA, 20 bp, Neisseria gonorrhoeae
tcgcgcttaaacacgccgac

SEQ ID NO: 52283 - DNA, 20 bp, Neisseria gonorrhoeae
agtttcgacttacgcagctt

SEQ ID NO: 52284 - DNA, 20 bp, Neisseria gonorrhoeae
cgacttacgcagctttatcg

SEQ ID NO: 52285 - DNA, 20 bp, Neisseria gonorrhoeae
gacttacgcagctttatcgg

SEQ ID NO: 52286 - DNA, 20 bp, Neisseria gonorrhoeae
cgcagctttatcgggcgttt

SEQ ID NO: 52287 - DNA, 20 bp, Neisseria gonorrhoeae
atcgggcgtttgcccgccgt

SEQ ID NO: 52288 - DNA, 20 bp, Neisseria gonorrhoeae
gattgcttcatcggttcggg

SEQ ID NO: 52289 - DNA, 20 bp, Neisseria gonorrhoeae
cttcatcggttcgggcgttg

SEQ ID NO: 52290 - DNA, 20 bp, Neisseria gonorrhoeae
atcggttcgggcgttgtcgt

SEQ ID NO: 52291 - DNA, 20 bp, Neisseria gonorrhoeae
gggcgttgtcgtttcccccg

SEQ ID NO: 52292 - DNA, 20 bp, Neisseria gonorrhoeae
tcgtttcccccgaagccctg

SEQ ID NO: 52293 - DNA, 20 bp, Neisseria gonorrhoeae
gtcttcgtaggcagggccga

SEQ ID NO: 52294 - DNA, 20 bp, Neisseria gonorrhoeae
tcttcgtaggcagggccgat

SEQ ID NO: 52295 - DNA, 20 bp, Neisseria gonorrhoeae
gtaggcagggccgatgccgc

SEQ ID NO: 52296 - DNA, 20 bp, Neisseria gonorrhoeae
tgcctttgccgcgcgatgct

SEQ ID NO: 52297 - DNA, 20 bp, Neisseria gonorrhoeae
gcctttgccgcgcgatgctt

SEQ ID NO: 52298 - DNA, 20 bp, Neisseria gonorrhoeae
ccgacgtgcgccatttcgtg

SEQ ID NO: 52299 - DNA, 20 bp, Neisseria gonorrhoeae
cgtgcgccaacacggcttcc

SEQ ID NO: 52300 - DNA, 20 bp, Neisseria gonorrhoeae
gtgcgccaacacggcttcca

SEQ ID NO: 52301 - DNA, 20 bp, Neisseria gonorrhoeae
cacttcgtcgcgcgtcatat

SEQ ID NO: 52302 - DNA, 20 bp, Neisseria gonorrhoeae
gtcgcgcgtcatatggtcga

SEQ ID NO: 52303 - DNA, 20 bp, Neisseria gonorrhoeae
tgacacccgccgaagccttg

SEQ ID NO: 52304 - DNA, 20 bp, Neisseria gonorrhoeae
gcggcgggttcgacttatct

SEQ ID NO: 52305 - DNA, 20 bp, Neisseria gonorrhoeae
gacttatctggtgatgggcc

SEQ ID NO: 52306 - DNA, 20 bp, Neisseria gonorrhoeae
tctggtgatgggccgccccg

SEQ ID NO: 52307 - DNA, 20 bp, Neisseria gonorrhoeae
cccgagccgccgatccggtc

SEQ ID NO: 52308 - DNA, 20 bp, Neisseria gonorrhoeae
acggcaaaggcgaaatcttc

SEQ ID NO: 52309 - DNA, 20 bp, Neisseria gonorrhoeae
cggcaaaggcgaaatcttcc

SEQ ID NO: 52310 - DNA, 20 bp, Neisseria gonorrhoeae
cgcgaagagcgcgaactcga

SEQ ID NO: 52311 - DNA, 20 bp, Neisseria gonorrhoeae
atgtgtacggctactccaaa

SEQ ID NO: 52312 - DNA, 20 bp, Neisseria gonorrhoeae
ggagtagccgtacacattaa

SEQ ID NO: 52313 - DNA, 20 bp, Neisseria gonorrhoeae
ggcggcggcttcgagtgcgc

SEQ ID NO: 52314 - DNA, 20 bp, Neisseria gonorrhoeae
gagtgcgccttgcgtgtagc

SEQ ID NO: 52315 - DNA, 20 bp, Neisseria gonorrhoeae
cgtgtagcggacttggtgga

SEQ ID NO: 52316 - DNA, 20 bp, Neisseria gonorrhoeae
gtggaaggcttcgaacatcg

SEQ ID NO: 52317 - DNA, 20 bp, Neisseria gonorrhoeae
gaacatcggtttcaagccgc

SEQ ID NO: 52318 - DNA, 20 bp, Neisseria gonorrhoeae
ggtatgcaccatcgcccgct

SEQ ID NO: 52319 - DNA, 20 bp, Neisseria gonorrhoeae
gaagccgagcgtgggccggg

SEQ ID NO: 52320 - DNA, 20 bp, Neisseria gonorrhoeae
cgaccgtgtctaaaaggtgg

SEQ ID NO: 52321 - DNA, 20 bp, Neisseria gonorrhoeae
gaccgtgtctaaaaggtggt

SEQ ID NO: 52322 - DNA, 20 bp, Neisseria gonorrhoeae
ccgaccaccttttagacacg

SEQ ID NO: 52323 - DNA, 20 bp, Neisseria gonorrhoeae
acaaagaccaaatccgcgcc

SEQ ID NO: 52324 - DNA, 20 bp, Neisseria gonorrhoeae
ggtgtggttgccgaagacaa

SEQ ID NO: 52325 - DNA, 20 bp, Neisseria gonorrhoeae
ccgaagacaatgcccaattg

SEQ ID NO: 52326 - DNA, 20 bp, Neisseria gonorrhoeae
gaaaagggcagcctggtgat

SEQ ID NO: 52327 - DNA, 20 bp, Neisseria gonorrhoeae
cccgcccatcatcaccaggc

SEQ ID NO: 52328 - DNA, 20 bp, Neisseria gonorrhoeae
gaaacggatgcgttcgggca

SEQ ID NO: 52329 - DNA, 20 bp, Neisseria gonorrhoeae
aaacggatgcgttcgggcaa

SEQ ID NO: 52330 - DNA, 20 bp, Neisseria gonorrhoeae
gggcaaaatgcgccccggca

SEQ ID NO: 52331 - DNA, 20 bp, Neisseria gonorrhoeae
tttgaagtggcgcggcgcga

SEQ ID NO: 52332 - DNA, 20 bp, Neisseria gonorrhoeae
gaagtggcgcggcgcgattg

SEQ ID NO: 52333 - DNA, 20 bp, Neisseria gonorrhoeae
ttgccagccgcctcaaagac

SEQ ID NO: 52334 - DNA, 20 bp, Neisseria gonorrhoeae
ccagccgcctcaaagaccgt

SEQ ID NO: 52335 - DNA, 20 bp, Neisseria gonorrhoeae
ttaccgtccgaccatcgtgt

SEQ ID NO: 52336 - DNA, 20 bp, Neisseria gonorrhoeae
taccgtccgaccatcgtgtt

SEQ ID NO: 52337 - DNA, 20 bp, Neisseria gonorrhoeae
accgtccgaccatcgtgttt

SEQ ID NO: 52338 - DNA, 20 bp, Neisseria gonorrhoeae
gggggcagggctttgcgccg

SEQ ID NO: 52339 - DNA, 20 bp, Neisseria gonorrhoeae
ggggcagggctttgcgccgc

SEQ ID NO: 52340 - DNA, 20 bp, Neisseria gonorrhoeae
gcgccgccgagctttaccga

SEQ ID NO: 52341 - DNA, 20 bp, Neisseria gonorrhoeae
cgccgccgagctttaccgac

SEQ ID NO: 52342 - DNA, 20 bp, Neisseria gonorrhoeae
accgacgagttccacgtcgt

SEQ ID NO: 52343 - DNA, 20 bp, Neisseria gonorrhoeae
cggggcttcgggatgttggg

SEQ ID NO: 52344 - DNA, 20 bp, Neisseria gonorrhoeae
gggatgttgggcgcgggcat

SEQ ID NO: 52345 - DNA, 20 bp, Neisseria gonorrhoeae
ggcgcgggcatagtcgatga

SEQ ID NO: 52346 - DNA, 20 bp, Neisseria gonorrhoeae
gccttatccggcttttcctt

SEQ ID NO: 52347 - DNA, 20 bp, Neisseria gonorrhoeae
ccttatccggcttttccttc

SEQ ID NO: 52348 - DNA, 20 bp, Neisseria gonorrhoeae
atgtccacggcggtttggcg

SEQ ID NO: 52349 - DNA, 20 bp, Neisseria gonorrhoeae
ggcgcgtgtcgggcaggtag

SEQ ID NO: 52350 - DNA, 20 bp, Neisseria gonorrhoeae
gcgcgtgtcgggcaggtagg

SEQ ID NO: 52351 - DNA, 20 bp, Neisseria gonorrhoeae
ggcggcggttcgtttgcacg

SEQ ID NO: 52352 - DNA, 20 bp, Neisseria gonorrhoeae
gtttgcacgctggacagaca

SEQ ID NO: 52353 - DNA, 20 bp, Neisseria gonorrhoeae
ctgcaaatgcgcggaattcc

SEQ ID NO: 52354 - DNA, 20 bp, Neisseria gonorrhoeae
tgcaaatgcgcggaattccg

SEQ ID NO: 52355 - DNA, 20 bp, Neisseria gonorrhoeae
cggtctgtgcccacatcggt

SEQ ID NO: 52356 - DNA, 20 bp, Neisseria gonorrhoeae
gccttcggcggatataaagt

SEQ ID NO: 52357 - DNA, 20 bp, Neisseria gonorrhoeae
atatccgccgaaggcaaaca

SEQ ID NO: 52358 - DNA, 20 bp, Neisseria gonorrhoeae
acgctgttgggcggtgaaac

SEQ ID NO: 52359 - DNA, 20 bp, Neisseria gonorrhoeae
cgctgttgggcggtgaaacg

SEQ ID NO: 52360 - DNA, 20 bp, Neisseria gonorrhoeae
ggcggtgaaacggctttgca

SEQ ID NO: 52361 - DNA, 20 bp, Neisseria gonorrhoeae
gcagaaagggcaggcgggaa

SEQ ID NO: 52362 - DNA, 20 bp, Neisseria gonorrhoeae
cagaaagggcaggcgggaac

SEQ ID NO: 52363 - DNA, 20 bp, Neisseria gonorrhoeae
aaaaaagtgtccgcgccgga

SEQ ID NO: 52364 - DNA, 20 bp, Neisseria gonorrhoeae
gacaaaggcgtgctggcggc

SEQ ID NO: 52365 - DNA, 20 bp, Neisseria gonorrhoeae
ggcagccgccgcagccgcca

SEQ ID NO: 52366 - DNA, 20 bp, Neisseria gonorrhoeae
gtcgaacaggtattccggcg

SEQ ID NO: 52367 - DNA, 20 bp, Neisseria gonorrhoeae
tcgaacaggtattccggcgc

SEQ ID NO: 52368 - DNA, 20 bp, Neisseria gonorrhoeae
taaattgtgtgagtgtttca

SEQ ID NO: 52369 - DNA, 20 bp, Neisseria gonorrhoeae
tgtgagtgtttcagcctgcc

SEQ ID NO: 52370 - DNA, 20 bp, Neisseria gonorrhoeae
cagcctgccgattatacgct

SEQ ID NO: 52371 - DNA, 20 bp, Neisseria gonorrhoeae
agcctgccgattatacgctt

SEQ ID NO: 52372 - DNA, 20 bp, Neisseria gonorrhoeae
tacgcttagggtgtctgatc

SEQ ID NO: 52373 - DNA, 20 bp, Neisseria gonorrhoeae
tttgcgcactttggcatcca

SEQ ID NO: 52374 - DNA, 20 bp, Neisseria gonorrhoeae
gcgcactttggcatccagcg

SEQ ID NO: 52375 - DNA, 20 bp, Neisseria gonorrhoeae
cgcactttggcatccagcgc

SEQ ID NO: 52376 - DNA, 20 bp, Neisseria gonorrhoeae
ggcatccagcgcgccgaagg

SEQ ID NO: 52377 - DNA, 20 bp, Neisseria gonorrhoeae
gcatccagcgcgccgaaggg

SEQ ID NO: 52378 - DNA, 20 bp, Neisseria gonorrhoeae
ccggcagcagcacgcggcgg

SEQ ID NO: 52379 - DNA, 20 bp, Neisseria gonorrhoeae
cggcagcagcacgcggcgga

SEQ ID NO: 52380 - DNA, 20 bp, Neisseria gonorrhoeae
tgaaacggtttgcgcccaaa

SEQ ID NO: 52381 - DNA, 20 bp, Neisseria gonorrhoeae
gcgcccaaagtcgccgccgc

SEQ ID NO: 52382 - DNA, 20 bp, Neisseria gonorrhoeae
cgcccaaagtcgccgccgct

SEQ ID NO: 52383 - DNA, 20 bp, Neisseria gonorrhoeae
ccacacgtcgcaagtcaaga

SEQ ID NO: 52384 - DNA, 20 bp, Neisseria gonorrhoeae
tcagtggtcagcggagttgc

SEQ ID NO: 52385 - DNA, 20 bp, Neisseria gonorrhoeae
cagtggtcagcggagttgcc

SEQ ID NO: 52386 - DNA, 20 bp, Neisseria gonorrhoeae
agtggtcagcggagttgccg

SEQ ID NO: 52387 - DNA, 20 bp, Neisseria gonorrhoeae
ccgcgttggaagtggaaacc

SEQ ID NO: 52388 - DNA, 20 bp, Neisseria gonorrhoeae
gctttcggcgacaaaaacga

SEQ ID NO: 52389 - DNA, 20 bp, Neisseria gonorrhoeae
cggcgacaaaaacgacaata

SEQ ID NO: 52390 - DNA, 20 bp, Neisseria gonorrhoeae
ggcgacaaaaacgacaataa

SEQ ID NO: 52391 - DNA, 20 bp, Neisseria gonorrhoeae
tgcggatgtttttctccgta

SEQ ID NO: 52392 - DNA, 20 bp, Neisseria gonorrhoeae
ttctccgtaacgtggtattg

SEQ ID NO: 52393 - DNA, 20 bp, Neisseria gonorrhoeae
tctttttgcgcttttgaccg

SEQ ID NO: 52394 - DNA, 20 bp, Neisseria gonorrhoeae
ctttttgcgcttttgaccgg

SEQ ID NO: 52395 - DNA, 20 bp, Neisseria gonorrhoeae
tttttgcgcttttgaccggg

SEQ ID NO: 52396 - DNA, 20 bp, Neisseria gonorrhoeae
ttgcgcttttgaccgggcgg

SEQ ID NO: 52397 - DNA, 20 bp, Neisseria gonorrhoeae
tgcgcttttgaccgggcgga

SEQ ID NO: 52398 - DNA, 20 bp, Neisseria gonorrhoeae
tccggatgtttcggggtgta

SEQ ID NO: 52399 - DNA, 20 bp, Neisseria gonorrhoeae
cggggtgtagctcttcatct

SEQ ID NO: 52400 - DNA, 20 bp, Neisseria gonorrhoeae
ggggtgtagctcttcatctt

SEQ ID NO: 52401 - DNA, 20 bp, Neisseria gonorrhoeae
atcttgttgctgatggcgga

SEQ ID NO: 52402 - DNA, 20 bp, Neisseria gonorrhoeae
ttgctgatggcggaaatgtt

SEQ ID NO: 52403 - DNA, 20 bp, Neisseria gonorrhoeae
tttaccctccggcacttccg

SEQ ID NO: 52404 - DNA, 20 bp, Neisseria gonorrhoeae
accctccggcacttccgcat

SEQ ID NO: 52405 - DNA, 20 bp, Neisseria gonorrhoeae
ccctccggcacttccgcatc

SEQ ID NO: 52406 - DNA, 20 bp, Neisseria gonorrhoeae
cgcatcgccgtgcacccgcc

SEQ ID NO: 52407 - DNA, 20 bp, Neisseria gonorrhoeae
ttcttccgcattcaggtgcc

SEQ ID NO: 52408 - DNA, 20 bp, Neisseria gonorrhoeae
tctgcggctaaaatctacaa

SEQ ID NO: 52409 - DNA, 20 bp, Neisseria gonorrhoeae
ctatgcccgctatgaatttg

SEQ ID NO: 52410 - DNA, 20 bp, Neisseria gonorrhoeae
atagcgggcataggaatgcc

SEQ ID NO: 52411 - DNA, 20 bp, Neisseria gonorrhoeae
ttgtagattttagccgcaga

SEQ ID NO: 52412 - DNA, 20 bp, Neisseria gonorrhoeae
tgtagattttagccgcagat

SEQ ID NO: 52413 - DNA, 20 bp, Neisseria gonorrhoeae
caaaccgctggtgcgagatg

SEQ ID NO: 52414 - DNA, 20 bp, Neisseria gonorrhoeae
ccgtttggcgccgccgttcc

SEQ ID NO: 52415 - DNA, 20 bp, Neisseria gonorrhoeae
ggcgccgccgttcccagcat

SEQ ID NO: 52416 - DNA, 20 bp, Neisseria gonorrhoeae
gcgccgccgttcccagcatc

SEQ ID NO: 52417 - DNA, 20 bp, Neisseria gonorrhoeae
ccagcatctcgcaccagcgg

SEQ ID NO: 52418 - DNA, 20 bp, Neisseria gonorrhoeae
gcggcagtcggcaaagacgc

SEQ ID NO: 52419 - DNA, 20 bp, Neisseria gonorrhoeae
ggccagaccgttgaggattt

SEQ ID NO: 52420 - DNA, 20 bp, Neisseria gonorrhoeae
gtttcacgctttaccgcgtc

SEQ ID NO: 52421 - DNA, 20 bp, Neisseria gonorrhoeae
cacgctttaccgcgtctttg

SEQ ID NO: 52422 - DNA, 20 bp, Neisseria gonorrhoeae
acgctttaccgcgtctttgc

SEQ ID NO: 52423 - DNA, 20 bp, Neisseria gonorrhoeae
tcctgccttaccccgtatcg

SEQ ID NO: 52424 - DNA, 20 bp, Neisseria gonorrhoeae
ccccgtatcggcaaaccgtt

SEQ ID NO: 52425 - DNA, 20 bp, Neisseria gonorrhoeae
ttggcggatttggcgcaaca

SEQ ID NO: 52426 - DNA, 20 bp, Neisseria gonorrhoeae
gcggatttggcgcaacaggg

SEQ ID NO: 52427 - DNA, 20 bp, Neisseria gonorrhoeae
ggcgcaacagggcggtcagg

SEQ ID NO: 52428 - DNA, 20 bp, Neisseria gonorrhoeae
ccaaagccaacaaagacggc

SEQ ID NO: 52429 - DNA, 20 bp, Neisseria gonorrhoeae
ggacaacgccctgaaggttg

SEQ ID NO: 52430 - DNA, 20 bp, Neisseria gonorrhoeae
gacaacgccctgaaggttgc

SEQ ID NO: 52431 - DNA, 20 bp, Neisseria gonorrhoeae
cgctggacgcgcttcaaggc

SEQ ID NO: 52432 - DNA, 20 bp, Neisseria gonorrhoeae
aagcgcgtccagcgcaacct

SEQ ID NO: 52433 - DNA, 20 bp, Neisseria gonorrhoeae
cgttcggcatcggtgcgaag

SEQ ID NO: 52434 - DNA, 20 bp, Neisseria gonorrhoeae
gttcggcatcggtgcgaagt

SEQ ID NO: 52435 - DNA, 20 bp, Neisseria gonorrhoeae
ggcatcggtgcgaagtcgca

SEQ ID NO: 52436 - DNA, 20 bp, Neisseria gonorrhoeae
gcaggctgaaatcaggcggc

SEQ ID NO: 52437 - DNA, 20 bp, Neisseria gonorrhoeae
caggctgaaatcaggcggcg

SEQ ID NO: 52438 - DNA, 20 bp, Neisseria gonorrhoeae
cccgcgccgcaacccgccct

SEQ ID NO: 52439 - DNA, 20 bp, Neisseria gonorrhoeae
ggatggcccgcgcgccgtag

SEQ ID NO: 52440 - DNA, 20 bp, Neisseria gonorrhoeae
gatggcccgcgcgccgtagc

SEQ ID NO: 52441 - DNA, 20 bp, Neisseria gonorrhoeae
ccgcttatgggcagggcggg

SEQ ID NO: 52442 - DNA, 20 bp, Neisseria gonorrhoeae
tgggcagggcgggttgcggc

SEQ ID NO: 52443 - DNA, 20 bp, Neisseria gonorrhoeae
ctccaaaggaagttagaatg

SEQ ID NO: 52444 - DNA, 20 bp, Neisseria gonorrhoeae
tccaaaggaagttagaatga

SEQ ID NO: 52445 - DNA, 20 bp, Neisseria gonorrhoeae
gaatgaaatggcactagggc

SEQ ID NO: 52446 - DNA, 20 bp, Neisseria gonorrhoeae
gacgatgttgaaacatcagt

SEQ ID NO: 52447 - DNA, 20 bp, Neisseria gonorrhoeae
aaacatcagtaattcgcagt

SEQ ID NO: 52448 - DNA, 20 bp, Neisseria gonorrhoeae
ggcggctgcatcatcattga

SEQ ID NO: 52449 - DNA, 20 bp, Neisseria gonorrhoeae
acgacccgcacaaagcagat

SEQ ID NO: 52450 - DNA, 20 bp, Neisseria gonorrhoeae
tgaaaccagtcgatgacgtt

SEQ ID NO: 52451 - DNA, 20 bp, Neisseria gonorrhoeae
gaaaccagtcgatgacgttc

SEQ ID NO: 52452 - DNA, 20 bp, Neisseria gonorrhoeae
aaaccagtcgatgacgttct

SEQ ID NO: 52453 - DNA, 20 bp, Neisseria gonorrhoeae
caaacggcttggattttggc

SEQ ID NO: 52454 - DNA, 20 bp, Neisseria gonorrhoeae
gattttggcgattggtcggg

SEQ ID NO: 52455 - DNA, 20 bp, Neisseria gonorrhoeae
tggcgattggtcgggattgt

SEQ ID NO: 52456 - DNA, 20 bp, Neisseria gonorrhoeae
ggcgattggtcgggattgtc

SEQ ID NO: 52457 - DNA, 20 bp, Neisseria gonorrhoeae
gcgattggtcgggattgtcc

SEQ ID NO: 52458 - DNA, 20 bp, Neisseria gonorrhoeae
cggcaacgcacgcgcccgaa

SEQ ID NO: 52459 - DNA, 20 bp, Neisseria gonorrhoeae
ggcaacgcacgcgcccgaac

SEQ ID NO: 52460 - DNA, 20 bp, Neisseria gonorrhoeae
cccgaacggaaacggcgatg

SEQ ID NO: 52461 - DNA, 20 bp, Neisseria gonorrhoeae
cttcccagcctatcaggttg

SEQ ID NO: 52462 - DNA, 20 bp, Neisseria gonorrhoeae
ccagcctatcaggttgccca

SEQ ID NO: 52463 - DNA, 20 bp, Neisseria gonorrhoeae
aaatcaacgtggaagacgac

SEQ ID NO: 52464 - DNA, 20 bp, Neisseria gonorrhoeae
ttcggggcgcatatcgttga

SEQ ID NO: 52465 - DNA, 20 bp, Neisseria gonorrhoeae
tcggggcgcatatcgttgac

SEQ ID NO: 52466 - DNA, 20 bp, Neisseria gonorrhoeae
cggggcgcatatcgttgacc

SEQ ID NO: 52467 - DNA, 20 bp, Neisseria gonorrhoeae
ggggcgcatatcgttgaccc

SEQ ID NO: 52468 - DNA, 20 bp, Neisseria gonorrhoeae
cgtttccggtattgaggcag

SEQ ID NO: 52469 - DNA, 20 bp, Neisseria gonorrhoeae
ccggtattgaggcaggcaaa

SEQ ID NO: 52470 - DNA, 20 bp, Neisseria gonorrhoeae
cggtattgaggcaggcaaaa

SEQ ID NO: 52471 - DNA, 20 bp, Neisseria gonorrhoeae
aggcaggcaaaaaagtaacc

SEQ ID NO: 52472 - DNA, 20 bp, Neisseria gonorrhoeae
cggctgttcgcggcgcggtt

SEQ ID NO: 52473 - DNA, 20 bp, Neisseria gonorrhoeae
ttcagccttttcggcttcgg

SEQ ID NO: 52474 - DNA, 20 bp, Neisseria gonorrhoeae
agccttttcggcttcggcag

SEQ ID NO: 52475 - DNA, 20 bp, Neisseria gonorrhoeae
tcggcttcggcaggttcggc

SEQ ID NO: 52476 - DNA, 20 bp, Neisseria gonorrhoeae
cggcttcggcaggttcggct

SEQ ID NO: 52477 - DNA, 20 bp, Neisseria gonorrhoeae
ggcttcggcaggttcggctt

SEQ ID NO: 52478 - DNA, 20 bp, Neisseria gonorrhoeae
acggcgtgtcggcggcggcg

SEQ ID NO: 52479 - DNA, 20 bp, Neisseria gonorrhoeae
tgtcgggcggtacgacggca

SEQ ID NO: 52480 - DNA, 20 bp, Neisseria gonorrhoeae
ccgttgccgtcgtaccgccc

SEQ ID NO: 52481 - DNA, 20 bp, Neisseria gonorrhoeae
ccgtcgtaccgcccgacata

SEQ ID NO: 52482 - DNA, 20 bp, Neisseria gonorrhoeae
cgccgccgccgacacgccgt

SEQ ID NO: 52483 - DNA, 20 bp, Neisseria gonorrhoeae
cggcatcgcgcatgagtatg

SEQ ID NO: 52484 - DNA, 20 bp, Neisseria gonorrhoeae
cgcgggcagtgtcaacgtta

SEQ ID NO: 52485 - DNA, 20 bp, Neisseria gonorrhoeae
gcgggcagtgtcaacgttaa

SEQ ID NO: 52486 - DNA, 20 bp, Neisseria gonorrhoeae
aggcttcgctgcgccaggtc

SEQ ID NO: 52487 - DNA, 20 bp, Neisseria gonorrhoeae
gctgcgccaggtcaggcagg

SEQ ID NO: 52488 - DNA, 20 bp, Neisseria gonorrhoeae
gccgccgtgatggacgtttc

SEQ ID NO: 52489 - DNA, 20 bp, Neisseria gonorrhoeae
ccgccgtgatggacgtttcg

SEQ ID NO: 52490 - DNA, 20 bp, Neisseria gonorrhoeae
cgggcttgaaacgcagggag

SEQ ID NO: 52491 - DNA, 20 bp, Neisseria gonorrhoeae
gggcttgaaacgcagggagc

SEQ ID NO: 52492 - DNA, 20 bp, Neisseria gonorrhoeae
aaacgcagggagcaggaagc

SEQ ID NO: 52493 - DNA, 20 bp, Neisseria gonorrhoeae
agggcctgcaatgggcggag

SEQ ID NO: 52494 - DNA, 20 bp, Neisseria gonorrhoeae
gacggcgcgcgggtcaaaat

SEQ ID NO: 52495 - DNA, 20 bp, Neisseria gonorrhoeae
tttgatgccggactgcgccc

SEQ ID NO: 52496 - DNA, 20 bp, Neisseria gonorrhoeae
ttgatgccggactgcgcccc

SEQ ID NO: 52497 - DNA, 20 bp, Neisseria gonorrhoeae
tgatgccggactgcgccccg

SEQ ID NO: 52498 - DNA, 20 bp, Neisseria gonorrhoeae
tgaacgtttccagcccgcgc

SEQ ID NO: 52499 - DNA, 20 bp, Neisseria gonorrhoeae
gaacgtttccagcccgcgca

SEQ ID NO: 52500 - DNA, 20 bp, Neisseria gonorrhoeae
aacgtttccagcccgcgcaa

SEQ ID NO: 52501 - DNA, 20 bp, Neisseria gonorrhoeae
ccagcccgcgcaacatttat

SEQ ID NO: 52502 - DNA, 20 bp, Neisseria gonorrhoeae
cagcccgcgcaacatttatc

SEQ ID NO: 52503 - DNA, 20 bp, Neisseria gonorrhoeae
gcagggcgtgattaagtttg

SEQ ID NO: 52504 - DNA, 20 bp, Neisseria gonorrhoeae
agtttgcgggcgggcgcaac

SEQ ID NO: 52505 - DNA, 20 bp, Neisseria gonorrhoeae
gcgggcgggcgcaacgcggg

SEQ ID NO: 52506 - DNA, 20 bp, Neisseria gonorrhoeae
cgggcgggcgcaacgcgggt

SEQ ID NO: 52507 - DNA, 20 bp, Neisseria gonorrhoeae
gagcaggacggtcaaggcac

SEQ ID NO: 52508 - DNA, 20 bp, Neisseria gonorrhoeae
gctgacattgtgctacgtcg

SEQ ID NO: 52509 - DNA, 20 bp, Neisseria gonorrhoeae
ctgacattgtgctacgtcga

SEQ ID NO: 52510 - DNA, 20 bp, Neisseria gonorrhoeae
tgctacgtcgacggcgaatt

SEQ ID NO: 52511 - DNA, 20 bp, Neisseria gonorrhoeae
gccgtcgacgtagcacaatg

SEQ ID NO: 52512 - DNA, 20 bp, Neisseria gonorrhoeae
agacacacgcccgaagcatc

SEQ ID NO: 52513 - DNA, 20 bp, Neisseria gonorrhoeae
gaggcgcaatacacggtcaa

SEQ ID NO: 52514 - DNA, 20 bp, Neisseria gonorrhoeae
gcatcaaccttgaccgtgta

SEQ ID NO: 52515 - DNA, 20 bp, Neisseria gonorrhoeae
catcaaccttgaccgtgtat

SEQ ID NO: 52516 - DNA, 20 bp, Neisseria gonorrhoeae
accgtgtattgcgcctccaa

SEQ ID NO: 52517 - DNA, 20 bp, Neisseria gonorrhoeae
ggcatcggtgcggccgggaa

SEQ ID NO: 52518 - DNA, 20 bp, Neisseria gonorrhoeae
ccgttcgtggtggacacgca

SEQ ID NO: 52519 - DNA, 20 bp, Neisseria gonorrhoeae
gtggtggacacgcagaaaaa

SEQ ID NO: 52520 - DNA, 20 bp, Neisseria gonorrhoeae
gccgttgatgcccacgcggt

SEQ ID NO: 52521 - DNA, 20 bp, Neisseria gonorrhoeae
atgcccacgcggtttttctg

SEQ ID NO: 52522 - DNA, 20 bp, Neisseria gonorrhoeae
ccgcgccgagcagtgtggaa

SEQ ID NO: 52523 - DNA, 20 bp, Neisseria gonorrhoeae
ttgccgccgccgccctgcct

SEQ ID NO: 52524 - DNA, 20 bp, Neisseria gonorrhoeae
ccgccgccgccctgccttgt

SEQ ID NO: 52525 - DNA, 20 bp, Neisseria gonorrhoeae
tgaaatcgggcaggcgtaaa

SEQ ID NO: 52526 - DNA, 20 bp, Neisseria gonorrhoeae
gtttacgcctgcccgatttc

SEQ ID NO: 52527 - DNA, 20 bp, Neisseria gonorrhoeae
cttcccagccttccgcgcgc

SEQ ID NO: 52528 - DNA, 20 bp, Neisseria gonorrhoeae
ttcccagccttccgcgcgcg

SEQ ID NO: 52529 - DNA, 20 bp, Neisseria gonorrhoeae
ccagccttccgcgcgcggcg

SEQ ID NO: 52530 - DNA, 20 bp, Neisseria gonorrhoeae
cgcgcgcggcggggcggctt

SEQ ID NO: 52531 - DNA, 20 bp, Neisseria gonorrhoeae
gatgtatattcccgagcgag

SEQ ID NO: 52532 - DNA, 20 bp, Neisseria gonorrhoeae
gacgaaactcgaagcccccg

SEQ ID NO: 52533 - DNA, 20 bp, Neisseria gonorrhoeae
acgaaactcgaagcccccgc

SEQ ID NO: 52534 - DNA, 20 bp, Neisseria gonorrhoeae
gaccgcgatgcagccgtatg

SEQ ID NO: 52535 - DNA, 20 bp, Neisseria gonorrhoeae
accgcgatgcagccgtatgc

SEQ ID NO: 52536 - DNA, 20 bp, Neisseria gonorrhoeae
gagtttcgtcaaacccgaca

SEQ ID NO: 52537 - DNA, 20 bp, Neisseria gonorrhoeae
cggaacgcctcaaagccgcc

SEQ ID NO: 52538 - DNA, 20 bp, Neisseria gonorrhoeae
ggaacgcctcaaagccgccg

SEQ ID NO: 52539 - DNA, 20 bp, Neisseria gonorrhoeae
ggcgtgttcgaccgcggcgg

SEQ ID NO: 52540 - DNA, 20 bp, Neisseria gonorrhoeae
gaccgcggcggctttgaggc

SEQ ID NO: 52541 - DNA, 20 bp, Neisseria gonorrhoeae
gaggcgttccgaaacttccg

SEQ ID NO: 52542 - DNA, 20 bp, Neisseria gonorrhoeae
ggcaaatcatcacggaaacc

SEQ ID NO: 52543 - DNA, 20 bp, Neisseria gonorrhoeae
gcaaatcatcacggaaaccg

SEQ ID NO: 52544 - DNA, 20 bp, Neisseria gonorrhoeae
gacgggctgacaggccggct

SEQ ID NO: 52545 - DNA, 20 bp, Neisseria gonorrhoeae
acgggctgacaggccggctg

SEQ ID NO: 52546 - DNA, 20 bp, Neisseria gonorrhoeae
agccggcctgtcagcccgtc

SEQ ID NO: 52547 - DNA, 20 bp, Neisseria gonorrhoeae
gccccctttgccgccgccct

SEQ ID NO: 52548 - DNA, 20 bp, Neisseria gonorrhoeae
ccccctttgccgccgccctg

SEQ ID NO: 52549 - DNA, 20 bp, Neisseria gonorrhoeae
gccgccgccctgatttgcgc

SEQ ID NO: 52550 - DNA, 20 bp, Neisseria gonorrhoeae
ccgccgccctgatttgcgcc

SEQ ID NO: 52551 - DNA, 20 bp, Neisseria gonorrhoeae
gcgcccggctttttccgggc

SEQ ID NO: 52552 - DNA, 20 bp, Neisseria gonorrhoeae
gggcgggggcacgaacggac

SEQ ID NO: 52553 - DNA, 20 bp, Neisseria gonorrhoeae
ttcgcctgcgtccgttcgtg

SEQ ID NO: 52554 - DNA, 20 bp, Neisseria gonorrhoeae
gcctgcgtccgttcgtgccc

SEQ ID NO: 52555 - DNA, 20 bp, Neisseria gonorrhoeae
gtgcccccgccccaattcgc

SEQ ID NO: 52556 - DNA, 20 bp, Neisseria gonorrhoeae
gcccatttgggccttgagct

SEQ ID NO: 52557 - DNA, 20 bp, Neisseria gonorrhoeae
cggcaatggcggcaatgatg

SEQ ID NO: 52558 - DNA, 20 bp, Neisseria gonorrhoeae
atgggcggcggcggcggttc

SEQ ID NO: 52559 - DNA, 20 bp, Neisseria gonorrhoeae
tcaaacgaccacaaccacga

SEQ ID NO: 52560 - DNA, 20 bp, Neisseria gonorrhoeae
tggtcgtttgagaaccgccg

SEQ ID NO: 52561 - DNA, 20 bp, Neisseria gonorrhoeae
gagaaccgccgccgccgccc

SEQ ID NO: 52562 - DNA, 20 bp, Neisseria gonorrhoeae
gcccacttcgccgcgcggca

SEQ ID NO: 52563 - DNA, 20 bp, Neisseria gonorrhoeae
gccgcgcggcacttcgacca

SEQ ID NO: 52564 - DNA, 20 bp, Neisseria gonorrhoeae
gaccaattcttcatcgacgg

SEQ ID NO: 52565 - DNA, 20 bp, Neisseria gonorrhoeae
ttcatcgacggctttggctt

SEQ ID NO: 52566 - DNA, 20 bp, Neisseria gonorrhoeae
atcgacggctttggcttcca

SEQ ID NO: 52567 - DNA, 20 bp, Neisseria gonorrhoeae
ggcaaaccatttgccgaaca

SEQ ID NO: 52568 - DNA, 20 bp, Neisseria gonorrhoeae
gcaaaccatttgccgaacag

SEQ ID NO: 52569 - DNA, 20 bp, Neisseria gonorrhoeae
gccgaacaggtaagacgcgg

SEQ ID NO: 52570 - DNA, 20 bp, Neisseria gonorrhoeae
ccgaacaggtaagacgcggc

SEQ ID NO: 52571 - DNA, 20 bp, Neisseria gonorrhoeae
ccgcgtcttacctgttcggc

SEQ ID NO: 52572 - DNA, 20 bp, Neisseria gonorrhoeae
tccgaccatacgcccgagcg

SEQ ID NO: 52573 - DNA, 20 bp, Neisseria gonorrhoeae
cgctcgggcgtatggtcgga

SEQ ID NO: 52574 - DNA, 20 bp, Neisseria gonorrhoeae
gggctggcaggcgagttttc

SEQ ID NO: 52575 - DNA, 20 bp, Neisseria gonorrhoeae
ggctggcaggcgagttttct

SEQ ID NO: 52576 - DNA, 20 bp, Neisseria gonorrhoeae
tctgctgatcggcctgtgtt

SEQ ID NO: 52577 - DNA, 20 bp, Neisseria gonorrhoeae
gtgtagcaaaaagaacccct

SEQ ID NO: 52578 - DNA, 20 bp, Neisseria gonorrhoeae
ctgttgtcgctatttgcggc

SEQ ID NO: 52579 - DNA, 20 bp, Neisseria gonorrhoeae
tcgctatttgcggcagtttc

SEQ ID NO: 52580 - DNA, 20 bp, Neisseria gonorrhoeae
gcggcagtttcgctgaagat

SEQ ID NO: 52581 - DNA, 20 bp, Neisseria gonorrhoeae
cggcagtttcgctgaagatt

SEQ ID NO: 52582 - DNA, 20 bp, Neisseria gonorrhoeae
gtgattgaagccaaagggac

SEQ ID NO: 52583 - DNA, 20 bp, Neisseria gonorrhoeae
tgattgaagccaaagggact

SEQ ID NO: 52584 - DNA, 20 bp, Neisseria gonorrhoeae
aagccaaagggactgacggg

SEQ ID NO: 52585 - DNA, 20 bp, Neisseria gonorrhoeae
gcgaaaaagcgaagagcgga

SEQ ID NO: 52586 - DNA, 20 bp, Neisseria gonorrhoeae
cgaaaaagcgaagagcggaa

SEQ ID NO: 52587 - DNA, 20 bp, Neisseria gonorrhoeae
gacctgcccccgatactggg

SEQ ID NO: 52588 - DNA, 20 bp, Neisseria gonorrhoeae
acctgcccccgatactgggc

SEQ ID NO: 52589 - DNA, 20 bp, Neisseria gonorrhoeae
cctgtcccgggtagcagcct

SEQ ID NO: 52590 - DNA, 20 bp, Neisseria gonorrhoeae
ctgtcccgggtagcagcctt

SEQ ID NO: 52591 - DNA, 20 bp, Neisseria gonorrhoeae
tttgaagtgtacgccgccga

SEQ ID NO: 52592 - DNA, 20 bp, Neisseria gonorrhoeae
cgggggcgatgtgcaaaatg

SEQ ID NO: 52593 - DNA, 20 bp, Neisseria gonorrhoeae
gggggcgatgtgcaaaatgc

SEQ ID NO: 52594 - DNA, 20 bp, Neisseria gonorrhoeae
cgtcatcctgcaccatcggg

SEQ ID NO: 52595 - DNA, 20 bp, Neisseria gonorrhoeae
tgcacatcgcccccgaaacc

SEQ ID NO: 52596 - DNA, 20 bp, Neisseria gonorrhoeae
gcacatcgcccccgaaaccg

SEQ ID NO: 52597 - DNA, 20 bp, Neisseria gonorrhoeae
cgccagccagcggtcggttt

SEQ ID NO: 52598 - DNA, 20 bp, Neisseria gonorrhoeae
gggcaagcacgtcggcagtc

SEQ ID NO: 52599 - DNA, 20 bp, Neisseria gonorrhoeae
ggcaagcacgtcggcagtct

SEQ ID NO: 52600 - DNA, 20 bp, Neisseria gonorrhoeae
ggcagccgtttcaccgtttt

SEQ ID NO: 52601 - DNA, 20 bp, Neisseria gonorrhoeae
caccgttttcgggaaccatg

SEQ ID NO: 52602 - DNA, 20 bp, Neisseria gonorrhoeae
gggcacgatgtcgccggctt

SEQ ID NO: 52603 - DNA, 20 bp, Neisseria gonorrhoeae
gatggtgcggatggacatcg

SEQ ID NO: 52604 - DNA, 20 bp, Neisseria gonorrhoeae
cacgccgcgcgtgagggcgg

SEQ ID NO: 52605 - DNA, 20 bp, Neisseria gonorrhoeae
acgccgcgcgtgagggcggg

SEQ ID NO: 52606 - DNA, 20 bp, Neisseria gonorrhoeae
gtcttccgcccgccccgatc

SEQ ID NO: 52607 - DNA, 20 bp, Neisseria gonorrhoeae
tcttccgcccgccccgatcc

SEQ ID NO: 52608 - DNA, 20 bp, Neisseria gonorrhoeae
cgcccgccccgatcccttct

SEQ ID NO: 52609 - DNA, 20 bp, Neisseria gonorrhoeae
tacgacgtttggtattggtg

SEQ ID NO: 52610 - DNA, 20 bp, Neisseria gonorrhoeae
ggtattggtgtacccaacgc

SEQ ID NO: 52611 - DNA, 20 bp, Neisseria gonorrhoeae
gccgcccgctacgccaaact

SEQ ID NO: 52612 - DNA, 20 bp, Neisseria gonorrhoeae
atttggccgatgcgctgcaa

SEQ ID NO: 52613 - DNA, 20 bp, Neisseria gonorrhoeae
ggccgatgcgctgcaaaaac

SEQ ID NO: 52614 - DNA, 20 bp, Neisseria gonorrhoeae
gccgatgcgctgcaaaaacg

SEQ ID NO: 52615 - DNA, 20 bp, Neisseria gonorrhoeae
gtcccgtttttgcagcgcat

SEQ ID NO: 52616 - DNA, 20 bp, Neisseria gonorrhoeae
acgatgtcgtagcggccttt

SEQ ID NO: 52617 - DNA, 20 bp, Neisseria gonorrhoeae
ctcatagcccaaggcttcca

SEQ ID NO: 52618 - DNA, 20 bp, Neisseria gonorrhoeae
tcatagcccaaggcttccaa

SEQ ID NO: 52619 - DNA, 20 bp, Neisseria gonorrhoeae
caatgcaaggttggcgatga

SEQ ID NO: 52620 - DNA, 20 bp, Neisseria gonorrhoeae
gcgatgacttcgttggtgtt

SEQ ID NO: 52621 - DNA, 20 bp, Neisseria gonorrhoeae
tgacgagggagatatggttt

SEQ ID NO: 52622 - DNA, 20 bp, Neisseria gonorrhoeae
gacgagggagatatggtttc

SEQ ID NO: 52623 - DNA, 20 bp, Neisseria gonorrhoeae
acgagggagatatggtttcc

SEQ ID NO: 52624 - DNA, 20 bp, Neisseria gonorrhoeae
ccggccagccgcattaatgc

SEQ ID NO: 52625 - DNA, 20 bp, Neisseria gonorrhoeae
cggccagccgcattaatgcc

SEQ ID NO: 52626 - DNA, 20 bp, Neisseria gonorrhoeae
cgcagccataccgatggatt

SEQ ID NO: 52627 - DNA, 20 bp, Neisseria gonorrhoeae
gcccaaggtcgggtgcgggt

SEQ ID NO: 52628 - DNA, 20 bp, Neisseria gonorrhoeae
tgccgatgtctgccgcgtcg

SEQ ID NO: 52629 - DNA, 20 bp, Neisseria gonorrhoeae
gccgatgtctgccgcgtcgc

SEQ ID NO: 52630 - DNA, 20 bp, Neisseria gonorrhoeae
ccgatgtctgccgcgtcgca

SEQ ID NO: 52631 - DNA, 20 bp, Neisseria gonorrhoeae
gtgttgcagaccttcgccgt

SEQ ID NO: 52632 - DNA, 20 bp, Neisseria gonorrhoeae
cagaccttcgccgttcagcg

SEQ ID NO: 52633 - DNA, 20 bp, Neisseria gonorrhoeae
gccgttcagcgtcgtacggc

SEQ ID NO: 52634 - DNA, 20 bp, Neisseria gonorrhoeae
agcgtcgtacggccggcagt

SEQ ID NO: 52635 - DNA, 20 bp, Neisseria gonorrhoeae
ctgctgggcggtactgccgg

SEQ ID NO: 52636 - DNA, 20 bp, Neisseria gonorrhoeae
ctgccacagttcggcaggct

SEQ ID NO: 52637 - DNA, 20 bp, Neisseria gonorrhoeae
ggcaggctgcaccaccggca

SEQ ID NO: 52638 - DNA, 20 bp, Neisseria gonorrhoeae
gccagttgccgatcggagtg

SEQ ID NO: 52639 - DNA, 20 bp, Neisseria gonorrhoeae
ccagttgccgatcggagtgt

SEQ ID NO: 52640 - DNA, 20 bp, Neisseria gonorrhoeae
ccgatcggagtgtggacgac

SEQ ID NO: 52641 - DNA, 20 bp, Neisseria gonorrhoeae
cgtcgtccacactccgatcg

SEQ ID NO: 52642 - DNA, 20 bp, Neisseria gonorrhoeae
ccgccaccaaaaacctgatg

SEQ ID NO: 52643 - DNA, 20 bp, Neisseria gonorrhoeae
cgccaccaaaaacctgatga

SEQ ID NO: 52644 - DNA, 20 bp, Neisseria gonorrhoeae
ttggtggcggaaaggcgcat

SEQ ID NO: 52645 - DNA, 20 bp, Neisseria gonorrhoeae
tggtggcggaaaggcgcatc

SEQ ID NO: 52646 - DNA, 20 bp, Neisseria gonorrhoeae
ggtggcggaaaggcgcatct

SEQ ID NO: 52647 - DNA, 20 bp, Neisseria gonorrhoeae
ccatgcagtacgaacgcggc

SEQ ID NO: 52648 - DNA, 20 bp, Neisseria gonorrhoeae
catgcagtacgaacgcggcg

SEQ ID NO: 52649 - DNA, 20 bp, Neisseria gonorrhoeae
ggacttcaaacgcggcagct

SEQ ID NO: 52650 - DNA, 20 bp, Neisseria gonorrhoeae
gacttcaaacgcggcagctt

SEQ ID NO: 52651 - DNA, 20 bp, Neisseria gonorrhoeae
aaacgcggcagcttccgcgt

SEQ ID NO: 52652 - DNA, 20 bp, Neisseria gonorrhoeae
ctgcgctcccaccgcagcct

SEQ ID NO: 52653 - DNA, 20 bp, Neisseria gonorrhoeae
aaaccataggccgcgccgcg

SEQ ID NO: 52654 - DNA, 20 bp, Neisseria gonorrhoeae
acgttgcgcgcggcgcggcc

SEQ ID NO: 52655 - DNA, 20 bp, Neisseria gonorrhoeae
cgcgcggcgcggcctatggt

SEQ ID NO: 52656 - DNA, 20 bp, Neisseria gonorrhoeae
gaatcaggctgcggtgggag

SEQ ID NO: 52657 - DNA, 20 bp, Neisseria gonorrhoeae
ggcaacgtccgcaccgcctt

SEQ ID NO: 52658 - DNA, 20 bp, Neisseria gonorrhoeae
catggcgaagctgacgttgg

SEQ ID NO: 52659 - DNA, 20 bp, Neisseria gonorrhoeae
atggcgaagctgacgttggc

SEQ ID NO: 52660 - DNA, 20 bp, Neisseria gonorrhoeae
gcggcggcaagcgcgggcgc

SEQ ID NO: 52661 - DNA, 20 bp, Neisseria gonorrhoeae
ccgccgccaacgtcagcttc

SEQ ID NO: 52662 - DNA, 20 bp, Neisseria gonorrhoeae
ctccattgccgccgcgtctt

SEQ ID NO: 52663 - DNA, 20 bp, Neisseria gonorrhoeae
ccgccgcgtctttaaaccaa

SEQ ID NO: 52664 - DNA, 20 bp, Neisseria gonorrhoeae
aaaccaaatgccgtgtttca

SEQ ID NO: 52665 - DNA, 20 bp, Neisseria gonorrhoeae
aaccaaatgccgtgtttcac

SEQ ID NO: 52666 - DNA, 20 bp, Neisseria gonorrhoeae
caccgctttgcccatgccga

SEQ ID NO: 52667 - DNA, 20 bp, Neisseria gonorrhoeae
ggtcatcagcgcgcccgcca

SEQ ID NO: 52668 - DNA, 20 bp, Neisseria gonorrhoeae
gccgcccgcctttttctctt

SEQ ID NO: 52669 - DNA, 20 bp, Neisseria gonorrhoeae
ccgcccgcctttttctcttc

SEQ ID NO: 52670 - DNA, 20 bp, Neisseria gonorrhoeae
ttctcttcgggattggattc

SEQ ID NO: 52671 - DNA, 20 bp, Neisseria gonorrhoeae
tctcttcgggattggattcg

SEQ ID NO: 52672 - DNA, 20 bp, Neisseria gonorrhoeae
ggttccgttaccaatgccga

SEQ ID NO: 52673 - DNA, 20 bp, Neisseria gonorrhoeae
cgttaccaatgccgacattg

SEQ ID NO: 52674 - DNA, 20 bp, Neisseria gonorrhoeae
ccaatgccgacattgctgct

SEQ ID NO: 52675 - DNA, 20 bp, Neisseria gonorrhoeae
ctgctgcaatcgttgctgcc

SEQ ID NO: 52676 - DNA, 20 bp, Neisseria gonorrhoeae
ctgccggcatcgaagccgtg

SEQ ID NO: 52677 - DNA, 20 bp, Neisseria gonorrhoeae
atgggcggggaagccgcagt

SEQ ID NO: 52678 - DNA, 20 bp, Neisseria gonorrhoeae
tgggcggggaagccgcagtg

SEQ ID NO: 52679 - DNA, 20 bp, Neisseria gonorrhoeae
agaaggggacggaaagtgaa

SEQ ID NO: 52680 - DNA, 20 bp, Neisseria gonorrhoeae
actttccgtccccttcttaa

SEQ ID NO: 52681 - DNA, 20 bp, Neisseria gonorrhoeae
ccgtccccttcttaatccac

SEQ ID NO: 52682 - DNA, 20 bp, Neisseria gonorrhoeae
ggctgttggtcagccgcgcc

SEQ ID NO: 52683 - DNA, 20 bp, Neisseria gonorrhoeae
gctgttggtcagccgcgcca

SEQ ID NO: 52684 - DNA, 20 bp, Neisseria gonorrhoeae
gtcagccgcgccacgcgccc

SEQ ID NO: 52685 - DNA, 20 bp, Neisseria gonorrhoeae
ggggagcagctcgacagcct

SEQ ID NO: 52686 - DNA, 20 bp, Neisseria gonorrhoeae
ccgacatggtcagcttcggc

SEQ ID NO: 52687 - DNA, 20 bp, Neisseria gonorrhoeae
gtgtaccgccgccagtccgc

SEQ ID NO: 52688 - DNA, 20 bp, Neisseria gonorrhoeae
tgtaccgccgccagtccgcg

SEQ ID NO: 52689 - DNA, 20 bp, Neisseria gonorrhoeae
caccatgttcgggctgtttg

SEQ ID NO: 52690 - DNA, 20 bp, Neisseria gonorrhoeae
gggctgtttgccgccggctt

SEQ ID NO: 52691 - DNA, 20 bp, Neisseria gonorrhoeae
gccgccggctttatgtattt

SEQ ID NO: 52692 - DNA, 20 bp, Neisseria gonorrhoeae
gagtattttgtgctgggcgg

SEQ ID NO: 52693 - DNA, 20 bp, Neisseria gonorrhoeae
tgtgctgggcggaaaatatg

SEQ ID NO: 52694 - DNA, 20 bp, Neisseria gonorrhoeae
gtgctgggcggaaaatatgc

SEQ ID NO: 52695 - DNA, 20 bp, Neisseria gonorrhoeae
tgctgggcggaaaatatgcc

SEQ ID NO: 52696 - DNA, 20 bp, Neisseria gonorrhoeae
tccgcccagcacaaaatact

SEQ ID NO: 52697 - DNA, 20 bp, Neisseria gonorrhoeae
aataagttcgtatgcatgtt

SEQ ID NO: 52698 - DNA, 20 bp, Neisseria gonorrhoeae
gtatgcatgttgtgccttat

SEQ ID NO: 52699 - DNA, 20 bp, Neisseria gonorrhoeae
tgccttatcgttgacaccgt

SEQ ID NO: 52700 - DNA, 20 bp, Neisseria gonorrhoeae
tcgttgacaccgtccagcat

SEQ ID NO: 52701 - DNA, 20 bp, Neisseria gonorrhoeae
acaccgtccagcatcacata

SEQ ID NO: 52702 - DNA, 20 bp, Neisseria gonorrhoeae
tgatttcagacctgcgttta

SEQ ID NO: 52703 - DNA, 20 bp, Neisseria gonorrhoeae
cagacctgcgtttacggtaa

SEQ ID NO: 52704 - DNA, 20 bp, Neisseria gonorrhoeae
agacctgcgtttacggtaac

SEQ ID NO: 52705 - DNA, 20 bp, Neisseria gonorrhoeae
acggtaacgaagttttggtc

SEQ ID NO: 52706 - DNA, 20 bp, Neisseria gonorrhoeae
cggtaacgaagttttggtcg

SEQ ID NO: 52707 - DNA, 20 bp, Neisseria gonorrhoeae
cggtttgggtttcagacggc

SEQ ID NO: 52708 - DNA, 20 bp, Neisseria gonorrhoeae
gggtttcagacggcatggca

SEQ ID NO: 52709 - DNA, 20 bp, Neisseria gonorrhoeae
ggtttcagacggcatggcag

SEQ ID NO: 52710 - DNA, 20 bp, Neisseria gonorrhoeae
cagacggcatggcagtctgt

SEQ ID NO: 52711 - DNA, 20 bp, Neisseria gonorrhoeae
agacggcatggcagtctgtt

SEQ ID NO: 52712 - DNA, 20 bp, Neisseria gonorrhoeae
gatgtcggcaatgctcatgc

SEQ ID NO: 52713 - DNA, 20 bp, Neisseria gonorrhoeae
atgtcggcaatgctcatgcc

SEQ ID NO: 52714 - DNA, 20 bp, Neisseria gonorrhoeae
ccgtcgagatgtcggacagg

SEQ ID NO: 52715 - DNA, 20 bp, Neisseria gonorrhoeae
tggcggcaggcgtatagact

SEQ ID NO: 52716 - DNA, 20 bp, Neisseria gonorrhoeae
ggcggcaggcgtatagactt

SEQ ID NO: 52717 - DNA, 20 bp, Neisseria gonorrhoeae
tagcgttgggcaagggcgct

SEQ ID NO: 52718 - DNA, 20 bp, Neisseria gonorrhoeae
ggcaagggcgctttggcggc

SEQ ID NO: 52719 - DNA, 20 bp, Neisseria gonorrhoeae
ggcggctttggatatcggat

SEQ ID NO: 52720 - DNA, 20 bp, Neisseria gonorrhoeae
gcggctttggatatcggatt

SEQ ID NO: 52721 - DNA, 20 bp, Neisseria gonorrhoeae
ggatatcggattggaggtgg

SEQ ID NO: 52722 - DNA, 20 bp, Neisseria gonorrhoeae
gccgaggatttcgcctgcgc

SEQ ID NO: 52723 - DNA, 20 bp, Neisseria gonorrhoeae
cgcctgcgccgcggatttcc

SEQ ID NO: 52724 - DNA, 20 bp, Neisseria gonorrhoeae
gcctgcgccgcggatttcca

SEQ ID NO: 52725 - DNA, 20 bp, Neisseria gonorrhoeae
ccaaatcctgcatggcgagg

SEQ ID NO: 52726 - DNA, 20 bp, Neisseria gonorrhoeae
caaatcctgcatggcgaggg

SEQ ID NO: 52727 - DNA, 20 bp, Neisseria gonorrhoeae
tgcgcgtgctgctcgaccag

SEQ ID NO: 52728 - DNA, 20 bp, Neisseria gonorrhoeae
gcgcgtgctgctcgaccaga

SEQ ID NO: 52729 - DNA, 20 bp, Neisseria gonorrhoeae
cgcgtgctgctcgaccagaa

SEQ ID NO: 52730 - DNA, 20 bp, Neisseria gonorrhoeae
gccgcccatcaccgccacaa

SEQ ID NO: 52731 - DNA, 20 bp, Neisseria gonorrhoeae
ccgcccatcaccgccacaaa

SEQ ID NO: 52732 - DNA, 20 bp, Neisseria gonorrhoeae
gccttgttccacgcgccgct

SEQ ID NO: 52733 - DNA, 20 bp, Neisseria gonorrhoeae
ttccacgcgccgctgccgag

SEQ ID NO: 52734 - DNA, 20 bp, Neisseria gonorrhoeae
cacgcgccgctgccgagctt

SEQ ID NO: 52735 - DNA, 20 bp, Neisseria gonorrhoeae
tgcagggcgacgctttcatg

SEQ ID NO: 52736 - DNA, 20 bp, Neisseria gonorrhoeae
catgcgcctgaccggagtag

SEQ ID NO: 52737 - DNA, 20 bp, Neisseria gonorrhoeae
tgcatcgccgtggcaaccgg

SEQ ID NO: 52738 - DNA, 20 bp, Neisseria gonorrhoeae
taatctgccacaacgccgac

SEQ ID NO: 52739 - DNA, 20 bp, Neisseria gonorrhoeae
aatctgccacaacgccgaca

SEQ ID NO: 52740 - DNA, 20 bp, Neisseria gonorrhoeae
atctgccacaacgccgacag

SEQ ID NO: 52741 - DNA, 20 bp, Neisseria gonorrhoeae
tggcagattaaaagcggcgc

SEQ ID NO: 52742 - DNA, 20 bp, Neisseria gonorrhoeae
gtggatgtaggcggcgagga

SEQ ID NO: 52743 - DNA, 20 bp, Neisseria gonorrhoeae
tggatgtaggcggcgaggac

SEQ ID NO: 52744 - DNA, 20 bp, Neisseria gonorrhoeae
tacgcagcaagggattgaag

SEQ ID NO: 52745 - DNA, 20 bp, Neisseria gonorrhoeae
acgcagcaagggattgaagg

SEQ ID NO: 52746 - DNA, 20 bp, Neisseria gonorrhoeae
cgcagcaagggattgaaggg

SEQ ID NO: 52747 - DNA, 20 bp, Neisseria gonorrhoeae
ttcgaccgccgcgtagatga

SEQ ID NO: 52748 - DNA, 20 bp, Neisseria gonorrhoeae
gaccgccgcgtagatgaggg

SEQ ID NO: 52749 - DNA, 20 bp, Neisseria gonorrhoeae
cagcaggcgcggggcgatac

SEQ ID NO: 52750 - DNA, 20 bp, Neisseria gonorrhoeae
gatggcttcggatgccgtcc

SEQ ID NO: 52751 - DNA, 20 bp, Neisseria gonorrhoeae
ggatgccgtccagacagaca

SEQ ID NO: 52752 - DNA, 20 bp, Neisseria gonorrhoeae
cgcgccatcgaaatgctgtc

SEQ ID NO: 52753 - DNA, 20 bp, Neisseria gonorrhoeae
tgcggcgggatgttggtcgc

SEQ ID NO: 52754 - DNA, 20 bp, Neisseria gonorrhoeae
gtcgccataccgacggcgat

SEQ ID NO: 52755 - DNA, 20 bp, Neisseria gonorrhoeae
acgagcagtgtggggaaacg

SEQ ID NO: 52756 - DNA, 20 bp, Neisseria gonorrhoeae
tactgccgacccgtttcccc

SEQ ID NO: 52757 - DNA, 20 bp, Neisseria gonorrhoeae
ccccacactgctcgtcaacg

SEQ ID NO: 52758 - DNA, 20 bp, Neisseria gonorrhoeae
gtcgttgcggccaagcgcgc

SEQ ID NO: 52759 - DNA, 20 bp, Neisseria gonorrhoeae
cggccaagcgcgcgcaggac

SEQ ID NO: 52760 - DNA, 20 bp, Neisseria gonorrhoeae
gagcgaggcggaggtgcagg

SEQ ID NO: 52761 - DNA, 20 bp, Neisseria gonorrhoeae
gccgcaacgacgaactggcg

SEQ ID NO: 52762 - DNA, 20 bp, Neisseria gonorrhoeae
gtcggcatccagcaggtatt

SEQ ID NO: 52763 - DNA, 20 bp, Neisseria gonorrhoeae
tcggcatccagcaggtattg

SEQ ID NO: 52764 - DNA, 20 bp, Neisseria gonorrhoeae
ggcgaacttggccgcttcgc

SEQ ID NO: 52765 - DNA, 20 bp, Neisseria gonorrhoeae
gccgcttcgccgaagcagac

SEQ ID NO: 52766 - DNA, 20 bp, Neisseria gonorrhoeae
gccgaagcagacgggcaaaa

SEQ ID NO: 52767 - DNA, 20 bp, Neisseria gonorrhoeae
gcaggataatgaaaagcaac

SEQ ID NO: 52768 - DNA, 20 bp, Neisseria gonorrhoeae
aatttgcaggttatcactat

SEQ ID NO: 52769 - DNA, 20 bp, Neisseria gonorrhoeae
gcaggttatcactatgtgca

SEQ ID NO: 52770 - DNA, 20 bp, Neisseria gonorrhoeae
caggttatcactatgtgcat

SEQ ID NO: 52771 - DNA, 20 bp, Neisseria gonorrhoeae
tcactatgtgcataggcggc

SEQ ID NO: 52772 - DNA, 20 bp, Neisseria gonorrhoeae
ccaacctcgacgattatgtc

SEQ ID NO: 52773 - DNA, 20 bp, Neisseria gonorrhoeae
tgtcatcgggcaggggcagg

SEQ ID NO: 52774 - DNA, 20 bp, Neisseria gonorrhoeae
cggtttacaaccattacaaa

SEQ ID NO: 52775 - DNA, 20 bp, Neisseria gonorrhoeae
acaaccattacaaacgcctg

SEQ ID NO: 52776 - DNA, 20 bp, Neisseria gonorrhoeae
gtaatggttgtaaaccgcaa

SEQ ID NO: 52777 - DNA, 20 bp, Neisseria gonorrhoeae
ctgcccctgactgcggacgt

SEQ ID NO: 52778 - DNA, 20 bp, Neisseria gonorrhoeae
tgcccctgactgcggacgtt

SEQ ID NO: 52779 - DNA, 20 bp, Neisseria gonorrhoeae
tgcaaggtttccggcgcgtt

SEQ ID NO: 52780 - DNA, 20 bp, Neisseria gonorrhoeae
ccggcgcgttgatgatgtcg

SEQ ID NO: 52781 - DNA, 20 bp, Neisseria gonorrhoeae
cggcgcgttgatgatgtcga

SEQ ID NO: 52782 - DNA, 20 bp, Neisseria gonorrhoeae
aaatccctgctggtgcgcgc

SEQ ID NO: 52783 - DNA, 20 bp, Neisseria gonorrhoeae
gggcgtgcggactgatggta

SEQ ID NO: 52784 - DNA, 20 bp, Neisseria gonorrhoeae
gacaaaggcggtcagctgac

SEQ ID NO: 52785 - DNA, 20 bp, Neisseria gonorrhoeae
tgccaatgcgccgactttgg

SEQ ID NO: 52786 - DNA, 20 bp, Neisseria gonorrhoeae
gccaatgcgccgactttggt

SEQ ID NO: 52787 - DNA, 20 bp, Neisseria gonorrhoeae
ccaatgcgccgactttggtg

SEQ ID NO: 52788 - DNA, 20 bp, Neisseria gonorrhoeae
ggtggcgacgacttcgccgt

SEQ ID NO: 52789 - DNA, 20 bp, Neisseria gonorrhoeae
gcgcgatgtcgtaaccacct

SEQ ID NO: 52790 - DNA, 20 bp, Neisseria gonorrhoeae
cgcgatgtcgtaaccacctt

SEQ ID NO: 52791 - DNA, 20 bp, Neisseria gonorrhoeae
aaacgccgcgcgcccgaaat

SEQ ID NO: 52792 - DNA, 20 bp, Neisseria gonorrhoeae
atccggccgccgttcagggc

SEQ ID NO: 52793 - DNA, 20 bp, Neisseria gonorrhoeae
tccggccgccgttcagggcg

SEQ ID NO: 52794 - DNA, 20 bp, Neisseria gonorrhoeae
cgggcgtttaacgaagaacc

SEQ ID NO: 52795 - DNA, 20 bp, Neisseria gonorrhoeae
aacgaagaaccggtcgtgcg

SEQ ID NO: 52796 - DNA, 20 bp, Neisseria gonorrhoeae
acgaagaaccggtcgtgcgc

SEQ ID NO: 52797 - DNA, 20 bp, Neisseria gonorrhoeae
ccgtcgtcagcggcgtggga

SEQ ID NO: 52798 - DNA, 20 bp, Neisseria gonorrhoeae
gatggcgcgcacgaccggtt

SEQ ID NO: 52799 - DNA, 20 bp, Neisseria gonorrhoeae
tttccatgtacggcggcgga

SEQ ID NO: 52800 - DNA, 20 bp, Neisseria gonorrhoeae
ccatgtacggcggcggattt

SEQ ID NO: 52801 - DNA, 20 bp, Neisseria gonorrhoeae
catgtacggcggcggatttg

SEQ ID NO: 52802 - DNA, 20 bp, Neisseria gonorrhoeae
gccgccattcccgcctacct

SEQ ID NO: 52803 - DNA, 20 bp, Neisseria gonorrhoeae
ccgccattcccgcctacctg

SEQ ID NO: 52804 - DNA, 20 bp, Neisseria gonorrhoeae
ccttgtgggcgaaaaagttt

SEQ ID NO: 52805 - DNA, 20 bp, Neisseria gonorrhoeae
tgggcgaaaaagtttccggc

SEQ ID NO: 52806 - DNA, 20 bp, Neisseria gonorrhoeae
ccggcgacggcatatcggtc

SEQ ID NO: 52807 - DNA, 20 bp, Neisseria gonorrhoeae
cggcgacggcatatcggtct

SEQ ID NO: 52808 - DNA, 20 bp, Neisseria gonorrhoeae
ggcattggccgtcataccgc

SEQ ID NO: 52809 - DNA, 20 bp, Neisseria gonorrhoeae
ttgcggcacatgcgggcgca

SEQ ID NO: 52810 - DNA, 20 bp, Neisseria gonorrhoeae
cggcacatgcgggcgcaaac

SEQ ID NO: 52811 - DNA, 20 bp, Neisseria gonorrhoeae
gagctcggcggcagcaacgc

SEQ ID NO: 52812 - DNA, 20 bp, Neisseria gonorrhoeae
ctgccgccgagctccaacac

SEQ ID NO: 52813 - DNA, 20 bp, Neisseria gonorrhoeae
tcttgaggtttgcgcccgca

SEQ ID NO: 52814 - DNA, 20 bp, Neisseria gonorrhoeae
cacaggggtcggggtggttt

SEQ ID NO: 52815 - DNA, 20 bp, Neisseria gonorrhoeae
taccctgcgacggttttaga

SEQ ID NO: 52816 - DNA, 20 bp, Neisseria gonorrhoeae
accctgcgacggttttagac

SEQ ID NO: 52817 - DNA, 20 bp, Neisseria gonorrhoeae
ccctgcgacggttttagaca

SEQ ID NO: 52818 - DNA, 20 bp, Neisseria gonorrhoeae
tagacagggtaaatcctgcc

SEQ ID NO: 52819 - DNA, 20 bp, Neisseria gonorrhoeae
gcctgccagtcgtgcgatac

SEQ ID NO: 52820 - DNA, 20 bp, Neisseria gonorrhoeae
cctgccagtcgtgcgatacg

SEQ ID NO: 52821 - DNA, 20 bp, Neisseria gonorrhoeae
gctgccgatacgttcggggt

SEQ ID NO: 52822 - DNA, 20 bp, Neisseria gonorrhoeae
ggggtggatgttggtcagtc

SEQ ID NO: 52823 - DNA, 20 bp, Neisseria gonorrhoeae
gtcagtccggcacgggtcat

SEQ ID NO: 52824 - DNA, 20 bp, Neisseria gonorrhoeae
tccggcaggtcttgtgcggc

SEQ ID NO: 52825 - DNA, 20 bp, Neisseria gonorrhoeae
ccggcaggtcttgtgcggct

SEQ ID NO: 52826 - DNA, 20 bp, Neisseria gonorrhoeae
cggcaggtcttgtgcggcta

SEQ ID NO: 52827 - DNA, 20 bp, Neisseria gonorrhoeae
tgcggctaaggttgctttgc

SEQ ID NO: 52828 - DNA, 20 bp, Neisseria gonorrhoeae
ctttgccttgcgacgtatgc

SEQ ID NO: 52829 - DNA, 20 bp, Neisseria gonorrhoeae
gggcaccaaatcgcgcgggg

SEQ ID NO: 52830 - DNA, 20 bp, Neisseria gonorrhoeae
gcagcggcgcggtgatttcg

SEQ ID NO: 52831 - DNA, 20 bp, Neisseria gonorrhoeae
cagcggcgcggtgatttcgc

SEQ ID NO: 52832 - DNA, 20 bp, Neisseria gonorrhoeae
cgcggcggcggctggtcagg

SEQ ID NO: 52833 - DNA, 20 bp, Neisseria gonorrhoeae
gcggcggcggctggtcaggg

SEQ ID NO: 52834 - DNA, 20 bp, Neisseria gonorrhoeae
gtcccttttctttcaattgt

SEQ ID NO: 52835 - DNA, 20 bp, Neisseria gonorrhoeae
tcccttttctttcaattgtt

SEQ ID NO: 52836 - DNA, 20 bp, Neisseria gonorrhoeae
tctttcaattgtttaaaggc

SEQ ID NO: 52837 - DNA, 20 bp, Neisseria gonorrhoeae
ctttcaattgtttaaaggcg

SEQ ID NO: 52838 - DNA, 20 bp, Neisseria gonorrhoeae
tttcaattgtttaaaggcgg

SEQ ID NO: 52839 - DNA, 20 bp, Neisseria gonorrhoeae
aagaggcagtgtttgcggtg

SEQ ID NO: 52840 - DNA, 20 bp, Neisseria gonorrhoeae
agaggcagtgtttgcggtgt

SEQ ID NO: 52841 - DNA, 20 bp, Neisseria gonorrhoeae
gcggtgttcggtaatgtcga

SEQ ID NO: 52842 - DNA, 20 bp, Neisseria gonorrhoeae
cggtgttcggtaatgtcgaa

SEQ ID NO: 52843 - DNA, 20 bp, Neisseria gonorrhoeae
ggtaatgtcgaatgtgaatg

SEQ ID NO: 52844 - DNA, 20 bp, Neisseria gonorrhoeae
ttgtagcagttgttaaagaa

SEQ ID NO: 52845 - DNA, 20 bp, Neisseria gonorrhoeae
tgtagcagttgttaaagaag

SEQ ID NO: 52846 - DNA, 20 bp, Neisseria gonorrhoeae
gtagcagttgttaaagaaga

SEQ ID NO: 52847 - DNA, 20 bp, Neisseria gonorrhoeae
tagcagttgttaaagaagat

SEQ ID NO: 52848 - DNA, 20 bp, Neisseria gonorrhoeae
ttaaagaagatgtcggcgaa

SEQ ID NO: 52849 - DNA, 20 bp, Neisseria gonorrhoeae
gaccggatcggtttcttcgg

SEQ ID NO: 52850 - DNA, 20 bp, Neisseria gonorrhoeae
accggatcggtttcttcggc

SEQ ID NO: 52851 - DNA, 20 bp, Neisseria gonorrhoeae
cttcggcgggattcggcact

SEQ ID NO: 52852 - DNA, 20 bp, Neisseria gonorrhoeae
ttcggcgggattcggcactt

SEQ ID NO: 52853 - DNA, 20 bp, Neisseria gonorrhoeae
ggcgggattcggcactttgc

SEQ ID NO: 52854 - DNA, 20 bp, Neisseria gonorrhoeae
gacttcggaagtgccgatgc

SEQ ID NO: 52855 - DNA, 20 bp, Neisseria gonorrhoeae
ggaagtgccgatgccgtgtg

SEQ ID NO: 52856 - DNA, 20 bp, Neisseria gonorrhoeae
gcacacttccacccacggcg

SEQ ID NO: 52857 - DNA, 20 bp, Neisseria gonorrhoeae
cacccacggcgcattcggcg

SEQ ID NO: 52858 - DNA, 20 bp, Neisseria gonorrhoeae
ggcgcactggcacacggcat

SEQ ID NO: 52859 - DNA, 20 bp, Neisseria gonorrhoeae
ggcgcgctacctattgcagg

SEQ ID NO: 52860 - DNA, 20 bp, Neisseria gonorrhoeae
gcgcgctacctattgcagga

SEQ ID NO: 52861 - DNA, 20 bp, Neisseria gonorrhoeae
caggagttcggcagcttggg

SEQ ID NO: 52862 - DNA, 20 bp, Neisseria gonorrhoeae
ggcagcttggggaggctgat

SEQ ID NO: 52863 - DNA, 20 bp, Neisseria gonorrhoeae
gggaggctgatgagcgcgga

SEQ ID NO: 52864 - DNA, 20 bp, Neisseria gonorrhoeae
tctatccgtccgcaccgcaa

SEQ ID NO: 52865 - DNA, 20 bp, Neisseria gonorrhoeae
aggtagtgcagcgcatcgcc

SEQ ID NO: 52866 - DNA, 20 bp, Neisseria gonorrhoeae
gcggtgcggacggatagaca

SEQ ID NO: 52867 - DNA, 20 bp, Neisseria gonorrhoeae
cggtgcggacggatagacaa

SEQ ID NO: 52868 - DNA, 20 bp, Neisseria gonorrhoeae
gcccgcgggcagggattggt

SEQ ID NO: 52869 - DNA, 20 bp, Neisseria gonorrhoeae
gtggaaacccataatggcac

SEQ ID NO: 52870 - DNA, 20 bp, Neisseria gonorrhoeae
tggaaacccataatggcacg

SEQ ID NO: 52871 - DNA, 20 bp, Neisseria gonorrhoeae
gtgcgtgccattatgggttt

SEQ ID NO: 52872 - DNA, 20 bp, Neisseria gonorrhoeae
tgggtttccacaaagtcgga

SEQ ID NO: 52873 - DNA, 20 bp, Neisseria gonorrhoeae
ccacaaagtcggattggact

SEQ ID NO: 52874 - DNA, 20 bp, Neisseria gonorrhoeae
ccgccgccatcatcatgacc

SEQ ID NO: 52875 - DNA, 20 bp, Neisseria gonorrhoeae
atcgccggcatttacagcct

SEQ ID NO: 52876 - DNA, 20 bp, Neisseria gonorrhoeae
acagcctcgccaccaacgca

SEQ ID NO: 52877 - DNA, 20 bp, Neisseria gonorrhoeae
cagcctcgccaccaacgcag

SEQ ID NO: 52878 - DNA, 20 bp, Neisseria gonorrhoeae
gaaatacatcccctgccctg

SEQ ID NO: 52879 - DNA, 20 bp, Neisseria gonorrhoeae
tatgttgctgtgggggccgc

SEQ ID NO: 52880 - DNA, 20 bp, Neisseria gonorrhoeae
ctgtgggggccgccgggcgt

SEQ ID NO: 52881 - DNA, 20 bp, Neisseria gonorrhoeae
gcgcggattttggcgcagag

SEQ ID NO: 52882 - DNA, 20 bp, Neisseria gonorrhoeae
tggcgcagagtttcaatgcc

SEQ ID NO: 52883 - DNA, 20 bp, Neisseria gonorrhoeae
ggcgcagagtttcaatgccc

SEQ ID NO: 52884 - DNA, 20 bp, Neisseria gonorrhoeae
ctcgccgacagcttgggcgc

SEQ ID NO: 52885 - DNA, 20 bp, Neisseria gonorrhoeae
tcgccgacagcttgggcgcg

SEQ ID NO: 52886 - DNA, 20 bp, Neisseria gonorrhoeae
ggcgcgcaaatccgccgttt

SEQ ID NO: 52887 - DNA, 20 bp, Neisseria gonorrhoeae
cgacaaaggcggcgagagtt

SEQ ID NO: 52888 - DNA, 20 bp, Neisseria gonorrhoeae
gacaaaggcggcgagagttt

SEQ ID NO: 52889 - DNA, 20 bp, Neisseria gonorrhoeae
gtcaaagaaaacgccagcga

SEQ ID NO: 52890 - DNA, 20 bp, Neisseria gonorrhoeae
cgcaggtggacgggcacttc

SEQ ID NO: 52891 - DNA, 20 bp, Neisseria gonorrhoeae
gtcgctggcgttttctttga

SEQ ID NO: 52892 - DNA, 20 bp, Neisseria gonorrhoeae
tctttgacgaagcggcgcat

SEQ ID NO: 52893 - DNA, 20 bp, Neisseria gonorrhoeae
ctttgacgaagcggcgcatt

SEQ ID NO: 52894 - DNA, 20 bp, Neisseria gonorrhoeae
cggcctgttggacgcgatca

SEQ ID NO: 52895 - DNA, 20 bp, Neisseria gonorrhoeae
ggcctgttggacgcgatcaa

SEQ ID NO: 52896 - DNA, 20 bp, Neisseria gonorrhoeae
gacgcgatcaagggctttgg

SEQ ID NO: 52897 - DNA, 20 bp, Neisseria gonorrhoeae
gggcagcgaccaggaatggc

SEQ ID NO: 52898 - DNA, 20 bp, Neisseria gonorrhoeae
ggcagcgaccaggaatggcg

SEQ ID NO: 52899 - DNA, 20 bp, Neisseria gonorrhoeae
atgatttcgcagatgacggc

SEQ ID NO: 52900 - DNA, 20 bp, Neisseria gonorrhoeae
cgcagatgacggcggcggga

SEQ ID NO: 52901 - DNA, 20 bp, Neisseria gonorrhoeae
gcagatgacggcggcgggaa

SEQ ID NO: 52902 - DNA, 20 bp, Neisseria gonorrhoeae
atttgcgccaagtcgacgcc

SEQ ID NO: 52903 - DNA, 20 bp, Neisseria gonorrhoeae
gcgccaagtcgacgccggct

SEQ ID NO: 52904 - DNA, 20 bp, Neisseria gonorrhoeae
ttgtcggcaggaacagagga

SEQ ID NO: 52905 - DNA, 20 bp, Neisseria gonorrhoeae
tcggcaggaacagaggattt

SEQ ID NO: 52906 - DNA, 20 bp, Neisseria gonorrhoeae
agccgtttcaggcagcctga

SEQ ID NO: 52907 - DNA, 20 bp, Neisseria gonorrhoeae
gccgtttcaggcagcctgaa

SEQ ID NO: 52908 - DNA, 20 bp, Neisseria gonorrhoeae
caggcagcctgaacaatcaa

SEQ ID NO: 52909 - DNA, 20 bp, Neisseria gonorrhoeae
atgagtgcaggtatcggctt

SEQ ID NO: 52910 - DNA, 20 bp, Neisseria gonorrhoeae
actattggcagcaagacaaa

SEQ ID NO: 52911 - DNA, 20 bp, Neisseria gonorrhoeae
gcagcaagacaaacacacaa

SEQ ID NO: 52912 - DNA, 20 bp, Neisseria gonorrhoeae
gttttcttgtgtgtttgtct

SEQ ID NO: 52913 - DNA, 20 bp, Neisseria gonorrhoeae
tcttgtgtgtttgtcttgct

SEQ ID NO: 52914 - DNA, 20 bp, Neisseria gonorrhoeae
ggtgcgggcgggtcggaagc

SEQ ID NO: 52915 - DNA, 20 bp, Neisseria gonorrhoeae
ttcctccgcattcaggctgc

SEQ ID NO: 52916 - DNA, 20 bp, Neisseria gonorrhoeae
tcctccgcattcaggctgcc

SEQ ID NO: 52917 - DNA, 20 bp, Neisseria gonorrhoeae
cctccgcattcaggctgccg

SEQ ID NO: 52918 - DNA, 20 bp, Neisseria gonorrhoeae
ctccgcattcaggctgccgc

SEQ ID NO: 52919 - DNA, 20 bp, Neisseria gonorrhoeae
cgcgcgcggccgtaatagcc

SEQ ID NO: 52920 - DNA, 20 bp, Neisseria gonorrhoeae
gtcttgcggcgcggcggcaa

SEQ ID NO: 52921 - DNA, 20 bp, Neisseria gonorrhoeae
cggcgcggcggcaagcgtct

SEQ ID NO: 52922 - DNA, 20 bp, Neisseria gonorrhoeae
cttggaaaaattcccgaccg

SEQ ID NO: 52923 - DNA, 20 bp, Neisseria gonorrhoeae
ttggaaaaattcccgaccgt

SEQ ID NO: 52924 - DNA, 20 bp, Neisseria gonorrhoeae
attgcaggtgccggccctgt

SEQ ID NO: 52925 - DNA, 20 bp, Neisseria gonorrhoeae
caggtgccggccctgtcggt

SEQ ID NO: 52926 - DNA, 20 bp, Neisseria gonorrhoeae
cacatcgccgtattgcacgc

SEQ ID NO: 52927 - DNA, 20 bp, Neisseria gonorrhoeae
acatcgccgtattgcacgcc

SEQ ID NO: 52928 - DNA, 20 bp, Neisseria gonorrhoeae
cacgccgatttcgtgggcgg

SEQ ID NO: 52929 - DNA, 20 bp, Neisseria gonorrhoeae
gccgccaacgacttcggcag

SEQ ID NO: 52930 - DNA, 20 bp, Neisseria gonorrhoeae
ccgccaacgacttcggcagg

SEQ ID NO: 52931 - DNA, 20 bp, Neisseria gonorrhoeae
ggcagggaagagtttgagtg

SEQ ID NO: 52932 - DNA, 20 bp, Neisseria gonorrhoeae
gagtgtgtcgatgccgtgtt

SEQ ID NO: 52933 - DNA, 20 bp, Neisseria gonorrhoeae
agtgtgtcgatgccgtgttc

SEQ ID NO: 52934 - DNA, 20 bp, Neisseria gonorrhoeae
gcggccgcagccttgttggt

SEQ ID NO: 52935 - DNA, 20 bp, Neisseria gonorrhoeae
ttggttcgcgcccaaatcga

SEQ ID NO: 52936 - DNA, 20 bp, Neisseria gonorrhoeae
gttcgcgcccaaatcgatgc

SEQ ID NO: 52937 - DNA, 20 bp, Neisseria gonorrhoeae
gcgcccaaatcgatgcgctc

SEQ ID NO: 52938 - DNA, 20 bp, Neisseria gonorrhoeae
tcggacgttccattcggcct

SEQ ID NO: 52939 - DNA, 20 bp, Neisseria gonorrhoeae
gcctgacgcgccggacatac

SEQ ID NO: 52940 - DNA, 20 bp, Neisseria gonorrhoeae
cctgacgcgccggacatacg

SEQ ID NO: 52941 - DNA, 20 bp, Neisseria gonorrhoeae
gaagccgcggtcttgcagga

SEQ ID NO: 52942 - DNA, 20 bp, Neisseria gonorrhoeae
aagccgcggtcttgcaggat

SEQ ID NO: 52943 - DNA, 20 bp, Neisseria gonorrhoeae
ggcatcctgcaagaccgcgg

SEQ ID NO: 52944 - DNA, 20 bp, Neisseria gonorrhoeae
caactcgccgcgttcaaatg

SEQ ID NO: 52945 - DNA, 20 bp, Neisseria gonorrhoeae
aaatgccgccaacacttcgc

SEQ ID NO: 52946 - DNA, 20 bp, Neisseria gonorrhoeae
gcgctggtcgttgaacacga

SEQ ID NO: 52947 - DNA, 20 bp, Neisseria gonorrhoeae
aacacgatggcgggtgcttc

SEQ ID NO: 52948 - DNA, 20 bp, Neisseria gonorrhoeae
gatgatgcggcagccttcgc

SEQ ID NO: 52949 - DNA, 20 bp, Neisseria gonorrhoeae
gcgcgcgacggcaacaagtg

SEQ ID NO: 52950 - DNA, 20 bp, Neisseria gonorrhoeae
agacggcatcgggttcgcaa

SEQ ID NO: 52951 - DNA, 20 bp, Neisseria gonorrhoeae
gcaatgccgtctgaaggagg

SEQ ID NO: 52952 - DNA, 20 bp, Neisseria gonorrhoeae
agacggcattgcgaacccga

SEQ ID NO: 52953 - DNA, 20 bp, Neisseria gonorrhoeae
cgaacccgatgccgtctgaa

SEQ ID NO: 52954 - DNA, 20 bp, Neisseria gonorrhoeae
gtctccaacgtggacggctc

SEQ ID NO: 52955 - DNA, 20 bp, Neisseria gonorrhoeae
tccaaagtccacccggaaac

SEQ ID NO: 52956 - DNA, 20 bp, Neisseria gonorrhoeae
ccgggtggactttggacaat

SEQ ID NO: 52957 - DNA, 20 bp, Neisseria gonorrhoeae
cgggtggactttggacaata

SEQ ID NO: 52958 - DNA, 20 bp, Neisseria gonorrhoeae
ggacaatacgtcgcgcagtt

SEQ ID NO: 52959 - DNA, 20 bp, Neisseria gonorrhoeae
cctcgcttgaaaaacgcagc

SEQ ID NO: 52960 - DNA, 20 bp, Neisseria gonorrhoeae
aaaaacgcagcaacctgccc

SEQ ID NO: 52961 - DNA, 20 bp, Neisseria gonorrhoeae
ccaacgtctttgcacaagca

SEQ ID NO: 52962 - DNA, 20 bp, Neisseria gonorrhoeae
gcacaagcagaagcctttat

SEQ ID NO: 52963 - DNA, 20 bp, Neisseria gonorrhoeae
cacaagcagaagcctttatg

SEQ ID NO: 52964 - DNA, 20 bp, Neisseria gonorrhoeae
gggttccggattcccgcttt

SEQ ID NO: 52965 - DNA, 20 bp, Neisseria gonorrhoeae
ggttccggattcccgctttc

SEQ ID NO: 52966 - DNA, 20 bp, Neisseria gonorrhoeae
cggattcccgctttcgcggg

SEQ ID NO: 52967 - DNA, 20 bp, Neisseria gonorrhoeae
ccgctttcgcgggaatggcg

SEQ ID NO: 52968 - DNA, 20 bp, Neisseria gonorrhoeae
cgcgggaatggcgaagagtg

SEQ ID NO: 52969 - DNA, 20 bp, Neisseria gonorrhoeae
cgccagccttgacgcgtcca

SEQ ID NO: 52970 - DNA, 20 bp, Neisseria gonorrhoeae
acgcgtccagtgcgccgacg

SEQ ID NO: 52971 - DNA, 20 bp, Neisseria gonorrhoeae
gcggtttcgccgtgggactt

SEQ ID NO: 52972 - DNA, 20 bp, Neisseria gonorrhoeae
cgccgtgggactttatccgg

SEQ ID NO: 52973 - DNA, 20 bp, Neisseria gonorrhoeae
gccgtgggactttatccgga

SEQ ID NO: 52974 - DNA, 20 bp, Neisseria gonorrhoeae
ggcgatgtgggcgagggtgt

SEQ ID NO: 52975 - DNA, 20 bp, Neisseria gonorrhoeae
cccgcgtccgttttctgcgt

SEQ ID NO: 52976 - DNA, 20 bp, Neisseria gonorrhoeae
tctgcgtcggtcattggggt

SEQ ID NO: 52977 - DNA, 20 bp, Neisseria gonorrhoeae
ctgcgtcggtcattggggtt

SEQ ID NO: 52978 - DNA, 20 bp, Neisseria gonorrhoeae
tgcgtcggtcattggggttt

SEQ ID NO: 52979 - DNA, 20 bp, Neisseria gonorrhoeae
gggcggcatagatatggtag

SEQ ID NO: 52980 - DNA, 20 bp, Neisseria gonorrhoeae
cgtagccgcactcgtcccca

SEQ ID NO: 52981 - DNA, 20 bp, Neisseria gonorrhoeae
gatttcggctttggggacga

SEQ ID NO: 52982 - DNA, 20 bp, Neisseria gonorrhoeae
cggctttggggacgagtgcg

SEQ ID NO: 52983 - DNA, 20 bp, Neisseria gonorrhoeae
ggctttggggacgagtgcgg

SEQ ID NO: 52984 - DNA, 20 bp, Neisseria gonorrhoeae
ttttccgatagattcctgtg

SEQ ID NO: 52985 - DNA, 20 bp, Neisseria gonorrhoeae
tttccgatagattcctgtgg

SEQ ID NO: 52986 - DNA, 20 bp, Neisseria gonorrhoeae
ttccgatagattcctgtggt

SEQ ID NO: 52987 - DNA, 20 bp, Neisseria gonorrhoeae
tccgatagattcctgtggtt

SEQ ID NO: 52988 - DNA, 20 bp, Neisseria gonorrhoeae
ccgatagattcctgtggttt

SEQ ID NO: 52989 - DNA, 20 bp, Neisseria gonorrhoeae
tgcccacgccgcgcgtcccg

SEQ ID NO: 52990 - DNA, 20 bp, Neisseria gonorrhoeae
gcccacgccgcgcgtcccgg

SEQ ID NO: 52991 - DNA, 20 bp, Neisseria gonorrhoeae
cccacgccgcgcgtcccggt

SEQ ID NO: 52992 - DNA, 20 bp, Neisseria gonorrhoeae
gtccaaggcattttgcaggg

SEQ ID NO: 52993 - DNA, 20 bp, Neisseria gonorrhoeae
gacgaaggcaggctgcacca

SEQ ID NO: 52994 - DNA, 20 bp, Neisseria gonorrhoeae
gcgcgtgtgtcggcaagggc

SEQ ID NO: 52995 - DNA, 20 bp, Neisseria gonorrhoeae
gttgagcgtgtggaacacga

SEQ ID NO: 52996 - DNA, 20 bp, Neisseria gonorrhoeae
ttgagcgtgtggaacacgag

SEQ ID NO: 52997 - DNA, 20 bp, Neisseria gonorrhoeae
agcgtgtggaacacgagttg

SEQ ID NO: 52998 - DNA, 20 bp, Neisseria gonorrhoeae
gtgtacttgccggctgtcgc

SEQ ID NO: 52999 - DNA, 20 bp, Neisseria gonorrhoeae
acggcatggagcatgacttt

SEQ ID NO: 53000 - DNA, 20 bp, Neisseria gonorrhoeae
gtcgcggacaaaacgatggt

SEQ ID NO: 53001 - DNA, 20 bp, Neisseria gonorrhoeae
tcgcggacaaaacgatggtt

SEQ ID NO: 53002 - DNA, 20 bp, Neisseria gonorrhoeae
acgaagcaatattgtttatc

SEQ ID NO: 53003 - DNA, 20 bp, Neisseria gonorrhoeae
cttcgtcaaccatcgttttg

SEQ ID NO: 53004 - DNA, 20 bp, Neisseria gonorrhoeae
cggatgcccggcagtggcag

SEQ ID NO: 53005 - DNA, 20 bp, Neisseria gonorrhoeae
cggcccgctttcggcattgt

SEQ ID NO: 53006 - DNA, 20 bp, Neisseria gonorrhoeae
ggcccgctttcggcattgtg

SEQ ID NO: 53007 - DNA, 20 bp, Neisseria gonorrhoeae
cggcattgtgtaccgcagcc

SEQ ID NO: 53008 - DNA, 20 bp, Neisseria gonorrhoeae
ggcattgtgtaccgcagcca

SEQ ID NO: 53009 - DNA, 20 bp, Neisseria gonorrhoeae
gcgatgcggggcgtgccgcg

SEQ ID NO: 53010 - DNA, 20 bp, Neisseria gonorrhoeae
ggcgacttccatcgcgcctt

SEQ ID NO: 53011 - DNA, 20 bp, Neisseria gonorrhoeae
gcgacttccatcgcgccttc

SEQ ID NO: 53012 - DNA, 20 bp, Neisseria gonorrhoeae
catcgcgccttcttcgtcca

SEQ ID NO: 53013 - DNA, 20 bp, Neisseria gonorrhoeae
cgccgcgtgcgcgatttcgc

SEQ ID NO: 53014 - DNA, 20 bp, Neisseria gonorrhoeae
gtgccagccgcgcccggtcg

SEQ ID NO: 53015 - DNA, 20 bp, Neisseria gonorrhoeae
tgccagccgcgcccggtcga

SEQ ID NO: 53016 - DNA, 20 bp, Neisseria gonorrhoeae
gttcggcgataaggtgcgct

SEQ ID NO: 53017 - DNA, 20 bp, Neisseria gonorrhoeae
ttcggcgataaggtgcgctt

SEQ ID NO: 53018 - DNA, 20 bp, Neisseria gonorrhoeae
ggcgataaggtgcgcttttc

SEQ ID NO: 53019 - DNA, 20 bp, Neisseria gonorrhoeae
gtcgttttccaccatctgcc

SEQ ID NO: 53020 - DNA, 20 bp, Neisseria gonorrhoeae
tccaccatctgccgcatcag

SEQ ID NO: 53021 - DNA, 20 bp, Neisseria gonorrhoeae
ccaccatctgccgcatcagc

SEQ ID NO: 53022 - DNA, 20 bp, Neisseria gonorrhoeae
caccatctgccgcatcagct

SEQ ID NO: 53023 - DNA, 20 bp, Neisseria gonorrhoeae
atggtttcttcggcgatttc

SEQ ID NO: 53024 - DNA, 20 bp, Neisseria gonorrhoeae
cccgtgccgccgtatcgggc

SEQ ID NO: 53025 - DNA, 20 bp, Neisseria gonorrhoeae
tttgaccggtttccggacga

SEQ ID NO: 53026 - DNA, 20 bp, Neisseria gonorrhoeae
gaccggtttccggacgaact

SEQ ID NO: 53027 - DNA, 20 bp, Neisseria gonorrhoeae
accggtttccggacgaactg

SEQ ID NO: 53028 - DNA, 20 bp, Neisseria gonorrhoeae
ccggacgaactggaacattc

SEQ ID NO: 53029 - DNA, 20 bp, Neisseria gonorrhoeae
gaaatttgaaacatcaaaca

SEQ ID NO: 53030 - DNA, 20 bp, Neisseria gonorrhoeae
gaaacatcaaacaaatttgc

SEQ ID NO: 53031 - DNA, 20 bp, Neisseria gonorrhoeae
aaacatcaaacaaatttgca

SEQ ID NO: 53032 - DNA, 20 bp, Neisseria gonorrhoeae
gcagcattcgcaggcttaag

SEQ ID NO: 53033 - DNA, 20 bp, Neisseria gonorrhoeae
cagcattcgcaggcttaagc

SEQ ID NO: 53034 - DNA, 20 bp, Neisseria gonorrhoeae
ccgaaagtgaaaaccgcatc

SEQ ID NO: 53035 - DNA, 20 bp, Neisseria gonorrhoeae
ccggtttggcttggacggaa

SEQ ID NO: 53036 - DNA, 20 bp, Neisseria gonorrhoeae
ggcttggacggaagtcggcg

SEQ ID NO: 53037 - DNA, 20 bp, Neisseria gonorrhoeae
gcttggacggaagtcggcgg

SEQ ID NO: 53038 - DNA, 20 bp, Neisseria gonorrhoeae
gacggaagtcggcggcgaat

SEQ ID NO: 53039 - DNA, 20 bp, Neisseria gonorrhoeae
ggagagcagggcggttgaag

SEQ ID NO: 53040 - DNA, 20 bp, Neisseria gonorrhoeae
aagcgagcaacgccaaaatg

SEQ ID NO: 53041 - DNA, 20 bp, Neisseria gonorrhoeae
tggcttttgcttttttgcgc

SEQ ID NO: 53042 - DNA, 20 bp, Neisseria gonorrhoeae
ggcttttgcttttttgcgcg

SEQ ID NO: 53043 - DNA, 20 bp, Neisseria gonorrhoeae
gcttttgcttttttgcgcgc

SEQ ID NO: 53044 - DNA, 20 bp, Neisseria gonorrhoeae
gatagacaggaagtccattt

SEQ ID NO: 53045 - DNA, 20 bp, Neisseria gonorrhoeae
tgtccttggtcatagtgact

SEQ ID NO: 53046 - DNA, 20 bp, Neisseria gonorrhoeae
gtccttggtcatagtgactg

SEQ ID NO: 53047 - DNA, 20 bp, Neisseria gonorrhoeae
tccttggtcatagtgactgg

SEQ ID NO: 53048 - DNA, 20 bp, Neisseria gonorrhoeae
gtcatagtgactgggttatc

SEQ ID NO: 53049 - DNA, 20 bp, Neisseria gonorrhoeae
ccataatggtttcaatgaat

SEQ ID NO: 53050 - DNA, 20 bp, Neisseria gonorrhoeae
cataatggtttcaatgaatg

SEQ ID NO: 53051 - DNA, 20 bp, Neisseria gonorrhoeae
caatgaatggtttacgcttg

SEQ ID NO: 53052 - DNA, 20 bp, Neisseria gonorrhoeae
aatgaatggtttacgcttgg

SEQ ID NO: 53053 - DNA, 20 bp, Neisseria gonorrhoeae
acgcttggcggttgagaagc

SEQ ID NO: 53054 - DNA, 20 bp, Neisseria gonorrhoeae
tggcaagccattgtctgaca

SEQ ID NO: 53055 - DNA, 20 bp, Neisseria gonorrhoeae
tctgacatgtgaaggaacca

SEQ ID NO: 53056 - DNA, 20 bp, Neisseria gonorrhoeae
aaagaatgtccaggcgattt

SEQ ID NO: 53057 - DNA, 20 bp, Neisseria gonorrhoeae
cggcatgtgtactgtaagca

SEQ ID NO: 53058 - DNA, 20 bp, Neisseria gonorrhoeae
ggcatgtgtactgtaagcag

SEQ ID NO: 53059 - DNA, 20 bp, Neisseria gonorrhoeae
cggatttgaaaggtatcaag

SEQ ID NO: 53060 - DNA, 20 bp, Neisseria gonorrhoeae
gaaaggtatcaagcaccgtg

SEQ ID NO: 53061 - DNA, 20 bp, Neisseria gonorrhoeae
aaaggtatcaagcaccgtgt

SEQ ID NO: 53062 - DNA, 20 bp, Neisseria gonorrhoeae
gtgattacggaaatgcaaaa

SEQ ID NO: 53063 - DNA, 20 bp, Neisseria gonorrhoeae
cggaaatgcaaaaatcaagg

SEQ ID NO: 53064 - DNA, 20 bp, Neisseria gonorrhoeae
ttacggtagccacagtagtc

SEQ ID NO: 53065 - DNA, 20 bp, Neisseria gonorrhoeae
tacggtagccacagtagtcc

SEQ ID NO: 53066 - DNA, 20 bp, Neisseria gonorrhoeae
acggtagccacagtagtcca

SEQ ID NO: 53067 - DNA, 20 bp, Neisseria gonorrhoeae
cggtagccacagtagtccaa

SEQ ID NO: 53068 - DNA, 20 bp, Neisseria gonorrhoeae
cacgggcaataacttcccct

SEQ ID NO: 53069 - DNA, 20 bp, Neisseria gonorrhoeae
ggcattgcgtttgaaattag

SEQ ID NO: 53070 - DNA, 20 bp, Neisseria gonorrhoeae
cgtttgaaattaggtgaggc

SEQ ID NO: 53071 - DNA, 20 bp, Neisseria gonorrhoeae
gaaattaggtgaggcaactg

SEQ ID NO: 53072 - DNA, 20 bp, Neisseria gonorrhoeae
aaattaggtgaggcaactga

SEQ ID NO: 53073 - DNA, 20 bp, Neisseria gonorrhoeae
ggtgaggcaactgaaaaatt

SEQ ID NO: 53074 - DNA, 20 bp, Neisseria gonorrhoeae
tgattcatacacccaaacag

SEQ ID NO: 53075 - DNA, 20 bp, Neisseria gonorrhoeae
atacacccaaacagacaatg

SEQ ID NO: 53076 - DNA, 20 bp, Neisseria gonorrhoeae
taggcagaatctcttgctca

SEQ ID NO: 53077 - DNA, 20 bp, Neisseria gonorrhoeae
ctcaacagcagatttcaact

SEQ ID NO: 53078 - DNA, 20 bp, Neisseria gonorrhoeae
tcgaagttgaaatctgctgt

SEQ ID NO: 53079 - DNA, 20 bp, Neisseria gonorrhoeae
ggcttctttcggctcatcct

SEQ ID NO: 53080 - DNA, 20 bp, Neisseria gonorrhoeae
tttcggctcatcctctgcat

SEQ ID NO: 53081 - DNA, 20 bp, Neisseria gonorrhoeae
cggctcatcctctgcatcag

SEQ ID NO: 53082 - DNA, 20 bp, Neisseria gonorrhoeae
ggctcatcctctgcatcagc

SEQ ID NO: 53083 - DNA, 20 bp, Neisseria gonorrhoeae
agtaccatttactttggctg

SEQ ID NO: 53084 - DNA, 20 bp, Neisseria gonorrhoeae
gggggcggtgttggagccga

SEQ ID NO: 53085 - DNA, 20 bp, Neisseria gonorrhoeae
gagccgaatatcaaaagctg

SEQ ID NO: 53086 - DNA, 20 bp, Neisseria gonorrhoeae
ggatagcgaaggcgcaaggc

SEQ ID NO: 53087 - DNA, 20 bp, Neisseria gonorrhoeae
gatagcgaaggcgcaaggct

SEQ ID NO: 53088 - DNA, 20 bp, Neisseria gonorrhoeae
cgccttcgctatccaaagca

SEQ ID NO: 53089 - DNA, 20 bp, Neisseria gonorrhoeae
gaaaaacaagacatcctcta

SEQ ID NO: 53090 - DNA, 20 bp, Neisseria gonorrhoeae
aaaaacaagacatcctctac

SEQ ID NO: 53091 - DNA, 20 bp, Neisseria gonorrhoeae
ccgccttcttccacgacatc

SEQ ID NO: 53092 - DNA, 20 bp, Neisseria gonorrhoeae
ttccacgacatcgccaaagg

SEQ ID NO: 53093 - DNA, 20 bp, Neisseria gonorrhoeae
cacgacatcgccaaaggacg

SEQ ID NO: 53094 - DNA, 20 bp, Neisseria gonorrhoeae
ggatttggttgccgccggcg

SEQ ID NO: 53095 - DNA, 20 bp, Neisseria gonorrhoeae
gatttggttgccgccggcgc

SEQ ID NO: 53096 - DNA, 20 bp, Neisseria gonorrhoeae
ggttgccgccggcgcggatg

SEQ ID NO: 53097 - DNA, 20 bp, Neisseria gonorrhoeae
gttgccgccggcgcggatgc

SEQ ID NO: 53098 - DNA, 20 bp, Neisseria gonorrhoeae
ccgccggcgcggatgccgtc

SEQ ID NO: 53099 - DNA, 20 bp, Neisseria gonorrhoeae
ccgaagccctcaaaggcacg

SEQ ID NO: 53100 - DNA, 20 bp, Neisseria gonorrhoeae
cgctgattgccgacggcggc

SEQ ID NO: 53101 - DNA, 20 bp, Neisseria gonorrhoeae
ccgacggcggcatccgcttc

SEQ ID NO: 53102 - DNA, 20 bp, Neisseria gonorrhoeae
tccggcgacatcgccaaagc

SEQ ID NO: 53103 - DNA, 20 bp, Neisseria gonorrhoeae
ggcgatgtcgccggagaagc

SEQ ID NO: 53104 - DNA, 20 bp, Neisseria gonorrhoeae
cttgggcgcgatgagccaag

SEQ ID NO: 53105 - DNA, 20 bp, Neisseria gonorrhoeae
ggcgcgatgagccaaggttc

SEQ ID NO: 53106 - DNA, 20 bp, Neisseria gonorrhoeae
tgccgaccgctacttccaag

SEQ ID NO: 53107 - DNA, 20 bp, Neisseria gonorrhoeae
caagacaaaaccgacagcac

SEQ ID NO: 53108 - DNA, 20 bp, Neisseria gonorrhoeae
gtcggtgctgtcggttttgt

SEQ ID NO: 53109 - DNA, 20 bp, Neisseria gonorrhoeae
ccgaggctatcaggggcgca

SEQ ID NO: 53110 - DNA, 20 bp, Neisseria gonorrhoeae
cgaggctatcaggggcgcat

SEQ ID NO: 53111 - DNA, 20 bp, Neisseria gonorrhoeae
ggtcaccgtcgggcaaaccg

SEQ ID NO: 53112 - DNA, 20 bp, Neisseria gonorrhoeae
ggttcgatgcggacggtttg

SEQ ID NO: 53113 - DNA, 20 bp, Neisseria gonorrhoeae
gatgcggacggtttgcccga

SEQ ID NO: 53114 - DNA, 20 bp, Neisseria gonorrhoeae
cggcgatttcgccatacgga

SEQ ID NO: 53115 - DNA, 20 bp, Neisseria gonorrhoeae
ggcgatttcgccatacggac

SEQ ID NO: 53116 - DNA, 20 bp, Neisseria gonorrhoeae
cgccatacggacgggcatcg

SEQ ID NO: 53117 - DNA, 20 bp, Neisseria gonorrhoeae
gccatacggacgggcatcgt

SEQ ID NO: 53118 - DNA, 20 bp, Neisseria gonorrhoeae
gatgcgcccgtcgatttttg

SEQ ID NO: 53119 - DNA, 20 bp, Neisseria gonorrhoeae
gtctccggcggcccgatgga

SEQ ID NO: 53120 - DNA, 20 bp, Neisseria gonorrhoeae
gggttggatgtttgccacgc

SEQ ID NO: 53121 - DNA, 20 bp, Neisseria gonorrhoeae
gatgtttgccacgccgatga

SEQ ID NO: 53122 - DNA, 20 bp, Neisseria gonorrhoeae
gccacgccgatgaccttgcc

SEQ ID NO: 53123 - DNA, 20 bp, Neisseria gonorrhoeae
ccacgccgatgaccttgccc

SEQ ID NO: 53124 - DNA, 20 bp, Neisseria gonorrhoeae
gggtatgtttacggcaaact

SEQ ID NO: 53125 - DNA, 20 bp, Neisseria gonorrhoeae
acggcaaactcgatgaactg

SEQ ID NO: 53126 - DNA, 20 bp, Neisseria gonorrhoeae
cggcaaactcgatgaactgc

SEQ ID NO: 53127 - DNA, 20 bp, Neisseria gonorrhoeae
gtatttggcgacccacgcag

SEQ ID NO: 53128 - DNA, 20 bp, Neisseria gonorrhoeae
ccgggcagggacagaccgag

SEQ ID NO: 53129 - DNA, 20 bp, Neisseria gonorrhoeae
accggccgcgcgcgcgtgtt

SEQ ID NO: 53130 - DNA, 20 bp, Neisseria gonorrhoeae
ctggctttcaaacacgcgcg

SEQ ID NO: 53131 - DNA, 20 bp, Neisseria gonorrhoeae
caaacacgcgcgcgcggccg

SEQ ID NO: 53132 - DNA, 20 bp, Neisseria gonorrhoeae
aaacacgcgcgcgcggccgg

SEQ ID NO: 53133 - DNA, 20 bp, Neisseria gonorrhoeae
gaggatgctctcgtccacgc

SEQ ID NO: 53134 - DNA, 20 bp, Neisseria gonorrhoeae
catggtgttggaacgcggct

SEQ ID NO: 53135 - DNA, 20 bp, Neisseria gonorrhoeae
atggtgttggaacgcggctc

SEQ ID NO: 53136 - DNA, 20 bp, Neisseria gonorrhoeae
gaacgcggctcgaggacggc

SEQ ID NO: 53137 - DNA, 20 bp, Neisseria gonorrhoeae
gcgcaaaccttgaatcgtgg

SEQ ID NO: 53138 - DNA, 20 bp, Neisseria gonorrhoeae
aatcgtggtttcgatggcgg

SEQ ID NO: 53139 - DNA, 20 bp, Neisseria gonorrhoeae
caagacccaggcgagcatgg

SEQ ID NO: 53140 - DNA, 20 bp, Neisseria gonorrhoeae
gaatatgccggactcgcgcc

SEQ ID NO: 53141 - DNA, 20 bp, Neisseria gonorrhoeae
ctcatcggcggtgtaccgga

SEQ ID NO: 53142 - DNA, 20 bp, Neisseria gonorrhoeae
cctttcggattttggacggc

SEQ ID NO: 53143 - DNA, 20 bp, Neisseria gonorrhoeae
cggattttggacggcttcgt

SEQ ID NO: 53144 - DNA, 20 bp, Neisseria gonorrhoeae
ggattttggacggcttcgtc

SEQ ID NO: 53145 - DNA, 20 bp, Neisseria gonorrhoeae
tggacggcttcgtccctcac

SEQ ID NO: 53146 - DNA, 20 bp, Neisseria gonorrhoeae
ggacggcttcgtccctcacc

SEQ ID NO: 53147 - DNA, 20 bp, Neisseria gonorrhoeae
ggcgaccacgcgtccgcaca

SEQ ID NO: 53148 - DNA, 20 bp, Neisseria gonorrhoeae
tgggcaggggttgtgcggac

SEQ ID NO: 53149 - DNA, 20 bp, Neisseria gonorrhoeae
gggcaggggttgtgcggacg

SEQ ID NO: 53150 - DNA, 20 bp, Neisseria gonorrhoeae
ggcaggggttgtgcggacgc

SEQ ID NO: 53151 - DNA, 20 bp, Neisseria gonorrhoeae
tgcggacgcgtggtcgccca

SEQ ID NO: 53152 - DNA, 20 bp, Neisseria gonorrhoeae
tcgggatgttctttttcttc

SEQ ID NO: 53153 - DNA, 20 bp, Neisseria gonorrhoeae
cgggatgttctttttcttca

SEQ ID NO: 53154 - DNA, 20 bp, Neisseria gonorrhoeae
gggatgttctttttcttcat

SEQ ID NO: 53155 - DNA, 20 bp, Neisseria gonorrhoeae
tttttcttcatacaccggca

SEQ ID NO: 53156 - DNA, 20 bp, Neisseria gonorrhoeae
ttcttcatacaccggcaata

SEQ ID NO: 53157 - DNA, 20 bp, Neisseria gonorrhoeae
acggcatcggtcaggctttc

SEQ ID NO: 53158 - DNA, 20 bp, Neisseria gonorrhoeae
cggcttcgaccacggcttcg

SEQ ID NO: 53159 - DNA, 20 bp, Neisseria gonorrhoeae
ggcttcgaccacggcttcgg

SEQ ID NO: 53160 - DNA, 20 bp, Neisseria gonorrhoeae
gaccacggcttcggcgcggg

SEQ ID NO: 53161 - DNA, 20 bp, Neisseria gonorrhoeae
ggcgcgggcgcgtgccgcca

SEQ ID NO: 53162 - DNA, 20 bp, Neisseria gonorrhoeae
cgcgggatgattttttccgc

SEQ ID NO: 53163 - DNA, 20 bp, Neisseria gonorrhoeae
tttccgccaagccgccgtag

SEQ ID NO: 53164 - DNA, 20 bp, Neisseria gonorrhoeae
ttccgccaagccgccgtagg

SEQ ID NO: 53165 - DNA, 20 bp, Neisseria gonorrhoeae
tccgccaagccgccgtaggt

SEQ ID NO: 53166 - DNA, 20 bp, Neisseria gonorrhoeae
ccgccaagccgccgtaggtt

SEQ ID NO: 53167 - DNA, 20 bp, Neisseria gonorrhoeae
tccagcccgtaggcgattgc

SEQ ID NO: 53168 - DNA, 20 bp, Neisseria gonorrhoeae
cggcggcggtaggttcgttg

SEQ ID NO: 53169 - DNA, 20 bp, Neisseria gonorrhoeae
gttgagcaggcgcaatacgt

SEQ ID NO: 53170 - DNA, 20 bp, Neisseria gonorrhoeae
agcaggcgcaatacgttcaa

SEQ ID NO: 53171 - DNA, 20 bp, Neisseria gonorrhoeae
aaaccggccagacgcgcggc

SEQ ID NO: 53172 - DNA, 20 bp, Neisseria gonorrhoeae
tggcggcggtttattacgcg

SEQ ID NO: 53173 - DNA, 20 bp, Neisseria gonorrhoeae
ttgggcttttttatcggcat

SEQ ID NO: 53174 - DNA, 20 bp, Neisseria gonorrhoeae
tgggcttttttatcggcatc

SEQ ID NO: 53175 - DNA, 20 bp, Neisseria gonorrhoeae
gggcttttttatcggcatca

SEQ ID NO: 53176 - DNA, 20 bp, Neisseria gonorrhoeae
ggcttttttatcggcatcag

SEQ ID NO: 53177 - DNA, 20 bp, Neisseria gonorrhoeae
gatgccgccatacttgccac

SEQ ID NO: 53178 - DNA, 20 bp, Neisseria gonorrhoeae
ccaccgcgccctaccacgcc

SEQ ID NO: 53179 - DNA, 20 bp, Neisseria gonorrhoeae
gggcaggagcgcggcggcgt

SEQ ID NO: 53180 - DNA, 20 bp, Neisseria gonorrhoeae
gccgttgacgaggacttttc

SEQ ID NO: 53181 - DNA, 20 bp, Neisseria gonorrhoeae
acgaggacttttccgtccgg

SEQ ID NO: 53182 - DNA, 20 bp, Neisseria gonorrhoeae
cactgaccggctgtgcgacc

SEQ ID NO: 53183 - DNA, 20 bp, Neisseria gonorrhoeae
actgaccggctgtgcgaccg

SEQ ID NO: 53184 - DNA, 20 bp, Neisseria gonorrhoeae
caaaagtcgcctcctgcaat

SEQ ID NO: 53185 - DNA, 20 bp, Neisseria gonorrhoeae
cgtattgcaggaggcgactt

SEQ ID NO: 53186 - DNA, 20 bp, Neisseria gonorrhoeae
caggaggcgacttttgcaac

SEQ ID NO: 53187 - DNA, 20 bp, Neisseria gonorrhoeae
ctgccggttttttccccttc

SEQ ID NO: 53188 - DNA, 20 bp, Neisseria gonorrhoeae
tttccccttccctgcggacg

SEQ ID NO: 53189 - DNA, 20 bp, Neisseria gonorrhoeae
ttccccttccctgcggacgg

SEQ ID NO: 53190 - DNA, 20 bp, Neisseria gonorrhoeae
tccccttccctgcggacggt

SEQ ID NO: 53191 - DNA, 20 bp, Neisseria gonorrhoeae
ccccttccctgcggacggtt

SEQ ID NO: 53192 - DNA, 20 bp, Neisseria gonorrhoeae
ggcagacataatctcgtaag

SEQ ID NO: 53193 - DNA, 20 bp, Neisseria gonorrhoeae
cgcggtgtttcagcaccccg

SEQ ID NO: 53194 - DNA, 20 bp, Neisseria gonorrhoeae
gcggtgtttcagcaccccgt

SEQ ID NO: 53195 - DNA, 20 bp, Neisseria gonorrhoeae
cagcaccccgtcctgatgga

SEQ ID NO: 53196 - DNA, 20 bp, Neisseria gonorrhoeae
agcaccccgtcctgatggat

SEQ ID NO: 53197 - DNA, 20 bp, Neisseria gonorrhoeae
cccgcctgacggatgtcccg

SEQ ID NO: 53198 - DNA, 20 bp, Neisseria gonorrhoeae
atttggtaatggttttcgca

SEQ ID NO: 53199 - DNA, 20 bp, Neisseria gonorrhoeae
ggtaatggttttcgcaatcg

SEQ ID NO: 53200 - DNA, 20 bp, Neisseria gonorrhoeae
gtaatggttttcgcaatcgc

SEQ ID NO: 53201 - DNA, 20 bp, Neisseria gonorrhoeae
tcgcaatcgcattgaccgcc

SEQ ID NO: 53202 - DNA, 20 bp, Neisseria gonorrhoeae
caatccgcacgcgccatcgt

SEQ ID NO: 53203 - DNA, 20 bp, Neisseria gonorrhoeae
aatccgcacgcgccatcgtt

SEQ ID NO: 53204 - DNA, 20 bp, Neisseria gonorrhoeae
ccgccctgaaaacggggttg

SEQ ID NO: 53205 - DNA, 20 bp, Neisseria gonorrhoeae
gtgccaaccccgttttcagg

SEQ ID NO: 53206 - DNA, 20 bp, Neisseria gonorrhoeae
tgccaaccccgttttcaggg

SEQ ID NO: 53207 - DNA, 20 bp, Neisseria gonorrhoeae
tcggcaggtgttcggatacc

SEQ ID NO: 53208 - DNA, 20 bp, Neisseria gonorrhoeae
ggataccgcaccggtctctt

SEQ ID NO: 53209 - DNA, 20 bp, Neisseria gonorrhoeae
cgattggaacgccccttcat

SEQ ID NO: 53210 - DNA, 20 bp, Neisseria gonorrhoeae
gaacgccccttcatccgctt

SEQ ID NO: 53211 - DNA, 20 bp, Neisseria gonorrhoeae
atccgcttccgtatccgata

SEQ ID NO: 53212 - DNA, 20 bp, Neisseria gonorrhoeae
agacggcataggcagacaaa

SEQ ID NO: 53213 - DNA, 20 bp, Neisseria gonorrhoeae
ccaacatcctccccctttcc

SEQ ID NO: 53214 - DNA, 20 bp, Neisseria gonorrhoeae
caacatcctccccctttcca

SEQ ID NO: 53215 - DNA, 20 bp, Neisseria gonorrhoeae
ccatcggtgcaatattcggc

SEQ ID NO: 53216 - DNA, 20 bp, Neisseria gonorrhoeae
catcggtgcaatattcggca

SEQ ID NO: 53217 - DNA, 20 bp, Neisseria gonorrhoeae
cctccgccaattctcgcagc

SEQ ID NO: 53218 - DNA, 20 bp, Neisseria gonorrhoeae
ctccgccaattctcgcagcg

SEQ ID NO: 53219 - DNA, 20 bp, Neisseria gonorrhoeae
tcgcagcgcacacgctgcca

SEQ ID NO: 53220 - DNA, 20 bp, Neisseria gonorrhoeae
gcggaggaaacgccttatgt

SEQ ID NO: 53221 - DNA, 20 bp, Neisseria gonorrhoeae
attgccgttgggcagcctga

SEQ ID NO: 53222 - DNA, 20 bp, Neisseria gonorrhoeae
ccgttgggcagcctgacctt

SEQ ID NO: 53223 - DNA, 20 bp, Neisseria gonorrhoeae
ggcagcctgaccttatccct

SEQ ID NO: 53224 - DNA, 20 bp, Neisseria gonorrhoeae
gtacaatctcgaaggcagcg

SEQ ID NO: 53225 - DNA, 20 bp, Neisseria gonorrhoeae
tacaatctcgaaggcagcga

SEQ ID NO: 53226 - DNA, 20 bp, Neisseria gonorrhoeae
tgcgcctgtcggagcagggc

SEQ ID NO: 53227 - DNA, 20 bp, Neisseria gonorrhoeae
gcgcctgtcggagcagggcg

SEQ ID NO: 53228 - DNA, 20 bp, Neisseria gonorrhoeae
cgcctgtcggagcagggcga

SEQ ID NO: 53229 - DNA, 20 bp, Neisseria gonorrhoeae
tgctgtccgtcgtttccgcc

SEQ ID NO: 53230 - DNA, 20 bp, Neisseria gonorrhoeae
gctgtccgtcgtttccgcct

SEQ ID NO: 53231 - DNA, 20 bp, Neisseria gonorrhoeae
ctgtccgtcgtttccgcctg

SEQ ID NO: 53232 - DNA, 20 bp, Neisseria gonorrhoeae
ccgcctgtaccgaaatcaac

SEQ ID NO: 53233 - DNA, 20 bp, Neisseria gonorrhoeae
cgcctgtaccgaaatcaacg

SEQ ID NO: 53234 - DNA, 20 bp, Neisseria gonorrhoeae
cgccgccatgaccactcgcg

SEQ ID NO: 53235 - DNA, 20 bp, Neisseria gonorrhoeae
aacgaaaccgacgctcgcgt

SEQ ID NO: 53236 - DNA, 20 bp, Neisseria gonorrhoeae
acgaaaccgacgctcgcgta

SEQ ID NO: 53237 - DNA, 20 bp, Neisseria gonorrhoeae
tcgaacttggttgccgatgt

SEQ ID NO: 53238 - DNA, 20 bp, Neisseria gonorrhoeae
gacaatacgcgagcgtcggt

SEQ ID NO: 53239 - DNA, 20 bp, Neisseria gonorrhoeae
acggaaactaaacgcccgat

SEQ ID NO: 53240 - DNA, 20 bp, Neisseria gonorrhoeae
cggaaactaaacgcccgatg

SEQ ID NO: 53241 - DNA, 20 bp, Neisseria gonorrhoeae
ccatacaaaatgccgtctga

SEQ ID NO: 53242 - DNA, 20 bp, Neisseria gonorrhoeae
catacaaaatgccgtctgaa

SEQ ID NO: 53243 - DNA, 20 bp, Neisseria gonorrhoeae
tccagacggcattttttgtt

SEQ ID NO: 53244 - DNA, 20 bp, Neisseria gonorrhoeae
cgccaaagctgcgccatccc

SEQ ID NO: 53245 - DNA, 20 bp, Neisseria gonorrhoeae
ggcgcaactgggtgcggatg

SEQ ID NO: 53246 - DNA, 20 bp, Neisseria gonorrhoeae
gcgcaactgggtgcggatgt

SEQ ID NO: 53247 - DNA, 20 bp, Neisseria gonorrhoeae
gaggcgttcgcgggcgcgtt

SEQ ID NO: 53248 - DNA, 20 bp, Neisseria gonorrhoeae
gcgggcgcgttcgtagctgt

SEQ ID NO: 53249 - DNA, 20 bp, Neisseria gonorrhoeae
ccgacttactgcattcggaa

SEQ ID NO: 53250 - DNA, 20 bp, Neisseria gonorrhoeae
ctgcattcggaaacggtttc

SEQ ID NO: 53251 - DNA, 20 bp, Neisseria gonorrhoeae
ggaaacggtttcggaaagat

SEQ ID NO: 53252 - DNA, 20 bp, Neisseria gonorrhoeae
cggaaagattacccggtcag

SEQ ID NO: 53253 - DNA, 20 bp, Neisseria gonorrhoeae
ggaaagattacccggtcaga

SEQ ID NO: 53254 - DNA, 20 bp, Neisseria gonorrhoeae
cacaaaaccgcattcaggaa

SEQ ID NO: 53255 - DNA, 20 bp, Neisseria gonorrhoeae
aggaaaaagcgtggatacgc

SEQ ID NO: 53256 - DNA, 20 bp, Neisseria gonorrhoeae
caaaccgcgccgtatcaggc

SEQ ID NO: 53257 - DNA, 20 bp, Neisseria gonorrhoeae
gcaaggccgaagacattact

SEQ ID NO: 53258 - DNA, 20 bp, Neisseria gonorrhoeae
caaggccgaagacattactg

SEQ ID NO: 53259 - DNA, 20 bp, Neisseria gonorrhoeae
ggagcgaaccggcgcaagaa

SEQ ID NO: 53260 - DNA, 20 bp, Neisseria gonorrhoeae
gagcgaaccggcgcaagaac

SEQ ID NO: 53261 - DNA, 20 bp, Neisseria gonorrhoeae
ttgcgccggttcgctccaaa

SEQ ID NO: 53262 - DNA, 20 bp, Neisseria gonorrhoeae
cgccggttcgctccaaaggt

SEQ ID NO: 53263 - DNA, 20 bp, Neisseria gonorrhoeae
gctccaaaggtattcgagat

SEQ ID NO: 53264 - DNA, 20 bp, Neisseria gonorrhoeae
tttgccgatttcgcgcaaga

SEQ ID NO: 53265 - DNA, 20 bp, Neisseria gonorrhoeae
gccgatttcgcgcaagacgg

SEQ ID NO: 53266 - DNA, 20 bp, Neisseria gonorrhoeae
ccgatttcgcgcaagacggc

SEQ ID NO: 53267 - DNA, 20 bp, Neisseria gonorrhoeae
cgcgcaagacggcgattcgt

SEQ ID NO: 53268 - DNA, 20 bp, Neisseria gonorrhoeae
gcgcaagacggcgattcgtg

SEQ ID NO: 53269 - DNA, 20 bp, Neisseria gonorrhoeae
cgccaatgcggcttgggggt

SEQ ID NO: 53270 - DNA, 20 bp, Neisseria gonorrhoeae
ggggttggcggcttcgactg

SEQ ID NO: 53271 - DNA, 20 bp, Neisseria gonorrhoeae
gcggcttcgactgtttcggg

SEQ ID NO: 53272 - DNA, 20 bp, Neisseria gonorrhoeae
gactgtttcgggcaattcgg

SEQ ID NO: 53273 - DNA, 20 bp, Neisseria gonorrhoeae
cgggcaattcggtatagccg

SEQ ID NO: 53274 - DNA, 20 bp, Neisseria gonorrhoeae
ttgggcatcgaagacggcaa

SEQ ID NO: 53275 - DNA, 20 bp, Neisseria gonorrhoeae
ggcatcgaagacggcaaaag

SEQ ID NO: 53276 - DNA, 20 bp, Neisseria gonorrhoeae
ggcatcttcgggcgcggcgg

SEQ ID NO: 53277 - DNA, 20 bp, Neisseria gonorrhoeae
gggcgcggcggggttgtgga

SEQ ID NO: 53278 - DNA, 20 bp, Neisseria gonorrhoeae
tggatgatggggatgctttt

SEQ ID NO: 53279 - DNA, 20 bp, Neisseria gonorrhoeae
ggcgttttcggacaaatcgc

SEQ ID NO: 53280 - DNA, 20 bp, Neisseria gonorrhoeae
tcggacaaatcgccgtgcga

SEQ ID NO: 53281 - DNA, 20 bp, Neisseria gonorrhoeae
cggacaaatcgccgtgcgat

SEQ ID NO: 53282 - DNA, 20 bp, Neisseria gonorrhoeae
ggacaaatcgccgtgcgatc

SEQ ID NO: 53283 - DNA, 20 bp, Neisseria gonorrhoeae
ggcaatcgcttcgatcactt

SEQ ID NO: 53284 - DNA, 20 bp, Neisseria gonorrhoeae
ggtcgatgcgttgcggattg

SEQ ID NO: 53285 - DNA, 20 bp, Neisseria gonorrhoeae
gtcgatgcgttgcggattgc

SEQ ID NO: 53286 - DNA, 20 bp, Neisseria gonorrhoeae
cggattgccggcgccgatgt

SEQ ID NO: 53287 - DNA, 20 bp, Neisseria gonorrhoeae
ccggcgccgatgtcgaatat

SEQ ID NO: 53288 - DNA, 20 bp, Neisseria gonorrhoeae
gttgccgagatattcgacat

SEQ ID NO: 53289 - DNA, 20 bp, Neisseria gonorrhoeae
ggggcgaaaacttcgtcgaa

SEQ ID NO: 53290 - DNA, 20 bp, Neisseria gonorrhoeae
gggcgaaaacttcgtcgaag

SEQ ID NO: 53291 - DNA, 20 bp, Neisseria gonorrhoeae
gtcgaagtctcgcgcccgaa

SEQ ID NO: 53292 - DNA, 20 bp, Neisseria gonorrhoeae
gatttggatgcgaaccatat

SEQ ID NO: 53293 - DNA, 20 bp, Neisseria gonorrhoeae
atttggatgcgaaccatatc

SEQ ID NO: 53294 - DNA, 20 bp, Neisseria gonorrhoeae
ctgcgagccttgtgtgcggc

SEQ ID NO: 53295 - DNA, 20 bp, Neisseria gonorrhoeae
tgtgcggccgatgtggctga

SEQ ID NO: 53296 - DNA, 20 bp, Neisseria gonorrhoeae
gatttgccggactgtctgtt

SEQ ID NO: 53297 - DNA, 20 bp, Neisseria gonorrhoeae
gccggactgtctgtttgggt

SEQ ID NO: 53298 - DNA, 20 bp, Neisseria gonorrhoeae
ccggactgtctgtttgggtt

SEQ ID NO: 53299 - DNA, 20 bp, Neisseria gonorrhoeae
tgtttgtcgagggtaacgcg

SEQ ID NO: 53300 - DNA, 20 bp, Neisseria gonorrhoeae
gtcgagggtaacgcggtagg

SEQ ID NO: 53301 - DNA, 20 bp, Neisseria gonorrhoeae
tcgagggtaacgcggtaggc

SEQ ID NO: 53302 - DNA, 20 bp, Neisseria gonorrhoeae
gggtgtggtatcggcgaggg

SEQ ID NO: 53303 - DNA, 20 bp, Neisseria gonorrhoeae
tgcgattttggggctttcga

SEQ ID NO: 53304 - DNA, 20 bp, Neisseria gonorrhoeae
tgggcggaatggcttgccca

SEQ ID NO: 53305 - DNA, 20 bp, Neisseria gonorrhoeae
cccagtagcggtcgaagtcg

SEQ ID NO: 53306 - DNA, 20 bp, Neisseria gonorrhoeae
gccgacgacgctgccggtgg

SEQ ID NO: 53307 - DNA, 20 bp, Neisseria gonorrhoeae
gaccgctactgggcaagcca

SEQ ID NO: 53308 - DNA, 20 bp, Neisseria gonorrhoeae
cgcccacaacgccacgcgca

SEQ ID NO: 53309 - DNA, 20 bp, Neisseria gonorrhoeae
tcggcggtaaaggatttgtt

SEQ ID NO: 53310 - DNA, 20 bp, Neisseria gonorrhoeae
gttgtgcatgcggcggttga

SEQ ID NO: 53311 - DNA, 20 bp, Neisseria gonorrhoeae
ttgtgcatgcggcggttgag

SEQ ID NO: 53312 - DNA, 20 bp, Neisseria gonorrhoeae
tgcatgcggcggttgaggcg

SEQ ID NO: 53313 - DNA, 20 bp, Neisseria gonorrhoeae
aggcgggggaagtcggtcag

SEQ ID NO: 53314 - DNA, 20 bp, Neisseria gonorrhoeae
catgagcggtgcaatcagcg

SEQ ID NO: 53315 - DNA, 20 bp, Neisseria gonorrhoeae
atgagcggtgcaatcagcgg

SEQ ID NO: 53316 - DNA, 20 bp, Neisseria gonorrhoeae
gaccagcagcgaagacaggg

SEQ ID NO: 53317 - DNA, 20 bp, Neisseria gonorrhoeae
accagcagcgaagacagggc

SEQ ID NO: 53318 - DNA, 20 bp, Neisseria gonorrhoeae
gctgctggtcaaaccgctga

SEQ ID NO: 53319 - DNA, 20 bp, Neisseria gonorrhoeae
acgctcgcttacggtgcgca

SEQ ID NO: 53320 - DNA, 20 bp, Neisseria gonorrhoeae
cggtgcgcacggtccgcgtg

SEQ ID NO: 53321 - DNA, 20 bp, Neisseria gonorrhoeae
ggtcatcctcgccattttgc

SEQ ID NO: 53322 - DNA, 20 bp, Neisseria gonorrhoeae
gtcatcctcgccattttgcc

SEQ ID NO: 53323 - DNA, 20 bp, Neisseria gonorrhoeae
gtaagcatcgccatttttac

SEQ ID NO: 53324 - DNA, 20 bp, Neisseria gonorrhoeae
ttaccggcaaaggaagcagt

SEQ ID NO: 53325 - DNA, 20 bp, Neisseria gonorrhoeae
taccggcaaaggaagcagta

SEQ ID NO: 53326 - DNA, 20 bp, Neisseria gonorrhoeae
accggcaaaggaagcagtac

SEQ ID NO: 53327 - DNA, 20 bp, Neisseria gonorrhoeae
ccggcaaaggaagcagtacc

SEQ ID NO: 53328 - DNA, 20 bp, Neisseria gonorrhoeae
tccgttgacgacgatgctgt

SEQ ID NO: 53329 - DNA, 20 bp, Neisseria gonorrhoeae
acgacgatgctgtctttgtc

SEQ ID NO: 53330 - DNA, 20 bp, Neisseria gonorrhoeae
gtccaaatgcacgccgaagg

SEQ ID NO: 53331 - DNA, 20 bp, Neisseria gonorrhoeae
tccaaatgcacgccgaaggg

SEQ ID NO: 53332 - DNA, 20 bp, Neisseria gonorrhoeae
tgcggcggcaatcaagagtt

SEQ ID NO: 53333 - DNA, 20 bp, Neisseria gonorrhoeae
ccacatgtccagccactttg

SEQ ID NO: 53334 - DNA, 20 bp, Neisseria gonorrhoeae
gcccaaacatcgccccgata

SEQ ID NO: 53335 - DNA, 20 bp, Neisseria gonorrhoeae
cccaaacatcgccccgatag

SEQ ID NO: 53336 - DNA, 20 bp, Neisseria gonorrhoeae
gggggcgtttttttcgggca

SEQ ID NO: 53337 - DNA, 20 bp, Neisseria gonorrhoeae
ttttcgggcagcaccagccg

SEQ ID NO: 53338 - DNA, 20 bp, Neisseria gonorrhoeae
aagtctattacctgaccggc

SEQ ID NO: 53339 - DNA, 20 bp, Neisseria gonorrhoeae
cctgaccggcaggccgatga

SEQ ID NO: 53340 - DNA, 20 bp, Neisseria gonorrhoeae
gaagggcagggtgtgttcgg

SEQ ID NO: 53341 - DNA, 20 bp, Neisseria gonorrhoeae
gggctgtccgttcaggtgcg

SEQ ID NO: 53342 - DNA, 20 bp, Neisseria gonorrhoeae
aggtgcgcgctcatcggcct

SEQ ID NO: 53343 - DNA, 20 bp, Neisseria gonorrhoeae
gcattgatgtttgccggaac

SEQ ID NO: 53344 - DNA, 20 bp, Neisseria gonorrhoeae
atgtttgccggaacatggct

SEQ ID NO: 53345 - DNA, 20 bp, Neisseria gonorrhoeae
gccggaacatggctgcttgc

SEQ ID NO: 53346 - DNA, 20 bp, Neisseria gonorrhoeae
ccggaacatggctgcttgcc

SEQ ID NO: 53347 - DNA, 20 bp, Neisseria gonorrhoeae
cctatgccggcggctatcaa

SEQ ID NO: 53348 - DNA, 20 bp, Neisseria gonorrhoeae
accattgcaatctgcccgac

SEQ ID NO: 53349 - DNA, 20 bp, Neisseria gonorrhoeae
ccattgcaatctgcccgaca

SEQ ID NO: 53350 - DNA, 20 bp, Neisseria gonorrhoeae
caatctgcccgacagcacgg

SEQ ID NO: 53351 - DNA, 20 bp, Neisseria gonorrhoeae
gcgtgtcaggcggcgcatac

SEQ ID NO: 53352 - DNA, 20 bp, Neisseria gonorrhoeae
gttgcccatcacccacgccg

SEQ ID NO: 53353 - DNA, 20 bp, Neisseria gonorrhoeae
cccaagccgccgaaaaagcc

SEQ ID NO: 53354 - DNA, 20 bp, Neisseria gonorrhoeae
ccaagccgccgaaaaagccg

SEQ ID NO: 53355 - DNA, 20 bp, Neisseria gonorrhoeae
caacaaaccttcccaagaag

SEQ ID NO: 53356 - DNA, 20 bp, Neisseria gonorrhoeae
ttgggaaggtttgttgtaat

SEQ ID NO: 53357 - DNA, 20 bp, Neisseria gonorrhoeae
ggaaggtttgttgtaatagg

SEQ ID NO: 53358 - DNA, 20 bp, Neisseria gonorrhoeae
ttaccgtagccgccaacgcc

SEQ ID NO: 53359 - DNA, 20 bp, Neisseria gonorrhoeae
ccgtagccgccaacgccgcc

SEQ ID NO: 53360 - DNA, 20 bp, Neisseria gonorrhoeae
gccgatatgtgccgtgccgc

SEQ ID NO: 53361 - DNA, 20 bp, Neisseria gonorrhoeae
ccgatatgtgccgtgccgcg

SEQ ID NO: 53362 - DNA, 20 bp, Neisseria gonorrhoeae
gcgtgcaagggcaatgtcgc

SEQ ID NO: 53363 - DNA, 20 bp, Neisseria gonorrhoeae
gggcaggcagaaatatccga

SEQ ID NO: 53364 - DNA, 20 bp, Neisseria gonorrhoeae
acaggctgggggcttttaaa

SEQ ID NO: 53365 - DNA, 20 bp, Neisseria gonorrhoeae
caggctgggggcttttaaaa

SEQ ID NO: 53366 - DNA, 20 bp, Neisseria gonorrhoeae
caaaatcttttaaaagcccc

SEQ ID NO: 53367 - DNA, 20 bp, Neisseria gonorrhoeae
aaaatcttttaaaagccccc

SEQ ID NO: 53368 - DNA, 20 bp, Neisseria gonorrhoeae
cgtgcgccaacgcaaccaga

SEQ ID NO: 53369 - DNA, 20 bp, Neisseria gonorrhoeae
gtgcgccaacgcaaccagac

SEQ ID NO: 53370 - DNA, 20 bp, Neisseria gonorrhoeae
gtttcgccgctcatggcgga

SEQ ID NO: 53371 - DNA, 20 bp, Neisseria gonorrhoeae
cgccgctcatggcggatacg

SEQ ID NO: 53372 - DNA, 20 bp, Neisseria gonorrhoeae
gccgctcatggcggatacga

SEQ ID NO: 53373 - DNA, 20 bp, Neisseria gonorrhoeae
ttggcaaccagcaggtgttt

SEQ ID NO: 53374 - DNA, 20 bp, Neisseria gonorrhoeae
gcaaccagcaggtgtttgac

SEQ ID NO: 53375 - DNA, 20 bp, Neisseria gonorrhoeae
gacggtatttcccacaccca

SEQ ID NO: 53376 - DNA, 20 bp, Neisseria gonorrhoeae
acggtatttcccacacccag

SEQ ID NO: 53377 - DNA, 20 bp, Neisseria gonorrhoeae
cccacacccagttcccgggc

SEQ ID NO: 53378 - DNA, 20 bp, Neisseria gonorrhoeae
ggcggcatcgccagactcta

SEQ ID NO: 53379 - DNA, 20 bp, Neisseria gonorrhoeae
acgcacttttcacaggcaca

SEQ ID NO: 53380 - DNA, 20 bp, Neisseria gonorrhoeae
tcacaggcacacgtctgcgt

SEQ ID NO: 53381 - DNA, 20 bp, Neisseria gonorrhoeae
cacaggcacacgtctgcgtg

SEQ ID NO: 53382 - DNA, 20 bp, Neisseria gonorrhoeae
acaggcacacgtctgcgtgg

SEQ ID NO: 53383 - DNA, 20 bp, Neisseria gonorrhoeae
ggacgcgctgccgcgtgcgg

SEQ ID NO: 53384 - DNA, 20 bp, Neisseria gonorrhoeae
gacgcgctgccgcgtgcggg

SEQ ID NO: 53385 - DNA, 20 bp, Neisseria gonorrhoeae
cgcgtgggcttacctgccgc

SEQ ID NO: 53386 - DNA, 20 bp, Neisseria gonorrhoeae
gcgtgggcttacctgccgct

SEQ ID NO: 53387 - DNA, 20 bp, Neisseria gonorrhoeae
cctgccgctggaaattgcag

SEQ ID NO: 53388 - DNA, 20 bp, Neisseria gonorrhoeae
cggagaaatccgaatcagcc

SEQ ID NO: 53389 - DNA, 20 bp, Neisseria gonorrhoeae
ggagaaatccgaatcagcct

SEQ ID NO: 53390 - DNA, 20 bp, Neisseria gonorrhoeae
agacggcattttcggcacac

SEQ ID NO: 53391 - DNA, 20 bp, Neisseria gonorrhoeae
tcggcacacggggcgggcgc

SEQ ID NO: 53392 - DNA, 20 bp, Neisseria gonorrhoeae
cggcacacggggcgggcgcg

SEQ ID NO: 53393 - DNA, 20 bp, Neisseria gonorrhoeae
acctcgccaaaaaactcggc

SEQ ID NO: 53394 - DNA, 20 bp, Neisseria gonorrhoeae
cctcgccaaaaaactcggca

SEQ ID NO: 53395 - DNA, 20 bp, Neisseria gonorrhoeae
tttggcgaggtaaacgttgc

SEQ ID NO: 53396 - DNA, 20 bp, Neisseria gonorrhoeae
ttggcgaggtaaacgttgct

SEQ ID NO: 53397 - DNA, 20 bp, Neisseria gonorrhoeae
tggcgaggtaaacgttgctt

SEQ ID NO: 53398 - DNA, 20 bp, Neisseria gonorrhoeae
gggcgttgccctgaccgacg

SEQ ID NO: 53399 - DNA, 20 bp, Neisseria gonorrhoeae
ggcgttgccctgaccgacgt

SEQ ID NO: 53400 - DNA, 20 bp, Neisseria gonorrhoeae
ccctgaccgacgtggtcggt

SEQ ID NO: 53401 - DNA, 20 bp, Neisseria gonorrhoeae
ctgcgcgatttcgacctcta

SEQ ID NO: 53402 - DNA, 20 bp, Neisseria gonorrhoeae
gcgaaatagaggtcgaaatc

SEQ ID NO: 53403 - DNA, 20 bp, Neisseria gonorrhoeae
ctcgcctacctgcgccaagt

SEQ ID NO: 53404 - DNA, 20 bp, Neisseria gonorrhoeae
gcgcaggtaggcgaggaagg

SEQ ID NO: 53405 - DNA, 20 bp, Neisseria gonorrhoeae
ttggtcatggttttgcccgg

SEQ ID NO: 53406 - DNA, 20 bp, Neisseria gonorrhoeae
gtcatggttttgcccggcga

SEQ ID NO: 53407 - DNA, 20 bp, Neisseria gonorrhoeae
tgcccggcgagtcggagagc

SEQ ID NO: 53408 - DNA, 20 bp, Neisseria gonorrhoeae
ctcgcccaatctggcgaagg

SEQ ID NO: 53409 - DNA, 20 bp, Neisseria gonorrhoeae
ccttcgccagattgggcgag

SEQ ID NO: 53410 - DNA, 20 bp, Neisseria gonorrhoeae
cttcgccagattgggcgagg

SEQ ID NO: 53411 - DNA, 20 bp, Neisseria gonorrhoeae
gccagattgggcgaggaata

SEQ ID NO: 53412 - DNA, 20 bp, Neisseria gonorrhoeae
ggcgaggaatagtcgatgac

SEQ ID NO: 53413 - DNA, 20 bp, Neisseria gonorrhoeae
accaagccgccaccctgttc

SEQ ID NO: 53414 - DNA, 20 bp, Neisseria gonorrhoeae
ccaagccgccaccctgttca

SEQ ID NO: 53415 - DNA, 20 bp, Neisseria gonorrhoeae
agccgcttctacgaagcttg

SEQ ID NO: 53416 - DNA, 20 bp, Neisseria gonorrhoeae
tacgaagcttgcccgatttt

SEQ ID NO: 53417 - DNA, 20 bp, Neisseria gonorrhoeae
cccgattttgaaagccgaag

SEQ ID NO: 53418 - DNA, 20 bp, Neisseria gonorrhoeae
tgggttttggcactgctgac

SEQ ID NO: 53419 - DNA, 20 bp, Neisseria gonorrhoeae
gggttttggcactgctgacc

SEQ ID NO: 53420 - DNA, 20 bp, Neisseria gonorrhoeae
ggttttggcactgctgaccg

SEQ ID NO: 53421 - DNA, 20 bp, Neisseria gonorrhoeae
tggcactgctgaccgccacc

SEQ ID NO: 53422 - DNA, 20 bp, Neisseria gonorrhoeae
ggcactgctgaccgccaccg

SEQ ID NO: 53423 - DNA, 20 bp, Neisseria gonorrhoeae
tcgagtacgccggtgatttt

SEQ ID NO: 53424 - DNA, 20 bp, Neisseria gonorrhoeae
cgagtacgccggtgattttg

SEQ ID NO: 53425 - DNA, 20 bp, Neisseria gonorrhoeae
gagtacgccggtgattttgt

SEQ ID NO: 53426 - DNA, 20 bp, Neisseria gonorrhoeae
tgttgatttcatcttccatc

SEQ ID NO: 53427 - DNA, 20 bp, Neisseria gonorrhoeae
gttgatttcatcttccatcg

SEQ ID NO: 53428 - DNA, 20 bp, Neisseria gonorrhoeae
atggtcgaaccggtaccgat

SEQ ID NO: 53429 - DNA, 20 bp, Neisseria gonorrhoeae
gttttcgggtacgaattcga

SEQ ID NO: 53430 - DNA, 20 bp, Neisseria gonorrhoeae
tcgggtacgaattcgactgc

SEQ ID NO: 53431 - DNA, 20 bp, Neisseria gonorrhoeae
cgggtacgaattcgactgct

SEQ ID NO: 53432 - DNA, 20 bp, Neisseria gonorrhoeae
gggtacgaattcgactgctt

SEQ ID NO: 53433 - DNA, 20 bp, Neisseria gonorrhoeae
tcggtttccgccgccaaacc

SEQ ID NO: 53434 - DNA, 20 bp, Neisseria gonorrhoeae
ccgccgccaaaccggtttcc

SEQ ID NO: 53435 - DNA, 20 bp, Neisseria gonorrhoeae
cgccgccaaaccggtttcca

SEQ ID NO: 53436 - DNA, 20 bp, Neisseria gonorrhoeae
ccaacagttttgccacaccg

SEQ ID NO: 53437 - DNA, 20 bp, Neisseria gonorrhoeae
caacagttttgccacaccgt

SEQ ID NO: 53438 - DNA, 20 bp, Neisseria gonorrhoeae
gaaaggcagtcaatacgatg

SEQ ID NO: 53439 - DNA, 20 bp, Neisseria gonorrhoeae
aaaggcagtcaatacgatgc

SEQ ID NO: 53440 - DNA, 20 bp, Neisseria gonorrhoeae
gctgaaccaaaatttaacta

SEQ ID NO: 53441 - DNA, 20 bp, Neisseria gonorrhoeae
ctgaaccaaaatttaactat

SEQ ID NO: 53442 - DNA, 20 bp, Neisseria gonorrhoeae
aactatgctgtctaaattta

SEQ ID NO: 53443 - DNA, 20 bp, Neisseria gonorrhoeae
aagacacgcacgaattggat

SEQ ID NO: 53444 - DNA, 20 bp, Neisseria gonorrhoeae
gatttgcccaagcacccaaa

SEQ ID NO: 53445 - DNA, 20 bp, Neisseria gonorrhoeae
gcccaagcacccaaatcatg

SEQ ID NO: 53446 - DNA, 20 bp, Neisseria gonorrhoeae
cccaagcacccaaatcatgt

SEQ ID NO: 53447 - DNA, 20 bp, Neisseria gonorrhoeae
tttataaaacaggtggacat

SEQ ID NO: 53448 - DNA, 20 bp, Neisseria gonorrhoeae
tctatccgcgctcaataccg

SEQ ID NO: 53449 - DNA, 20 bp, Neisseria gonorrhoeae
gacttcggttcacgccaatg

SEQ ID NO: 53450 - DNA, 20 bp, Neisseria gonorrhoeae
acttcggttcacgccaatga

SEQ ID NO: 53451 - DNA, 20 bp, Neisseria gonorrhoeae
ggttcacgccaatgacgcgc

SEQ ID NO: 53452 - DNA, 20 bp, Neisseria gonorrhoeae
acgccaatgacgcgcaatcg

SEQ ID NO: 53453 - DNA, 20 bp, Neisseria gonorrhoeae
tttgaccgaacacgcatgac

SEQ ID NO: 53454 - DNA, 20 bp, Neisseria gonorrhoeae
ttgaccgaacacgcatgact

SEQ ID NO: 53455 - DNA, 20 bp, Neisseria gonorrhoeae
tgaccgaacacgcatgactg

SEQ ID NO: 53456 - DNA, 20 bp, Neisseria gonorrhoeae
gaccgaacacgcatgactga

SEQ ID NO: 53457 - DNA, 20 bp, Neisseria gonorrhoeae
accgaacacgcatgactgaa

SEQ ID NO: 53458 - DNA, 20 bp, Neisseria gonorrhoeae
gttattttgctgacggcaca

SEQ ID NO: 53459 - DNA, 20 bp, Neisseria gonorrhoeae
ttttgctgacggcacaccgt

SEQ ID NO: 53460 - DNA, 20 bp, Neisseria gonorrhoeae
tgctgacggcacaccgtctg

SEQ ID NO: 53461 - DNA, 20 bp, Neisseria gonorrhoeae
gctgacggcacaccgtctgc

SEQ ID NO: 53462 - DNA, 20 bp, Neisseria gonorrhoeae
ctgacggcacaccgtctgcc

SEQ ID NO: 53463 - DNA, 20 bp, Neisseria gonorrhoeae
aattaaaggttttcacaaaa

SEQ ID NO: 53464 - DNA, 20 bp, Neisseria gonorrhoeae
attaaaggttttcacaaaaa

SEQ ID NO: 53465 - DNA, 20 bp, Neisseria gonorrhoeae
aaggttttcacaaaaaagac

SEQ ID NO: 53466 - DNA, 20 bp, Neisseria gonorrhoeae
tcacaaaaaagacggtggca

SEQ ID NO: 53467 - DNA, 20 bp, Neisseria gonorrhoeae
cacaaaaaagacggtggcac

SEQ ID NO: 53468 - DNA, 20 bp, Neisseria gonorrhoeae
gtctgaaaatgaccaaaagc

SEQ ID NO: 53469 - DNA, 20 bp, Neisseria gonorrhoeae
tctgaaaatgaccaaaagcc

SEQ ID NO: 53470 - DNA, 20 bp, Neisseria gonorrhoeae
tcagcagagtaggtggtttg

SEQ ID NO: 53471 - DNA, 20 bp, Neisseria gonorrhoeae
gcccgagtgttgttgtttgc

SEQ ID NO: 53472 - DNA, 20 bp, Neisseria gonorrhoeae
cccgagtgttgttgtttgct

SEQ ID NO: 53473 - DNA, 20 bp, Neisseria gonorrhoeae
tgtttcacgcaatggcgaaa

SEQ ID NO: 53474 - DNA, 20 bp, Neisseria gonorrhoeae
cacgcaatggcgaaattgca

SEQ ID NO: 53475 - DNA, 20 bp, Neisseria gonorrhoeae
acgcaatggcgaaattgcac

SEQ ID NO: 53476 - DNA, 20 bp, Neisseria gonorrhoeae
cactggaaaaccaagacggc

SEQ ID NO: 53477 - DNA, 20 bp, Neisseria gonorrhoeae
ttcatggtaaacgagcggta

SEQ ID NO: 53478 - DNA, 20 bp, Neisseria gonorrhoeae
ttcaaccgctgcctttgccg

SEQ ID NO: 53479 - DNA, 20 bp, Neisseria gonorrhoeae
tcaaccgctgcctttgccgg

SEQ ID NO: 53480 - DNA, 20 bp, Neisseria gonorrhoeae
caaccgctgcctttgccggg

SEQ ID NO: 53481 - DNA, 20 bp, Neisseria gonorrhoeae
aaccgctgcctttgccgggg

SEQ ID NO: 53482 - DNA, 20 bp, Neisseria gonorrhoeae
gccgggggcgcattcacgct

SEQ ID NO: 53483 - DNA, 20 bp, Neisseria gonorrhoeae
cgagcggaccaccgacggta

SEQ ID NO: 53484 - DNA, 20 bp, Neisseria gonorrhoeae
gaagcgcgcgctgaaacggg

SEQ ID NO: 53485 - DNA, 20 bp, Neisseria gonorrhoeae
aagcgcgcgctgaaacggga

SEQ ID NO: 53486 - DNA, 20 bp, Neisseria gonorrhoeae
cagcgcgcgcttcaaagagc

SEQ ID NO: 53487 - DNA, 20 bp, Neisseria gonorrhoeae
agcgcgcgcttcaaagagct

SEQ ID NO: 53488 - DNA, 20 bp, Neisseria gonorrhoeae
ccgttcaaataaatcgctct

SEQ ID NO: 53489 - DNA, 20 bp, Neisseria gonorrhoeae
aaataaatcgctctacataa

SEQ ID NO: 53490 - DNA, 20 bp, Neisseria gonorrhoeae
gagataacgcattgattttt

SEQ ID NO: 53491 - DNA, 20 bp, Neisseria gonorrhoeae
agataacgcattgattttta

SEQ ID NO: 53492 - DNA, 20 bp, Neisseria gonorrhoeae
atttttatgtagagcgattt

SEQ ID NO: 53493 - DNA, 20 bp, Neisseria gonorrhoeae
tagtcggctttgatttgcgg

SEQ ID NO: 53494 - DNA, 20 bp, Neisseria gonorrhoeae
gatttgcggaatgctctcgg

SEQ ID NO: 53495 - DNA, 20 bp, Neisseria gonorrhoeae
atttgcggaatgctctcggg

SEQ ID NO: 53496 - DNA, 20 bp, Neisseria gonorrhoeae
gcggaatgctctcgggctgg

SEQ ID NO: 53497 - DNA, 20 bp, Neisseria gonorrhoeae
cggaatgctctcgggctggt

SEQ ID NO: 53498 - DNA, 20 bp, Neisseria gonorrhoeae
ccgtcaacgactacctcgcc

SEQ ID NO: 53499 - DNA, 20 bp, Neisseria gonorrhoeae
acggtaacgacgtgcacgcc

SEQ ID NO: 53500 - DNA, 20 bp, Neisseria gonorrhoeae
gccggccagcgcgttgagat

SEQ ID NO: 53501 - DNA, 20 bp, Neisseria gonorrhoeae
ccggccagcgcgttgagata

SEQ ID NO: 53502 - DNA, 20 bp, Neisseria gonorrhoeae
agatagacggcgagggtggc

SEQ ID NO: 53503 - DNA, 20 bp, Neisseria gonorrhoeae
ccctgcgcggtcaaacagtt

SEQ ID NO: 53504 - DNA, 20 bp, Neisseria gonorrhoeae
tccgcccacgcctgcgcgtt

SEQ ID NO: 53505 - DNA, 20 bp, Neisseria gonorrhoeae
tgaatcaaagcacattgacg

SEQ ID NO: 53506 - DNA, 20 bp, Neisseria gonorrhoeae
tgcccgcgtcaatgtgcttt

SEQ ID NO: 53507 - DNA, 20 bp, Neisseria gonorrhoeae
gattcacaacgcgcaggcgt

SEQ ID NO: 53508 - DNA, 20 bp, Neisseria gonorrhoeae
cttgaaggcttcaaaggttt

SEQ ID NO: 53509 - DNA, 20 bp, Neisseria gonorrhoeae
aaggcttcaaaggttttttc

SEQ ID NO: 53510 - DNA, 20 bp, Neisseria gonorrhoeae
aaaggttttttcagacggcg

SEQ ID NO: 53511 - DNA, 20 bp, Neisseria gonorrhoeae
tttcagacggcgtaaacggt

SEQ ID NO: 53512 - DNA, 20 bp, Neisseria gonorrhoeae
ttcagacggcgtaaacggtt

SEQ ID NO: 53513 - DNA, 20 bp, Neisseria gonorrhoeae
ttttgcgcgccatccgcatc

SEQ ID NO: 53514 - DNA, 20 bp, Neisseria gonorrhoeae
tttgcgcgccatccgcatct

SEQ ID NO: 53515 - DNA, 20 bp, Neisseria gonorrhoeae
ttgcgcgccatccgcatctg

SEQ ID NO: 53516 - DNA, 20 bp, Neisseria gonorrhoeae
tgcgcgccatccgcatctgt

SEQ ID NO: 53517 - DNA, 20 bp, Neisseria gonorrhoeae
gcgcgccatccgcatctgtt

SEQ ID NO: 53518 - DNA, 20 bp, Neisseria gonorrhoeae
agcagcaggcgcaggaattg

SEQ ID NO: 53519 - DNA, 20 bp, Neisseria gonorrhoeae
ggcatcagccttgccacgct

SEQ ID NO: 53520 - DNA, 20 bp, Neisseria gonorrhoeae
ccacgctataccgcaagctg

SEQ ID NO: 53521 - DNA, 20 bp, Neisseria gonorrhoeae
acgctgaccgcctccagctt

SEQ ID NO: 53522 - DNA, 20 bp, Neisseria gonorrhoeae
cggtatagcgtggcaaggct

SEQ ID NO: 53523 - DNA, 20 bp, Neisseria gonorrhoeae
aaaccccgcgtcgaggcaga

SEQ ID NO: 53524 - DNA, 20 bp, Neisseria gonorrhoeae
cgggtagtgtttgaggatga

SEQ ID NO: 53525 - DNA, 20 bp, Neisseria gonorrhoeae
gaggatgaccgacactgcct

SEQ ID NO: 53526 - DNA, 20 bp, Neisseria gonorrhoeae
aggatgaccgacactgcctg

SEQ ID NO: 53527 - DNA, 20 bp, Neisseria gonorrhoeae
ccagtcgccgccgtctgcct

SEQ ID NO: 53528 - DNA, 20 bp, Neisseria gonorrhoeae
gtgggttttgaagcgggtgt

SEQ ID NO: 53529 - DNA, 20 bp, Neisseria gonorrhoeae
tgaagcgggtgttttccagg

SEQ ID NO: 53530 - DNA, 20 bp, Neisseria gonorrhoeae
gaagcgggtgttttccaggc

SEQ ID NO: 53531 - DNA, 20 bp, Neisseria gonorrhoeae
aagcgggtgttttccaggcg

SEQ ID NO: 53532 - DNA, 20 bp, Neisseria gonorrhoeae
tccaggcgtccccagttgtg

SEQ ID NO: 53533 - DNA, 20 bp, Neisseria gonorrhoeae
cgtccgcaagggtttgcgtg

SEQ ID NO: 53534 - DNA, 20 bp, Neisseria gonorrhoeae
gcgtgtcggcgcggtcaaaa

SEQ ID NO: 53535 - DNA, 20 bp, Neisseria gonorrhoeae
cgtgtcggcgcggtcaaaac

SEQ ID NO: 53536 - DNA, 20 bp, Neisseria gonorrhoeae
gacggcggcttggggctgcg

SEQ ID NO: 53537 - DNA, 20 bp, Neisseria gonorrhoeae
gggctgcgggcaaacctgcg

SEQ ID NO: 53538 - DNA, 20 bp, Neisseria gonorrhoeae
gattcagcttcggatggaaa

SEQ ID NO: 53539 - DNA, 20 bp, Neisseria gonorrhoeae
attcagcttcggatggaaaa

SEQ ID NO: 53540 - DNA, 20 bp, Neisseria gonorrhoeae
agcttcggatggaaaaggcg

SEQ ID NO: 53541 - DNA, 20 bp, Neisseria gonorrhoeae
ggatggaaaaggcgcacgtt

SEQ ID NO: 53542 - DNA, 20 bp, Neisseria gonorrhoeae
ttctttttcaacgtgcgcct

SEQ ID NO: 53543 - DNA, 20 bp, Neisseria gonorrhoeae
gcacgggcggcacatacggc

SEQ ID NO: 53544 - DNA, 20 bp, Neisseria gonorrhoeae
cacgggcggcacatacggcg

SEQ ID NO: 53545 - DNA, 20 bp, Neisseria gonorrhoeae
gcggcaggagcggcattgta

SEQ ID NO: 53546 - DNA, 20 bp, Neisseria gonorrhoeae
tacggcgttgcgccataagg

SEQ ID NO: 53547 - DNA, 20 bp, Neisseria gonorrhoeae
tggcgcaacgccgtacaatg

SEQ ID NO: 53548 - DNA, 20 bp, Neisseria gonorrhoeae
ccagcagttgggacagcagg

SEQ ID NO: 53549 - DNA, 20 bp, Neisseria gonorrhoeae
cagcagttgggacagcaggt

SEQ ID NO: 53550 - DNA, 20 bp, Neisseria gonorrhoeae
ggacagcaggtcttttttgt

SEQ ID NO: 53551 - DNA, 20 bp, Neisseria gonorrhoeae
tttgttgatgtagcccaacg

SEQ ID NO: 53552 - DNA, 20 bp, Neisseria gonorrhoeae
ttgttgatgtagcccaacgg

SEQ ID NO: 53553 - DNA, 20 bp, Neisseria gonorrhoeae
attttgctgatgttggcggt

SEQ ID NO: 53554 - DNA, 20 bp, Neisseria gonorrhoeae
ttttgctgatgttggcggta

SEQ ID NO: 53555 - DNA, 20 bp, Neisseria gonorrhoeae
tgctgatgttggcggtaatt

SEQ ID NO: 53556 - DNA, 20 bp, Neisseria gonorrhoeae
gctgatgttggcggtaattt

SEQ ID NO: 53557 - DNA, 20 bp, Neisseria gonorrhoeae
ctgatgttggcggtaattta

SEQ ID NO: 53558 - DNA, 20 bp, Neisseria gonorrhoeae
ggctgggggctgctggatgc

SEQ ID NO: 53559 - DNA, 20 bp, Neisseria gonorrhoeae
atggccttacccgcatccag

SEQ ID NO: 53560 - DNA, 20 bp, Neisseria gonorrhoeae
cccgcatccagcagccccca

SEQ ID NO: 53561 - DNA, 20 bp, Neisseria gonorrhoeae
ctgtccactccgactgcacc

SEQ ID NO: 53562 - DNA, 20 bp, Neisseria gonorrhoeae
ggcagcggcacattccgcgc

SEQ ID NO: 53563 - DNA, 20 bp, Neisseria gonorrhoeae
cgcgcccgccggtctgaaac

SEQ ID NO: 53564 - DNA, 20 bp, Neisseria gonorrhoeae
tccagattgctgccgccctg

SEQ ID NO: 53565 - DNA, 20 bp, Neisseria gonorrhoeae
ccagattgctgccgccctgt

SEQ ID NO: 53566 - DNA, 20 bp, Neisseria gonorrhoeae
cagattgctgccgccctgtt

SEQ ID NO: 53567 - DNA, 20 bp, Neisseria gonorrhoeae
tgccttcgacaccgccctgt

SEQ ID NO: 53568 - DNA, 20 bp, Neisseria gonorrhoeae
gccttcgacaccgccctgtt

SEQ ID NO: 53569 - DNA, 20 bp, Neisseria gonorrhoeae
ccttcgacaccgccctgttc

SEQ ID NO: 53570 - DNA, 20 bp, Neisseria gonorrhoeae
gacaccgccctgttcccacg

SEQ ID NO: 53571 - DNA, 20 bp, Neisseria gonorrhoeae
ccacgttccaccgtcctgtt

SEQ ID NO: 53572 - DNA, 20 bp, Neisseria gonorrhoeae
atcctcctcacgaaaatacg

SEQ ID NO: 53573 - DNA, 20 bp, Neisseria gonorrhoeae
tcctcctcacgaaaatacgc

SEQ ID NO: 53574 - DNA, 20 bp, Neisseria gonorrhoeae
ctttcttgatgggcgtcttg

SEQ ID NO: 53575 - DNA, 20 bp, Neisseria gonorrhoeae
cttgatgggcgtcttgcgta

SEQ ID NO: 53576 - DNA, 20 bp, Neisseria gonorrhoeae
ttgatgggcgtcttgcgtat

SEQ ID NO: 53577 - DNA, 20 bp, Neisseria gonorrhoeae
aaaacccacgaagcctcatt

SEQ ID NO: 53578 - DNA, 20 bp, Neisseria gonorrhoeae
ggcgtgcgctaccgcttctg

SEQ ID NO: 53579 - DNA, 20 bp, Neisseria gonorrhoeae
tgattccccgataccgatgc

SEQ ID NO: 53580 - DNA, 20 bp, Neisseria gonorrhoeae
cccgataccgatgccgtctg

SEQ ID NO: 53581 - DNA, 20 bp, Neisseria gonorrhoeae
agacggcatcggtatcgggg

SEQ ID NO: 53582 - DNA, 20 bp, Neisseria gonorrhoeae
ccgcgcaggcggaaatccgg

SEQ ID NO: 53583 - DNA, 20 bp, Neisseria gonorrhoeae
cagtcatttccgatagattc

SEQ ID NO: 53584 - DNA, 20 bp, Neisseria gonorrhoeae
agtcatttccgatagattcc

SEQ ID NO: 53585 - DNA, 20 bp, Neisseria gonorrhoeae
ccgatagattcccgccgcgt

SEQ ID NO: 53586 - DNA, 20 bp, Neisseria gonorrhoeae
cgatagattcccgccgcgtc

SEQ ID NO: 53587 - DNA, 20 bp, Neisseria gonorrhoeae
tggctcgacgaaaaccgtcc

SEQ ID NO: 53588 - DNA, 20 bp, Neisseria gonorrhoeae
ccgaattggataccaacggc

SEQ ID NO: 53589 - DNA, 20 bp, Neisseria gonorrhoeae
gtatccaattcggcaaggta

SEQ ID NO: 53590 - DNA, 20 bp, Neisseria gonorrhoeae
ggcaaggtaggctttgactt

SEQ ID NO: 53591 - DNA, 20 bp, Neisseria gonorrhoeae
gactttggcgagcagactct

SEQ ID NO: 53592 - DNA, 20 bp, Neisseria gonorrhoeae
ggactcattgggcgaattcc

SEQ ID NO: 53593 - DNA, 20 bp, Neisseria gonorrhoeae
ggcgaattcctcgcgcttgc

SEQ ID NO: 53594 - DNA, 20 bp, Neisseria gonorrhoeae
ctcgcgcttgccgtatcgtt

SEQ ID NO: 53595 - DNA, 20 bp, Neisseria gonorrhoeae
ccgtatcgtttgaacatctg

SEQ ID NO: 53596 - DNA, 20 bp, Neisseria gonorrhoeae
gaacatctggcgcaaaaaac

SEQ ID NO: 53597 - DNA, 20 bp, Neisseria gonorrhoeae
acactgcacacgggcttgac

SEQ ID NO: 53598 - DNA, 20 bp, Neisseria gonorrhoeae
acaggcgaagtgttggacgc

SEQ ID NO: 53599 - DNA, 20 bp, Neisseria gonorrhoeae
gacgcaccgcccaaagccga

SEQ ID NO: 53600 - DNA, 20 bp, Neisseria gonorrhoeae
cggctcggctttgggcggtg

SEQ ID NO: 53601 - DNA, 20 bp, Neisseria gonorrhoeae
ggctcggctttgggcggtgc

SEQ ID NO: 53602 - DNA, 20 bp, Neisseria gonorrhoeae
gagttccgaagcgcccgcct

SEQ ID NO: 53603 - DNA, 20 bp, Neisseria gonorrhoeae
cgaagcgcccgccttttcca

SEQ ID NO: 53604 - DNA, 20 bp, Neisseria gonorrhoeae
tccaaagcctccgtatcatc

SEQ ID NO: 53605 - DNA, 20 bp, Neisseria gonorrhoeae
ccaaagcctccgtatcatcc

SEQ ID NO: 53606 - DNA, 20 bp, Neisseria gonorrhoeae
caaagcctccgtatcatccg

SEQ ID NO: 53607 - DNA, 20 bp, Neisseria gonorrhoeae
cgccgtagtcggtaatttcc

SEQ ID NO: 53608 - DNA, 20 bp, Neisseria gonorrhoeae
ccttcgcacccccgccgaca

SEQ ID NO: 53609 - DNA, 20 bp, Neisseria gonorrhoeae
cttcgcacccccgccgacat

SEQ ID NO: 53610 - DNA, 20 bp, Neisseria gonorrhoeae
gcacccccgccgacatccac

SEQ ID NO: 53611 - DNA, 20 bp, Neisseria gonorrhoeae
tcgccacaccgcgtatcgta

SEQ ID NO: 53612 - DNA, 20 bp, Neisseria gonorrhoeae
gtcatcgtgccgccgccgtc

SEQ ID NO: 53613 - DNA, 20 bp, Neisseria gonorrhoeae
acacgcaaacccgcctccga

SEQ ID NO: 53614 - DNA, 20 bp, Neisseria gonorrhoeae
gcgtgtgaatcaggcgcgtt

SEQ ID NO: 53615 - DNA, 20 bp, Neisseria gonorrhoeae
cgtgtgaatcaggcgcgttt

SEQ ID NO: 53616 - DNA, 20 bp, Neisseria gonorrhoeae
ccccgttgacggcggcggca

SEQ ID NO: 53617 - DNA, 20 bp, Neisseria gonorrhoeae
gccaacacctcgcccgcctt

SEQ ID NO: 53618 - DNA, 20 bp, Neisseria gonorrhoeae
tccccgaaagtgtccgccaa

SEQ ID NO: 53619 - DNA, 20 bp, Neisseria gonorrhoeae
cgcaacgccgcttccgcatc

SEQ ID NO: 53620 - DNA, 20 bp, Neisseria gonorrhoeae
cgcaatatgttggcggacac

SEQ ID NO: 53621 - DNA, 20 bp, Neisseria gonorrhoeae
gcggacactttcggggataa

SEQ ID NO: 53622 - DNA, 20 bp, Neisseria gonorrhoeae
ttcgcctgttcgaaagccgc

SEQ ID NO: 53623 - DNA, 20 bp, Neisseria gonorrhoeae
tcgcctgttcgaaagccgcg

SEQ ID NO: 53624 - DNA, 20 bp, Neisseria gonorrhoeae
cgcctgttcgaaagccgcgt

SEQ ID NO: 53625 - DNA, 20 bp, Neisseria gonorrhoeae
gcctgttcgaaagccgcgtc

SEQ ID NO: 53626 - DNA, 20 bp, Neisseria gonorrhoeae
gaaagccgcgtcgctgtccg

SEQ ID NO: 53627 - DNA, 20 bp, Neisseria gonorrhoeae
gccgccatcaccggataagc

SEQ ID NO: 53628 - DNA, 20 bp, Neisseria gonorrhoeae
ccgtctgcgacaggttcaca

SEQ ID NO: 53629 - DNA, 20 bp, Neisseria gonorrhoeae
acaaccgcagaagcgggcga

SEQ ID NO: 53630 - DNA, 20 bp, Neisseria gonorrhoeae
tgcggttgtgaacctgtcgc

SEQ ID NO: 53631 - DNA, 20 bp, Neisseria gonorrhoeae
tgaacctgtcgcagacggca

SEQ ID NO: 53632 - DNA, 20 bp, Neisseria gonorrhoeae
ggatataatcccgggacttc

SEQ ID NO: 53633 - DNA, 20 bp, Neisseria gonorrhoeae
atcacgggcgaaaccttaaa

SEQ ID NO: 53634 - DNA, 20 bp, Neisseria gonorrhoeae
aaccccggcccgaaatcagc

SEQ ID NO: 53635 - DNA, 20 bp, Neisseria gonorrhoeae
cgggccggggtttaaggttt

SEQ ID NO: 53636 - DNA, 20 bp, Neisseria gonorrhoeae
gggccggggtttaaggtttc

SEQ ID NO: 53637 - DNA, 20 bp, Neisseria gonorrhoeae
tcaaaacgctccttcaggcg

SEQ ID NO: 53638 - DNA, 20 bp, Neisseria gonorrhoeae
aggcggcgcaccgtttccgc

SEQ ID NO: 53639 - DNA, 20 bp, Neisseria gonorrhoeae
tgacaacgagctgggcggtg

SEQ ID NO: 53640 - DNA, 20 bp, Neisseria gonorrhoeae
gacaacgagctgggcggtgt

SEQ ID NO: 53641 - DNA, 20 bp, Neisseria gonorrhoeae
acaacgagctgggcggtgtg

SEQ ID NO: 53642 - DNA, 20 bp, Neisseria gonorrhoeae
cctgacaaccttgtccgcct

SEQ ID NO: 53643 - DNA, 20 bp, Neisseria gonorrhoeae
tccgcctccgtaaccgcctt

SEQ ID NO: 53644 - DNA, 20 bp, Neisseria gonorrhoeae
ttcgcatccgcgccgaagag

SEQ ID NO: 53645 - DNA, 20 bp, Neisseria gonorrhoeae
gcatccgcgccgaagagttc

SEQ ID NO: 53646 - DNA, 20 bp, Neisseria gonorrhoeae
cgacaaacgcccgtattcct

SEQ ID NO: 53647 - DNA, 20 bp, Neisseria gonorrhoeae
cccgtcctgccgtcaaacca

SEQ ID NO: 53648 - DNA, 20 bp, Neisseria gonorrhoeae
tccggcgccgtttcggacac

SEQ ID NO: 53649 - DNA, 20 bp, Neisseria gonorrhoeae
cggacacggcggcgacatcc

SEQ ID NO: 53650 - DNA, 20 bp, Neisseria gonorrhoeae
ggacacggcggcgacatcca

SEQ ID NO: 53651 - DNA, 20 bp, Neisseria gonorrhoeae
tcgcagcgtgtggagggctg

SEQ ID NO: 53652 - DNA, 20 bp, Neisseria gonorrhoeae
cttaggcgataccctgcccg

SEQ ID NO: 53653 - DNA, 20 bp, Neisseria gonorrhoeae
ttaggcgataccctgcccgc

SEQ ID NO: 53654 - DNA, 20 bp, Neisseria gonorrhoeae
ggcgataccctgcccgccga

SEQ ID NO: 53655 - DNA, 20 bp, Neisseria gonorrhoeae
cgcaacctgcggattcaata

SEQ ID NO: 53656 - DNA, 20 bp, Neisseria gonorrhoeae
aataccggcaacaccgtatc

SEQ ID NO: 53657 - DNA, 20 bp, Neisseria gonorrhoeae
cggatgttgcgcacggtaag

SEQ ID NO: 53658 - DNA, 20 bp, Neisseria gonorrhoeae
cgcacggtaagcgcgtacag

SEQ ID NO: 53659 - DNA, 20 bp, Neisseria gonorrhoeae
cgccaaaccctcaggataat

SEQ ID NO: 53660 - DNA, 20 bp, Neisseria gonorrhoeae
tcctgagggtttggcggaat

SEQ ID NO: 53661 - DNA, 20 bp, Neisseria gonorrhoeae
ggcggaatcggccggggctg

SEQ ID NO: 53662 - DNA, 20 bp, Neisseria gonorrhoeae
tcgtcccattccccgtttgc

SEQ ID NO: 53663 - DNA, 20 bp, Neisseria gonorrhoeae
cccgtttgccagccccgtac

SEQ ID NO: 53664 - DNA, 20 bp, Neisseria gonorrhoeae
gccagccccgtacccaaata

SEQ ID NO: 53665 - DNA, 20 bp, Neisseria gonorrhoeae
ccagccccgtacccaaatac

SEQ ID NO: 53666 - DNA, 20 bp, Neisseria gonorrhoeae
gcgggcgagtatttgggtac

SEQ ID NO: 53667 - DNA, 20 bp, Neisseria gonorrhoeae
gtgctgggcacgtcttccaa

SEQ ID NO: 53668 - DNA, 20 bp, Neisseria gonorrhoeae
caaagccactttcagccgta

SEQ ID NO: 53669 - DNA, 20 bp, Neisseria gonorrhoeae
cagccgtatgttttgcaggt

SEQ ID NO: 53670 - DNA, 20 bp, Neisseria gonorrhoeae
agccgtatgttttgcaggtc

SEQ ID NO: 53671 - DNA, 20 bp, Neisseria gonorrhoeae
ggaagacgtgcccagcacca

SEQ ID NO: 53672 - DNA, 20 bp, Neisseria gonorrhoeae
ttttgtcgcgcaggcagtct

SEQ ID NO: 53673 - DNA, 20 bp, Neisseria gonorrhoeae
tttgtcgcgcaggcagtctg

SEQ ID NO: 53674 - DNA, 20 bp, Neisseria gonorrhoeae
ttgtcgcgcaggcagtctgc

SEQ ID NO: 53675 - DNA, 20 bp, Neisseria gonorrhoeae
tgtcgcgcaggcagtctgcc

SEQ ID NO: 53676 - DNA, 20 bp, Neisseria gonorrhoeae
gtcgcgcaggcagtctgccg

SEQ ID NO: 53677 - DNA, 20 bp, Neisseria gonorrhoeae
tcattgcacacgcccgcgat

SEQ ID NO: 53678 - DNA, 20 bp, Neisseria gonorrhoeae
cacacgcccgcgatgttcgg

SEQ ID NO: 53679 - DNA, 20 bp, Neisseria gonorrhoeae
ggcgtgcattgcccgccttt

SEQ ID NO: 53680 - DNA, 20 bp, Neisseria gonorrhoeae
cccgcctttggcggctttgc

SEQ ID NO: 53681 - DNA, 20 bp, Neisseria gonorrhoeae
ggcggctttgcgtatcgcgc

SEQ ID NO: 53682 - DNA, 20 bp, Neisseria gonorrhoeae
cgtccacaggccggcgccca

SEQ ID NO: 53683 - DNA, 20 bp, Neisseria gonorrhoeae
ccgccgtcatcgcgccggct

SEQ ID NO: 53684 - DNA, 20 bp, Neisseria gonorrhoeae
ggcgccggcctgtggacgca

SEQ ID NO: 53685 - DNA, 20 bp, Neisseria gonorrhoeae
ctgaaccgcggggcgatgcc

SEQ ID NO: 53686 - DNA, 20 bp, Neisseria gonorrhoeae
tgaaccgcggggcgatgccc

SEQ ID NO: 53687 - DNA, 20 bp, Neisseria gonorrhoeae
ttccagcgcgtcgcgcatcg

SEQ ID NO: 53688 - DNA, 20 bp, Neisseria gonorrhoeae
tccagcgcgtcgcgcatcgc

SEQ ID NO: 53689 - DNA, 20 bp, Neisseria gonorrhoeae
ccagcgcgtcgcgcatcgcc

SEQ ID NO: 53690 - DNA, 20 bp, Neisseria gonorrhoeae
gcgcgcggaagcccgccgcc

SEQ ID NO: 53691 - DNA, 20 bp, Neisseria gonorrhoeae
acaggccggatcctacacgc

SEQ ID NO: 53692 - DNA, 20 bp, Neisseria gonorrhoeae
caggccggatcctacacgcc

SEQ ID NO: 53693 - DNA, 20 bp, Neisseria gonorrhoeae
acgatgtgggcattcaggcg

SEQ ID NO: 53694 - DNA, 20 bp, Neisseria gonorrhoeae
cgatgtgggcattcaggcgg

SEQ ID NO: 53695 - DNA, 20 bp, Neisseria gonorrhoeae
ttgcggacaaaggcggcgcg

SEQ ID NO: 53696 - DNA, 20 bp, Neisseria gonorrhoeae
cggacaaaggcggcgcgttg

SEQ ID NO: 53697 - DNA, 20 bp, Neisseria gonorrhoeae
gtccgggccgtaaaagactc

SEQ ID NO: 53698 - DNA, 20 bp, Neisseria gonorrhoeae
cgacaacggcgccggcttca

SEQ ID NO: 53699 - DNA, 20 bp, Neisseria gonorrhoeae
tcgcaatgccggatgacgtc

SEQ ID NO: 53700 - DNA, 20 bp, Neisseria gonorrhoeae
tcgagaaaatgcgactgcgg

SEQ ID NO: 53701 - DNA, 20 bp, Neisseria gonorrhoeae
aagcggcaatgagggcggta

SEQ ID NO: 53702 - DNA, 20 bp, Neisseria gonorrhoeae
ccgcttcaagttgcggtccg

SEQ ID NO: 53703 - DNA, 20 bp, Neisseria gonorrhoeae
aagttgcggtccgcagtcgc

SEQ ID NO: 53704 - DNA, 20 bp, Neisseria gonorrhoeae
cggtccgcagtcgcattttc

SEQ ID NO: 53705 - DNA, 20 bp, Neisseria gonorrhoeae
tttgcggggttttcggcggg

SEQ ID NO: 53706 - DNA, 20 bp, Neisseria gonorrhoeae
gcggggttttcggcgggcga

SEQ ID NO: 53707 - DNA, 20 bp, Neisseria gonorrhoeae
cggggttttcggcgggcgat

SEQ ID NO: 53708 - DNA, 20 bp, Neisseria gonorrhoeae
tcggcgggcgatacttcggg

SEQ ID NO: 53709 - DNA, 20 bp, Neisseria gonorrhoeae
cggcgggcgatacttcgggc

SEQ ID NO: 53710 - DNA, 20 bp, Neisseria gonorrhoeae
ggtttttgcaatcgtattgc

SEQ ID NO: 53711 - DNA, 20 bp, Neisseria gonorrhoeae
gtttttgcaatcgtattgct

SEQ ID NO: 53712 - DNA, 20 bp, Neisseria gonorrhoeae
ttgcaatcgtattgctcagg

SEQ ID NO: 53713 - DNA, 20 bp, Neisseria gonorrhoeae
tgcaatcgtattgctcaggc

SEQ ID NO: 53714 - DNA, 20 bp, Neisseria gonorrhoeae
gcaatcgtattgctcaggct

SEQ ID NO: 53715 - DNA, 20 bp, Neisseria gonorrhoeae
caaaggctgcgagccgacgg

SEQ ID NO: 53716 - DNA, 20 bp, Neisseria gonorrhoeae
aaaggctgcgagccgacggg

SEQ ID NO: 53717 - DNA, 20 bp, Neisseria gonorrhoeae
tccaccaccaagagcgcgcc

SEQ ID NO: 53718 - DNA, 20 bp, Neisseria gonorrhoeae
gcggaattggcgcacggcat

SEQ ID NO: 53719 - DNA, 20 bp, Neisseria gonorrhoeae
gcgcacggcatcggcgcgct

SEQ ID NO: 53720 - DNA, 20 bp, Neisseria gonorrhoeae
tgttcgcggtatccggtttg

SEQ ID NO: 53721 - DNA, 20 bp, Neisseria gonorrhoeae
gcggtatccggtttgttctt

SEQ ID NO: 53722 - DNA, 20 bp, Neisseria gonorrhoeae
gttctttgccgccgcgtatg

SEQ ID NO: 53723 - DNA, 20 bp, Neisseria gonorrhoeae
ttctttgccgccgcgtatgg

SEQ ID NO: 53724 - DNA, 20 bp, Neisseria gonorrhoeae
tttgccgccgcgtatggcga

SEQ ID NO: 53725 - DNA, 20 bp, Neisseria gonorrhoeae
tggtcaacagccgtatgtgt

SEQ ID NO: 53726 - DNA, 20 bp, Neisseria gonorrhoeae
ggtcaacagccgtatgtgtg

SEQ ID NO: 53727 - DNA, 20 bp, Neisseria gonorrhoeae
gtcaacagccgtatgtgtgc

SEQ ID NO: 53728 - DNA, 20 bp, Neisseria gonorrhoeae
gcagatggggcggttgtttt

SEQ ID NO: 53729 - DNA, 20 bp, Neisseria gonorrhoeae
ttttcggcacacatacggct

SEQ ID NO: 53730 - DNA, 20 bp, Neisseria gonorrhoeae
ggaaggcaacaccctgcgcg

SEQ ID NO: 53731 - DNA, 20 bp, Neisseria gonorrhoeae
cgtcctcgccgatccggccg

SEQ ID NO: 53732 - DNA, 20 bp, Neisseria gonorrhoeae
tctttggtgttttggcgttt

SEQ ID NO: 53733 - DNA, 20 bp, Neisseria gonorrhoeae
ggtgttttggcgtttgccgg

SEQ ID NO: 53734 - DNA, 20 bp, Neisseria gonorrhoeae
gtgttttggcgtttgccggc

SEQ ID NO: 53735 - DNA, 20 bp, Neisseria gonorrhoeae
caggaaaaagccgcgtccgg

SEQ ID NO: 53736 - DNA, 20 bp, Neisseria gonorrhoeae
tccaccaccgaagccctgcg

SEQ ID NO: 53737 - DNA, 20 bp, Neisseria gonorrhoeae
gaaaaggtcaacgcgctggg

SEQ ID NO: 53738 - DNA, 20 bp, Neisseria gonorrhoeae
aaaaggtcaacgcgctgggc

SEQ ID NO: 53739 - DNA, 20 bp, Neisseria gonorrhoeae
cgcgccgatgcccagcgcgt

SEQ ID NO: 53740 - DNA, 20 bp, Neisseria gonorrhoeae
ccggcctgatagactgcccg

SEQ ID NO: 53741 - DNA, 20 bp, Neisseria gonorrhoeae
caggttttacgttttgcaga

SEQ ID NO: 53742 - DNA, 20 bp, Neisseria gonorrhoeae
tacgttttgcagacgaccgc

SEQ ID NO: 53743 - DNA, 20 bp, Neisseria gonorrhoeae
acgttttgcagacgaccgcg

SEQ ID NO: 53744 - DNA, 20 bp, Neisseria gonorrhoeae
cgttttgcagacgaccgcgt

SEQ ID NO: 53745 - DNA, 20 bp, Neisseria gonorrhoeae
gccgccgccgccgaaaacat

SEQ ID NO: 53746 - DNA, 20 bp, Neisseria gonorrhoeae
ccgccgccgccgaaaacatc

SEQ ID NO: 53747 - DNA, 20 bp, Neisseria gonorrhoeae
tcggcggcggcggcaaacag

SEQ ID NO: 53748 - DNA, 20 bp, Neisseria gonorrhoeae
cggcggcggcggcaaacagg

SEQ ID NO: 53749 - DNA, 20 bp, Neisseria gonorrhoeae
ggcggcggcggcaaacagga

SEQ ID NO: 53750 - DNA, 20 bp, Neisseria gonorrhoeae
taccgtaaaatccgcacggt

SEQ ID NO: 53751 - DNA, 20 bp, Neisseria gonorrhoeae
accgtaaaatccgcacggtt

SEQ ID NO: 53752 - DNA, 20 bp, Neisseria gonorrhoeae
ccgtaaaatccgcacggtta

SEQ ID NO: 53753 - DNA, 20 bp, Neisseria gonorrhoeae
ccaaccattgtttggccttg

SEQ ID NO: 53754 - DNA, 20 bp, Neisseria gonorrhoeae
tttggccttggctgccgatg

SEQ ID NO: 53755 - DNA, 20 bp, Neisseria gonorrhoeae
atgcgctacggcagccgcga

SEQ ID NO: 53756 - DNA, 20 bp, Neisseria gonorrhoeae
cgcttcgccgccgaaaagtt

SEQ ID NO: 53757 - DNA, 20 bp, Neisseria gonorrhoeae
gccgccgaaaagttcttttt

SEQ ID NO: 53758 - DNA, 20 bp, Neisseria gonorrhoeae
tttttcgcggctgccgtagc

SEQ ID NO: 53759 - DNA, 20 bp, Neisseria gonorrhoeae
ttcgcggctgccgtagcgca

SEQ ID NO: 53760 - DNA, 20 bp, Neisseria gonorrhoeae
gatgatgaaacaatacggct

SEQ ID NO: 53761 - DNA, 20 bp, Neisseria gonorrhoeae
tgcctattgccggtatggtt

SEQ ID NO: 53762 - DNA, 20 bp, Neisseria gonorrhoeae
ccggtatggtttcaagacgc

SEQ ID NO: 53763 - DNA, 20 bp, Neisseria gonorrhoeae
caagacgcttcacgccttcc

SEQ ID NO: 53764 - DNA, 20 bp, Neisseria gonorrhoeae
aagacgcttcacgccttcct

SEQ ID NO: 53765 - DNA, 20 bp, Neisseria gonorrhoeae
caaccggtacaccagaggtt

SEQ ID NO: 53766 - DNA, 20 bp, Neisseria gonorrhoeae
gtccactccggtcctctcgt

SEQ ID NO: 53767 - DNA, 20 bp, Neisseria gonorrhoeae
caacgcccactgcagatagg

SEQ ID NO: 53768 - DNA, 20 bp, Neisseria gonorrhoeae
gaagtttgacgggggctgct

SEQ ID NO: 53769 - DNA, 20 bp, Neisseria gonorrhoeae
gacgggggctgctcctagta

SEQ ID NO: 53770 - DNA, 20 bp, Neisseria gonorrhoeae
acgccgcccgccgaaatagc

SEQ ID NO: 53771 - DNA, 20 bp, Neisseria gonorrhoeae
cgccgcccgccgaaatagct

SEQ ID NO: 53772 - DNA, 20 bp, Neisseria gonorrhoeae
cgcccggcccggcggggccc

SEQ ID NO: 53773 - DNA, 20 bp, Neisseria gonorrhoeae
ggccttggctgccgatgagg

SEQ ID NO: 53774 - DNA, 20 bp, Neisseria gonorrhoeae
gccttggctgccgatgaggt

SEQ ID NO: 53775 - DNA, 20 bp, Neisseria gonorrhoeae
gcccgtgcggatacggattg

SEQ ID NO: 53776 - DNA, 20 bp, Neisseria gonorrhoeae
cctcctcgaccggcagcaca

SEQ ID NO: 53777 - DNA, 20 bp, Neisseria gonorrhoeae
ccgtcgccgattttgcccga

SEQ ID NO: 53778 - DNA, 20 bp, Neisseria gonorrhoeae
tgcccgaacgcgccacctcg

SEQ ID NO: 53779 - DNA, 20 bp, Neisseria gonorrhoeae
gcccgaacgcgccacctcga

SEQ ID NO: 53780 - DNA, 20 bp, Neisseria gonorrhoeae
gcgggcgcggcaacaggcgc

SEQ ID NO: 53781 - DNA, 20 bp, Neisseria gonorrhoeae
cgggcgcggcaacaggcgcg

SEQ ID NO: 53782 - DNA, 20 bp, Neisseria gonorrhoeae
gcgtccgaaagcgggcttga

SEQ ID NO: 53783 - DNA, 20 bp, Neisseria gonorrhoeae
cggacgcgaacctttgcccg

SEQ ID NO: 53784 - DNA, 20 bp, Neisseria gonorrhoeae
ggacgcgaacctttgcccgt

SEQ ID NO: 53785 - DNA, 20 bp, Neisseria gonorrhoeae
tctccatccacgacgtgggc

SEQ ID NO: 53786 - DNA, 20 bp, Neisseria gonorrhoeae
gacaagccgcccgcgcccac

SEQ ID NO: 53787 - DNA, 20 bp, Neisseria gonorrhoeae
tggtcgccgagctgccagca

SEQ ID NO: 53788 - DNA, 20 bp, Neisseria gonorrhoeae
ggtcgccgagctgccagcag

SEQ ID NO: 53789 - DNA, 20 bp, Neisseria gonorrhoeae
gtcgccgagctgccagcagc

SEQ ID NO: 53790 - DNA, 20 bp, Neisseria gonorrhoeae
ggtatttgccgaccatttgg

SEQ ID NO: 53791 - DNA, 20 bp, Neisseria gonorrhoeae
gtatttgccgaccatttggt

SEQ ID NO: 53792 - DNA, 20 bp, Neisseria gonorrhoeae
gccgaccatttggtcgcggt

SEQ ID NO: 53793 - DNA, 20 bp, Neisseria gonorrhoeae
ccgaccatttggtcgcggtg

SEQ ID NO: 53794 - DNA, 20 bp, Neisseria gonorrhoeae
ggtcgcggtgggtcatgccg

SEQ ID NO: 53795 - DNA, 20 bp, Neisseria gonorrhoeae
acccgcgccggattcgatgc

SEQ ID NO: 53796 - DNA, 20 bp, Neisseria gonorrhoeae
cgatttgcccgtttacgccc

SEQ ID NO: 53797 - DNA, 20 bp, Neisseria gonorrhoeae
gatttgcccgtttacgccct

SEQ ID NO: 53798 - DNA, 20 bp, Neisseria gonorrhoeae
gcccgtttacgccctgttcg

SEQ ID NO: 53799 - DNA, 20 bp, Neisseria gonorrhoeae
cccgtttacgccctgttcgc

SEQ ID NO: 53800 - DNA, 20 bp, Neisseria gonorrhoeae
caccctgccttgcgcgacca

SEQ ID NO: 53801 - DNA, 20 bp, Neisseria gonorrhoeae
cgcgaccaattcgccgcctt

SEQ ID NO: 53802 - DNA, 20 bp, Neisseria gonorrhoeae
gccgccttctttgccgatcc

SEQ ID NO: 53803 - DNA, 20 bp, Neisseria gonorrhoeae
ggatcggcaaagaaggcggc

SEQ ID NO: 53804 - DNA, 20 bp, Neisseria gonorrhoeae
gtcgcgcaaggcagggtgga

SEQ ID NO: 53805 - DNA, 20 bp, Neisseria gonorrhoeae
ttacggggatgtattttgcc

SEQ ID NO: 53806 - DNA, 20 bp, Neisseria gonorrhoeae
cggggatgtattttgccaag

SEQ ID NO: 53807 - DNA, 20 bp, Neisseria gonorrhoeae
tgccaagtggctgggcgcgg

SEQ ID NO: 53808 - DNA, 20 bp, Neisseria gonorrhoeae
gccaagtggctgggcgcgga

SEQ ID NO: 53809 - DNA, 20 bp, Neisseria gonorrhoeae
ccaagtggctgggcgcggaa

SEQ ID NO: 53810 - DNA, 20 bp, Neisseria gonorrhoeae
ccggttacaaaatgttgaag

SEQ ID NO: 53811 - DNA, 20 bp, Neisseria gonorrhoeae
caaaatgttgaagaacacgg

SEQ ID NO: 53812 - DNA, 20 bp, Neisseria gonorrhoeae
aagaacacggtcgtcatgcc

SEQ ID NO: 53813 - DNA, 20 bp, Neisseria gonorrhoeae
gcacgcgatgggcattgccg

SEQ ID NO: 53814 - DNA, 20 bp, Neisseria gonorrhoeae
ttcaacattttgtaaccggc

SEQ ID NO: 53815 - DNA, 20 bp, Neisseria gonorrhoeae
ccgtagccgccggcagcacc

SEQ ID NO: 53816 - DNA, 20 bp, Neisseria gonorrhoeae
acgaccaaccgtttctgtgc

SEQ ID NO: 53817 - DNA, 20 bp, Neisseria gonorrhoeae
gtcgtgaagactgcaccgac

SEQ ID NO: 53818 - DNA, 20 bp, Neisseria gonorrhoeae
ggcggcggcgagtccgacgg

SEQ ID NO: 53819 - DNA, 20 bp, Neisseria gonorrhoeae
gcggcggcgagtccgacggg

SEQ ID NO: 53820 - DNA, 20 bp, Neisseria gonorrhoeae
gtagatgccgtgcagggctt

SEQ ID NO: 53821 - DNA, 20 bp, Neisseria gonorrhoeae
ggcggcttcgtggtagccgg

SEQ ID NO: 53822 - DNA, 20 bp, Neisseria gonorrhoeae
gtggtagccggtgccgtagg

SEQ ID NO: 53823 - DNA, 20 bp, Neisseria gonorrhoeae
aggctgcccgaacactgcta

SEQ ID NO: 53824 - DNA, 20 bp, Neisseria gonorrhoeae
caacctccgcatcatcgacg

SEQ ID NO: 53825 - DNA, 20 bp, Neisseria gonorrhoeae
aaatagcagtgttcgggcag

SEQ ID NO: 53826 - DNA, 20 bp, Neisseria gonorrhoeae
gggcagcctgaacgcggccc

SEQ ID NO: 53827 - DNA, 20 bp, Neisseria gonorrhoeae
gtcttggttgatttgctcga

SEQ ID NO: 53828 - DNA, 20 bp, Neisseria gonorrhoeae
atcggcgaagacaagctgcc

SEQ ID NO: 53829 - DNA, 20 bp, Neisseria gonorrhoeae
tcggcgaagacaagctgccg

SEQ ID NO: 53830 - DNA, 20 bp, Neisseria gonorrhoeae
aaagaacaaatcaaacgcgc

SEQ ID NO: 53831 - DNA, 20 bp, Neisseria gonorrhoeae
tttgacggcgggcaggcggc

SEQ ID NO: 53832 - DNA, 20 bp, Neisseria gonorrhoeae
gacggcgggcaggcggctgc

SEQ ID NO: 53833 - DNA, 20 bp, Neisseria gonorrhoeae
cacccggcttcgccacccgc

SEQ ID NO: 53834 - DNA, 20 bp, Neisseria gonorrhoeae
gccacccgcaccccgtgggc

SEQ ID NO: 53835 - DNA, 20 bp, Neisseria gonorrhoeae
gaggtagatggggaggcgcg

SEQ ID NO: 53836 - DNA, 20 bp, Neisseria gonorrhoeae
aggtagatggggaggcgcgg

SEQ ID NO: 53837 - DNA, 20 bp, Neisseria gonorrhoeae
tgcccacggggtgcgggtgg

SEQ ID NO: 53838 - DNA, 20 bp, Neisseria gonorrhoeae
ttcataataattgccggttg

SEQ ID NO: 53839 - DNA, 20 bp, Neisseria gonorrhoeae
ataataattgccggttgcct

SEQ ID NO: 53840 - DNA, 20 bp, Neisseria gonorrhoeae
ccggttgcctccatgcagat

SEQ ID NO: 53841 - DNA, 20 bp, Neisseria gonorrhoeae
cctccatgcagatatgcaga

SEQ ID NO: 53842 - DNA, 20 bp, Neisseria gonorrhoeae
tgacatcccaagcttttcaa

SEQ ID NO: 53843 - DNA, 20 bp, Neisseria gonorrhoeae
ttcaacaacaaaacacacaa

SEQ ID NO: 53844 - DNA, 20 bp, Neisseria gonorrhoeae
aacaacaaaacacacaacgc

SEQ ID NO: 53845 - DNA, 20 bp, Neisseria gonorrhoeae
cgccaccaacccataggccg

SEQ ID NO: 53846 - DNA, 20 bp, Neisseria gonorrhoeae
cagacggcctatgggttggt

SEQ ID NO: 53847 - DNA, 20 bp, Neisseria gonorrhoeae
agacggcctatgggttggtg

SEQ ID NO: 53848 - DNA, 20 bp, Neisseria gonorrhoeae
gtacgtcaaagccgacaacc

SEQ ID NO: 53849 - DNA, 20 bp, Neisseria gonorrhoeae
acgcccacagcagcttcctc

SEQ ID NO: 53850 - DNA, 20 bp, Neisseria gonorrhoeae
cgcccacagcagcttcctct

SEQ ID NO: 53851 - DNA, 20 bp, Neisseria gonorrhoeae
ctctctgatacgccgcaaat

SEQ ID NO: 53852 - DNA, 20 bp, Neisseria gonorrhoeae
gcggcgtatcagagaggaag

SEQ ID NO: 53853 - DNA, 20 bp, Neisseria gonorrhoeae
ccagccaaatcggcagcggc

SEQ ID NO: 53854 - DNA, 20 bp, Neisseria gonorrhoeae
tggacgaaccctccatcggc

SEQ ID NO: 53855 - DNA, 20 bp, Neisseria gonorrhoeae
ggacgaaccctccatcggcc

SEQ ID NO: 53856 - DNA, 20 bp, Neisseria gonorrhoeae
gacgaaccctccatcggcct

SEQ ID NO: 53857 - DNA, 20 bp, Neisseria gonorrhoeae
tcgcgctggtgcaggccgat

SEQ ID NO: 53858 - DNA, 20 bp, Neisseria gonorrhoeae
tccttcaacgtcaaaggcgg

SEQ ID NO: 53859 - DNA, 20 bp, Neisseria gonorrhoeae
aacgtcaaaggcggccgctg

SEQ ID NO: 53860 - DNA, 20 bp, Neisseria gonorrhoeae
aagtcgaaatgcacttcctc

SEQ ID NO: 53861 - DNA, 20 bp, Neisseria gonorrhoeae
cgactttaatcacgccgtcg

SEQ ID NO: 53862 - DNA, 20 bp, Neisseria gonorrhoeae
gactttaatcacgccgtcgc

SEQ ID NO: 53863 - DNA, 20 bp, Neisseria gonorrhoeae
tcctgccgcgccgcgaccgc

SEQ ID NO: 53864 - DNA, 20 bp, Neisseria gonorrhoeae
cctgccgcgccgcgaccgcg

SEQ ID NO: 53865 - DNA, 20 bp, Neisseria gonorrhoeae
ctgccgcgccgcgaccgcgt

SEQ ID NO: 53866 - DNA, 20 bp, Neisseria gonorrhoeae
acgccgcccgccgaaatagc

SEQ ID NO: 53867 - DNA, 20 bp, Neisseria gonorrhoeae
cgccgcccgccgaaatagct

SEQ ID NO: 53868 - DNA, 20 bp, Neisseria gonorrhoeae
caattcgacttcttgcgcgc

SEQ ID NO: 53869 - DNA, 20 bp, Neisseria gonorrhoeae
aattcgacttcttgcgcgcc

SEQ ID NO: 53870 - DNA, 20 bp, Neisseria gonorrhoeae
gacttcttgcgcgcccaaac

SEQ ID NO: 53871 - DNA, 20 bp, Neisseria gonorrhoeae
ttgcgcgcccaaacgcatcg

SEQ ID NO: 53872 - DNA, 20 bp, Neisseria gonorrhoeae
cgcgcccaaacgcatcgtgc

SEQ ID NO: 53873 - DNA, 20 bp, Neisseria gonorrhoeae
ttttccacgcggtcaaatcc

SEQ ID NO: 53874 - DNA, 20 bp, Neisseria gonorrhoeae
tttccacgcggtcaaatccg

SEQ ID NO: 53875 - DNA, 20 bp, Neisseria gonorrhoeae
ttccacgcggtcaaatccgc

SEQ ID NO: 53876 - DNA, 20 bp, Neisseria gonorrhoeae
tccacgcggtcaaatccgcc

SEQ ID NO: 53877 - DNA, 20 bp, Neisseria gonorrhoeae
ccacgcggtcaaatccgcct

SEQ ID NO: 53878 - DNA, 20 bp, Neisseria gonorrhoeae
cccggtcgcgtccgtccaat

SEQ ID NO: 53879 - DNA, 20 bp, Neisseria gonorrhoeae
ccggtcgcgtccgtccaatt

SEQ ID NO: 53880 - DNA, 20 bp, Neisseria gonorrhoeae
ctgcgccacaccgcgcccgc

SEQ ID NO: 53881 - DNA, 20 bp, Neisseria gonorrhoeae
ccgcgtgtttcgccgttttg

SEQ ID NO: 53882 - DNA, 20 bp, Neisseria gonorrhoeae
cgccgttttgcgggatacgc

SEQ ID NO: 53883 - DNA, 20 bp, Neisseria gonorrhoeae
cgaggatgctgccgatgttg

SEQ ID NO: 53884 - DNA, 20 bp, Neisseria gonorrhoeae
gaggatgctgccgatgttgg

SEQ ID NO: 53885 - DNA, 20 bp, Neisseria gonorrhoeae
gggtctttttcggtcaggcg

SEQ ID NO: 53886 - DNA, 20 bp, Neisseria gonorrhoeae
ttcggtcaggcggaagatgc

SEQ ID NO: 53887 - DNA, 20 bp, Neisseria gonorrhoeae
tcggtcaggcggaagatgcc

SEQ ID NO: 53888 - DNA, 20 bp, Neisseria gonorrhoeae
agcgcggcgcggtcggtttt

SEQ ID NO: 53889 - DNA, 20 bp, Neisseria gonorrhoeae
tttcgaggcggacgacggcg

SEQ ID NO: 53890 - DNA, 20 bp, Neisseria gonorrhoeae
ttcgaggcggacgacggcga

SEQ ID NO: 53891 - DNA, 20 bp, Neisseria gonorrhoeae
tcgaggcggacgacggcgac

SEQ ID NO: 53892 - DNA, 20 bp, Neisseria gonorrhoeae
cgaggcggacgacggcgact

SEQ ID NO: 53893 - DNA, 20 bp, Neisseria gonorrhoeae
gccttagtcggcttctgggt

SEQ ID NO: 53894 - DNA, 20 bp, Neisseria gonorrhoeae
gtcggcttctgggtcatcgg

SEQ ID NO: 53895 - DNA, 20 bp, Neisseria gonorrhoeae
tgggtcatcggtatgacccc

SEQ ID NO: 53896 - DNA, 20 bp, Neisseria gonorrhoeae
tgctggtgttgaccgcattc

SEQ ID NO: 53897 - DNA, 20 bp, Neisseria gonorrhoeae
gctggtgttgaccgcattca

SEQ ID NO: 53898 - DNA, 20 bp, Neisseria gonorrhoeae
ggttgagctgctgaaaaacc

SEQ ID NO: 53899 - DNA, 20 bp, Neisseria gonorrhoeae
gttgagctgctgaaaaaccc

SEQ ID NO: 53900 - DNA, 20 bp, Neisseria gonorrhoeae
agctgctgaaaaacccgccc

SEQ ID NO: 53901 - DNA, 20 bp, Neisseria gonorrhoeae
ttggtcgagctgcttgccca

SEQ ID NO: 53902 - DNA, 20 bp, Neisseria gonorrhoeae
gtcgagctgcttgcccaccg

SEQ ID NO: 53903 - DNA, 20 bp, Neisseria gonorrhoeae
ccccatcggtatttccttcc

SEQ ID NO: 53904 - DNA, 20 bp, Neisseria gonorrhoeae
cccatcggtatttccttccc

SEQ ID NO: 53905 - DNA, 20 bp, Neisseria gonorrhoeae
ccttccccgcaggttcaggc

SEQ ID NO: 53906 - DNA, 20 bp, Neisseria gonorrhoeae
cttccccgcaggttcaggct

SEQ ID NO: 53907 - DNA, 20 bp, Neisseria gonorrhoeae
cccgcaggttcaggcttggt

SEQ ID NO: 53908 - DNA, 20 bp, Neisseria gonorrhoeae
tccgacgaaggtcactacgg

SEQ ID NO: 53909 - DNA, 20 bp, Neisseria gonorrhoeae
gtcggacaactctttcgcgt

SEQ ID NO: 53910 - DNA, 20 bp, Neisseria gonorrhoeae
cgcgtccattttggtcggcg

SEQ ID NO: 53911 - DNA, 20 bp, Neisseria gonorrhoeae
gcgtccattttggtcggcgg

SEQ ID NO: 53912 - DNA, 20 bp, Neisseria gonorrhoeae
tggtcggcggcgctacccac

SEQ ID NO: 53913 - DNA, 20 bp, Neisseria gonorrhoeae
ttcaagtgcatccgcgccgg

SEQ ID NO: 53914 - DNA, 20 bp, Neisseria gonorrhoeae
aagtgcatccgcgccggctg

SEQ ID NO: 53915 - DNA, 20 bp, Neisseria gonorrhoeae
gcggctttgccgcattttcc

SEQ ID NO: 53916 - DNA, 20 bp, Neisseria gonorrhoeae
cggctttgccgcattttccg

SEQ ID NO: 53917 - DNA, 20 bp, Neisseria gonorrhoeae
gccgcattttccgcagccgg

SEQ ID NO: 53918 - DNA, 20 bp, Neisseria gonorrhoeae
ggcgtggtcggcatcgacat

SEQ ID NO: 53919 - DNA, 20 bp, Neisseria gonorrhoeae
ggtggcgatggatttgttca

SEQ ID NO: 53920 - DNA, 20 bp, Neisseria gonorrhoeae
cagacggccccgccaccatg

SEQ ID NO: 53921 - DNA, 20 bp, Neisseria gonorrhoeae
agacggccccgccaccatgt

SEQ ID NO: 53922 - DNA, 20 bp, Neisseria gonorrhoeae
cgcccggttttgccaaactc

SEQ ID NO: 53923 - DNA, 20 bp, Neisseria gonorrhoeae
tgccaaactcgatgcgatgg

SEQ ID NO: 53924 - DNA, 20 bp, Neisseria gonorrhoeae
gccaaactcgatgcgatgga

SEQ ID NO: 53925 - DNA, 20 bp, Neisseria gonorrhoeae
ccaaactcgatgcgatggaa

SEQ ID NO: 53926 - DNA, 20 bp, Neisseria gonorrhoeae
gtgcccctcaaaaggatggg

SEQ ID NO: 53927 - DNA, 20 bp, Neisseria gonorrhoeae
tgtcggcgttccactgaacg

SEQ ID NO: 53928 - DNA, 20 bp, Neisseria gonorrhoeae
cactgaacggagatttcacc

SEQ ID NO: 53929 - DNA, 20 bp, Neisseria gonorrhoeae
caccctcaacctgcccgccg

SEQ ID NO: 53930 - DNA, 20 bp, Neisseria gonorrhoeae
accctcaacctgcccgccgt

SEQ ID NO: 53931 - DNA, 20 bp, Neisseria gonorrhoeae
ctgacggcttcgaggacggc

SEQ ID NO: 53932 - DNA, 20 bp, Neisseria gonorrhoeae
cggacattcctacgtcccgc

SEQ ID NO: 53933 - DNA, 20 bp, Neisseria gonorrhoeae
tttgtcgccgagtgcctgcc

SEQ ID NO: 53934 - DNA, 20 bp, Neisseria gonorrhoeae
ttgtcgccgagtgcctgccg

SEQ ID NO: 53935 - DNA, 20 bp, Neisseria gonorrhoeae
tgtcgccgagtgcctgccgg

SEQ ID NO: 53936 - DNA, 20 bp, Neisseria gonorrhoeae
gtcgccgagtgcctgccgga

SEQ ID NO: 53937 - DNA, 20 bp, Neisseria gonorrhoeae
gacggcggcatcgaagtcgg

SEQ ID NO: 53938 - DNA, 20 bp, Neisseria gonorrhoeae
ggcggagatgggggcagttt

SEQ ID NO: 53939 - DNA, 20 bp, Neisseria gonorrhoeae
gcggagatgggggcagtttt

SEQ ID NO: 53940 - DNA, 20 bp, Neisseria gonorrhoeae
tgtcgggcgagcggttgtat

SEQ ID NO: 53941 - DNA, 20 bp, Neisseria gonorrhoeae
gtcgggcgagcggttgtata

SEQ ID NO: 53942 - DNA, 20 bp, Neisseria gonorrhoeae
caaggcatcggttttctctg

SEQ ID NO: 53943 - DNA, 20 bp, Neisseria gonorrhoeae
tctctgtgcggactgtaaaa

SEQ ID NO: 53944 - DNA, 20 bp, Neisseria gonorrhoeae
ctctgtgcggactgtaaaat

SEQ ID NO: 53945 - DNA, 20 bp, Neisseria gonorrhoeae
tctgtgcggactgtaaaatt

SEQ ID NO: 53946 - DNA, 20 bp, Neisseria gonorrhoeae
taatcataattttacagtcc

SEQ ID NO: 53947 - DNA, 20 bp, Neisseria gonorrhoeae
ggcgggcgaacccggctggc

SEQ ID NO: 53948 - DNA, 20 bp, Neisseria gonorrhoeae
gcgggcgaacccggctggcg

SEQ ID NO: 53949 - DNA, 20 bp, Neisseria gonorrhoeae
tacctttccgcaaccggcgt

SEQ ID NO: 53950 - DNA, 20 bp, Neisseria gonorrhoeae
acctttccgcaaccggcgtg

SEQ ID NO: 53951 - DNA, 20 bp, Neisseria gonorrhoeae
cctttccgcaaccggcgtgg

SEQ ID NO: 53952 - DNA, 20 bp, Neisseria gonorrhoeae
gacgacgcaaaagacctggg

SEQ ID NO: 53953 - DNA, 20 bp, Neisseria gonorrhoeae
ccgcacaaatcgaagccgac

SEQ ID NO: 53954 - DNA, 20 bp, Neisseria gonorrhoeae
gatttgtgcggcaacgagtt

SEQ ID NO: 53955 - DNA, 20 bp, Neisseria gonorrhoeae
gtgcggcaacgagtttggcc

SEQ ID NO: 53956 - DNA, 20 bp, Neisseria gonorrhoeae
tgcggcaacgagtttggccg

SEQ ID NO: 53957 - DNA, 20 bp, Neisseria gonorrhoeae
tggccgtctgaaacttcagg

SEQ ID NO: 53958 - DNA, 20 bp, Neisseria gonorrhoeae
ggccgtctgaaacttcaggc

SEQ ID NO: 53959 - DNA, 20 bp, Neisseria gonorrhoeae
gccgtctgaaacttcaggca

SEQ ID NO: 53960 - DNA, 20 bp, Neisseria gonorrhoeae
aggcagcgcgcgacctttga

SEQ ID NO: 53961 - DNA, 20 bp, Neisseria gonorrhoeae
gaccacgctcatggcgtatt

SEQ ID NO: 53962 - DNA, 20 bp, Neisseria gonorrhoeae
tggcttgccattgcctgctg

SEQ ID NO: 53963 - DNA, 20 bp, Neisseria gonorrhoeae
ccattgcctgctggctgatt

SEQ ID NO: 53964 - DNA, 20 bp, Neisseria gonorrhoeae
cctgctggctgattttcttt

SEQ ID NO: 53965 - DNA, 20 bp, Neisseria gonorrhoeae
tcttttccaccctcaacccg

SEQ ID NO: 53966 - DNA, 20 bp, Neisseria gonorrhoeae
cttttccaccctcaacccgc

SEQ ID NO: 53967 - DNA, 20 bp, Neisseria gonorrhoeae
gtcgctatgattgcctcgct

SEQ ID NO: 53968 - DNA, 20 bp, Neisseria gonorrhoeae
cctcgctgtcggtcagatac

SEQ ID NO: 53969 - DNA, 20 bp, Neisseria gonorrhoeae
cccatgaaaaccacgtcgcc

SEQ ID NO: 53970 - DNA, 20 bp, Neisseria gonorrhoeae
aagcccctgatacggcggta

SEQ ID NO: 53971 - DNA, 20 bp, Neisseria gonorrhoeae
tcatgggcaagtttgccggc

SEQ ID NO: 53972 - DNA, 20 bp, Neisseria gonorrhoeae
ccggacaagcccccgcctac

SEQ ID NO: 53973 - DNA, 20 bp, Neisseria gonorrhoeae
tgccggtgtattggtaggcg

SEQ ID NO: 53974 - DNA, 20 bp, Neisseria gonorrhoeae
gccggtgtattggtaggcgg

SEQ ID NO: 53975 - DNA, 20 bp, Neisseria gonorrhoeae
ccggtgtattggtaggcggg

SEQ ID NO: 53976 - DNA, 20 bp, Neisseria gonorrhoeae
gtaggcgggggcttgtccgg

SEQ ID NO: 53977 - DNA, 20 bp, Neisseria gonorrhoeae
tctgaactccgttaaatttg

SEQ ID NO: 53978 - DNA, 20 bp, Neisseria gonorrhoeae
ctgaactccgttaaatttga

SEQ ID NO: 53979 - DNA, 20 bp, Neisseria gonorrhoeae
tgaactccgttaaatttgat

SEQ ID NO: 53980 - DNA, 20 bp, Neisseria gonorrhoeae
aatttgatggcaagaacccg

SEQ ID NO: 53981 - DNA, 20 bp, Neisseria gonorrhoeae
gatggcaagaacccgcaacc

SEQ ID NO: 53982 - DNA, 20 bp, Neisseria gonorrhoeae
atcgcatttgacgtgtagcc

SEQ ID NO: 53983 - DNA, 20 bp, Neisseria gonorrhoeae
gacgtgtagcctttgaactt

SEQ ID NO: 53984 - DNA, 20 bp, Neisseria gonorrhoeae
acgtgtagcctttgaacttt

SEQ ID NO: 53985 - DNA, 20 bp, Neisseria gonorrhoeae
gaacttttccagtgcggcga

SEQ ID NO: 53986 - DNA, 20 bp, Neisseria gonorrhoeae
aacttttccagtgcggcgag

SEQ ID NO: 53987 - DNA, 20 bp, Neisseria gonorrhoeae
cgcgcttgcgggcgtgaggt

SEQ ID NO: 53988 - DNA, 20 bp, Neisseria gonorrhoeae
cgggcgtgaggtcgggacgc

SEQ ID NO: 53989 - DNA, 20 bp, Neisseria gonorrhoeae
cttgtacatccgccgtggtg

SEQ ID NO: 53990 - DNA, 20 bp, Neisseria gonorrhoeae
tacatccgccgtggtgttgc

SEQ ID NO: 53991 - DNA, 20 bp, Neisseria gonorrhoeae
ccttgcgcgtccctgccgaa

SEQ ID NO: 53992 - DNA, 20 bp, Neisseria gonorrhoeae
gtcaaattttagaacggacg

SEQ ID NO: 53993 - DNA, 20 bp, Neisseria gonorrhoeae
tagaacggacggaatttcat

SEQ ID NO: 53994 - DNA, 20 bp, Neisseria gonorrhoeae
agaacggacggaatttcatg

SEQ ID NO: 53995 - DNA, 20 bp, Neisseria gonorrhoeae
gaacggacggaatttcatgc

SEQ ID NO: 53996 - DNA, 20 bp, Neisseria gonorrhoeae
catgcagtggcgttagcttt

SEQ ID NO: 53997 - DNA, 20 bp, Neisseria gonorrhoeae
cgccccttccctcttcccat

SEQ ID NO: 53998 - DNA, 20 bp, Neisseria gonorrhoeae
cctcttcccattccgttgtg

SEQ ID NO: 53999 - DNA, 20 bp, Neisseria gonorrhoeae
ccattccgttgtgaaagccc

SEQ ID NO: 54000 - DNA, 20 bp, Neisseria gonorrhoeae
cgttgtgaaagcccgaaccg

SEQ ID NO: 54001 - DNA, 20 bp, Neisseria gonorrhoeae
tgaaagcccgaaccgtgcct

SEQ ID NO: 54002 - DNA, 20 bp, Neisseria gonorrhoeae
agcagccagaagccccaagt

SEQ ID NO: 54003 - DNA, 20 bp, Neisseria gonorrhoeae
gtcgtcaaaccgcgcgttcg

SEQ ID NO: 54004 - DNA, 20 bp, Neisseria gonorrhoeae
tcgtcaaaccgcgcgttcgg

SEQ ID NO: 54005 - DNA, 20 bp, Neisseria gonorrhoeae
ggtttcaagtagcgcgcaac

SEQ ID NO: 54006 - DNA, 20 bp, Neisseria gonorrhoeae
cgcgctacttgaaaccgaac

SEQ ID NO: 54007 - DNA, 20 bp, Neisseria gonorrhoeae
caaagcggagaagcaggcgc

SEQ ID NO: 54008 - DNA, 20 bp, Neisseria gonorrhoeae
ccatagaggcggaggtagag

SEQ ID NO: 54009 - DNA, 20 bp, Neisseria gonorrhoeae
cgggcacgctgcaccacctg

SEQ ID NO: 54010 - DNA, 20 bp, Neisseria gonorrhoeae
tccggctctacctccgcctc

SEQ ID NO: 54011 - DNA, 20 bp, Neisseria gonorrhoeae
tccgctttggaagtcgtgcc

SEQ ID NO: 54012 - DNA, 20 bp, Neisseria gonorrhoeae
acccacatccccgtaatcca

SEQ ID NO: 54013 - DNA, 20 bp, Neisseria gonorrhoeae
tcgaatccctgagccgttgc

SEQ ID NO: 54014 - DNA, 20 bp, Neisseria gonorrhoeae
ccgccagttgcagcgcatac

SEQ ID NO: 54015 - DNA, 20 bp, Neisseria gonorrhoeae
cagcgcatacgccgcacaac

SEQ ID NO: 54016 - DNA, 20 bp, Neisseria gonorrhoeae
tgcggcgtatgcgctgcaac

SEQ ID NO: 54017 - DNA, 20 bp, Neisseria gonorrhoeae
gcggttcgcgtgtcaatgcc

SEQ ID NO: 54018 - DNA, 20 bp, Neisseria gonorrhoeae
gcgtgtcaatgccgtcagca

SEQ ID NO: 54019 - DNA, 20 bp, Neisseria gonorrhoeae
tccggcgagcgcatcgacgt

SEQ ID NO: 54020 - DNA, 20 bp, Neisseria gonorrhoeae
tcctttggtcgcccgagcct

SEQ ID NO: 54021 - DNA, 20 bp, Neisseria gonorrhoeae
ggtcgcccgagcctgcccaa

SEQ ID NO: 54022 - DNA, 20 bp, Neisseria gonorrhoeae
agccggagcagacggcagaa

SEQ ID NO: 54023 - DNA, 20 bp, Neisseria gonorrhoeae
cgcttctgccttggcacggg

SEQ ID NO: 54024 - DNA, 20 bp, Neisseria gonorrhoeae
tgccttggcacgggcttctg

SEQ ID NO: 54025 - DNA, 20 bp, Neisseria gonorrhoeae
gcacgggcttctgcgcgtgc

SEQ ID NO: 54026 - DNA, 20 bp, Neisseria gonorrhoeae
tgcgcgtgcggcagcttcgg

SEQ ID NO: 54027 - DNA, 20 bp, Neisseria gonorrhoeae
cggcggaaaccaaacccgcc

SEQ ID NO: 54028 - DNA, 20 bp, Neisseria gonorrhoeae
gccggttttttggcatcttt

SEQ ID NO: 54029 - DNA, 20 bp, Neisseria gonorrhoeae
tttggcatctttgcctttgc

SEQ ID NO: 54030 - DNA, 20 bp, Neisseria gonorrhoeae
ttggcatctttgcctttgcc

SEQ ID NO: 54031 - DNA, 20 bp, Neisseria gonorrhoeae
tggcatctttgcctttgccg

SEQ ID NO: 54032 - DNA, 20 bp, Neisseria gonorrhoeae
ggcggcatcccacggggctt

SEQ ID NO: 54033 - DNA, 20 bp, Neisseria gonorrhoeae
gcggcatcccacggggcttt

SEQ ID NO: 54034 - DNA, 20 bp, Neisseria gonorrhoeae
gcggctgtgcagctcgatat

SEQ ID NO: 54035 - DNA, 20 bp, Neisseria gonorrhoeae
cggctgtgcagctcgatatc

SEQ ID NO: 54036 - DNA, 20 bp, Neisseria gonorrhoeae
gcaggacgtggagcagatcg

SEQ ID NO: 54037 - DNA, 20 bp, Neisseria gonorrhoeae
ttcgacatggcgtgtggtgg

SEQ ID NO: 54038 - DNA, 20 bp, Neisseria gonorrhoeae
gacatggcgtgtggtggacg

SEQ ID NO: 54039 - DNA, 20 bp, Neisseria gonorrhoeae
ctgacttcgccgaagccgct

SEQ ID NO: 54040 - DNA, 20 bp, Neisseria gonorrhoeae
tgacttcgccgaagccgctg

SEQ ID NO: 54041 - DNA, 20 bp, Neisseria gonorrhoeae
gccgaagccgctgtcgcgca

SEQ ID NO: 54042 - DNA, 20 bp, Neisseria gonorrhoeae
tccagccattcctgcgccag

SEQ ID NO: 54043 - DNA, 20 bp, Neisseria gonorrhoeae
ctgcgccagcctgccctcga

SEQ ID NO: 54044 - DNA, 20 bp, Neisseria gonorrhoeae
gccgtcctgccactcggtct

SEQ ID NO: 54045 - DNA, 20 bp, Neisseria gonorrhoeae
gagggcaggctggcgcagga

SEQ ID NO: 54046 - DNA, 20 bp, Neisseria gonorrhoeae
cgcctattttccatcgtacc

SEQ ID NO: 54047 - DNA, 20 bp, Neisseria gonorrhoeae
tccatcgtaccgaaggttgc

SEQ ID NO: 54048 - DNA, 20 bp, Neisseria gonorrhoeae
ccatcgtaccgaaggttgcc

SEQ ID NO: 54049 - DNA, 20 bp, Neisseria gonorrhoeae
catcgtaccgaaggttgccg

SEQ ID NO: 54050 - DNA, 20 bp, Neisseria gonorrhoeae
ccgccactggtccgcataca

SEQ ID NO: 54051 - DNA, 20 bp, Neisseria gonorrhoeae
ggcagctattttgaatatcc

SEQ ID NO: 54052 - DNA, 20 bp, Neisseria gonorrhoeae
tgaatatccccgaagcacgc

SEQ ID NO: 54053 - DNA, 20 bp, Neisseria gonorrhoeae
gaatatccccgaagcacgca

SEQ ID NO: 54054 - DNA, 20 bp, Neisseria gonorrhoeae
aatatccccgaagcacgcag

SEQ ID NO: 54055 - DNA, 20 bp, Neisseria gonorrhoeae
ggggcgcgcgggcttggcgt

SEQ ID NO: 54056 - DNA, 20 bp, Neisseria gonorrhoeae
ttgagggcaagcagtggata

SEQ ID NO: 54057 - DNA, 20 bp, Neisseria gonorrhoeae
agggcaagcagtggataacc

SEQ ID NO: 54058 - DNA, 20 bp, Neisseria gonorrhoeae
gcattgcagacatcggacac

SEQ ID NO: 54059 - DNA, 20 bp, Neisseria gonorrhoeae
cagacatcggacaccttgtc

SEQ ID NO: 54060 - DNA, 20 bp, Neisseria gonorrhoeae
tcgtcttttgcggttatcca

SEQ ID NO: 54061 - DNA, 20 bp, Neisseria gonorrhoeae
ttcccgttgtcgggcggaca

SEQ ID NO: 54062 - DNA, 20 bp, Neisseria gonorrhoeae
ccgttgtcgggcggacaggc

SEQ ID NO: 54063 - DNA, 20 bp, Neisseria gonorrhoeae
tcgggcggacaggcaagctg

SEQ ID NO: 54064 - DNA, 20 bp, Neisseria gonorrhoeae
ccatcgcgcggctgcctttc

SEQ ID NO: 54065 - DNA, 20 bp, Neisseria gonorrhoeae
catcgcgcggctgcctttcg

SEQ ID NO: 54066 - DNA, 20 bp, Neisseria gonorrhoeae
tcttcggcattccgaaacgc

SEQ ID NO: 54067 - DNA, 20 bp, Neisseria gonorrhoeae
ggcattccgaaacgcaacgg

SEQ ID NO: 54068 - DNA, 20 bp, Neisseria gonorrhoeae
cgaaacgcaacgggcgggcc

SEQ ID NO: 54069 - DNA, 20 bp, Neisseria gonorrhoeae
ccgcggacgatgccgagcct

SEQ ID NO: 54070 - DNA, 20 bp, Neisseria gonorrhoeae
caggctcggcatcgtccgcg

SEQ ID NO: 54071 - DNA, 20 bp, Neisseria gonorrhoeae
caacgcccactgcagatagg

SEQ ID NO: 54072 - DNA, 20 bp, Neisseria gonorrhoeae
aaaacgtcgtgagacagttt

SEQ ID NO: 54073 - DNA, 20 bp, Neisseria gonorrhoeae
aaacgtcgtgagacagtttg

SEQ ID NO: 54074 - DNA, 20 bp, Neisseria gonorrhoeae
ggtccctatctgcagtgggc

SEQ ID NO: 54075 - DNA, 20 bp, Neisseria gonorrhoeae
gtccctatctgcagtgggcg

SEQ ID NO: 54076 - DNA, 20 bp, Neisseria gonorrhoeae
ttgaaaggcttgccgtatat

SEQ ID NO: 54077 - DNA, 20 bp, Neisseria gonorrhoeae
aaaggcttgccgtatatttg

SEQ ID NO: 54078 - DNA, 20 bp, Neisseria gonorrhoeae
ccgtatatttgaacaaataa

SEQ ID NO: 54079 - DNA, 20 bp, Neisseria gonorrhoeae
gaacaaataagcaattgaac

SEQ ID NO: 54080 - DNA, 20 bp, Neisseria gonorrhoeae
aacaaataagcaattgaacg

SEQ ID NO: 54081 - DNA, 20 bp, Neisseria gonorrhoeae
tgatgccgtctgttttcgac

SEQ ID NO: 54082 - DNA, 20 bp, Neisseria gonorrhoeae
tcgacattcccgcaggcagc

SEQ ID NO: 54083 - DNA, 20 bp, Neisseria gonorrhoeae
cgacattcccgcaggcagca

SEQ ID NO: 54084 - DNA, 20 bp, Neisseria gonorrhoeae
gacattcccgcaggcagcag

SEQ ID NO: 54085 - DNA, 20 bp, Neisseria gonorrhoeae
ccgcaggcagcagatcgacc

SEQ ID NO: 54086 - DNA, 20 bp, Neisseria gonorrhoeae
tgaccgtgcgcgaaaaatgg

SEQ ID NO: 54087 - DNA, 20 bp, Neisseria gonorrhoeae
tgccaaaatttcacgcccca

SEQ ID NO: 54088 - DNA, 20 bp, Neisseria gonorrhoeae
cacgccccagtagttggtgg

SEQ ID NO: 54089 - DNA, 20 bp, Neisseria gonorrhoeae
acgccccagtagttggtggt

SEQ ID NO: 54090 - DNA, 20 bp, Neisseria gonorrhoeae
gtggtgttcgcctgtacgga

SEQ ID NO: 54091 - DNA, 20 bp, Neisseria gonorrhoeae
gcggcaactgccgcgacgaa

SEQ ID NO: 54092 - DNA, 20 bp, Neisseria gonorrhoeae
cccggaatgcggctgccgta

SEQ ID NO: 54093 - DNA, 20 bp, Neisseria gonorrhoeae
cgggcaatctaccgtatgcg

SEQ ID NO: 54094 - DNA, 20 bp, Neisseria gonorrhoeae
gtcgcggcagttgccgcgaa

SEQ ID NO: 54095 - DNA, 20 bp, Neisseria gonorrhoeae
cgtcggcgtttctgacggcg

SEQ ID NO: 54096 - DNA, 20 bp, Neisseria gonorrhoeae
tcggccgtcggcggtacagt

SEQ ID NO: 54097 - DNA, 20 bp, Neisseria gonorrhoeae
cggccgtcggcggtacagtt

SEQ ID NO: 54098 - DNA, 20 bp, Neisseria gonorrhoeae
ggccgtcggcggtacagttc

SEQ ID NO: 54099 - DNA, 20 bp, Neisseria gonorrhoeae
cgcgccgcacaccccgcagg

SEQ ID NO: 54100 - DNA, 20 bp, Neisseria gonorrhoeae
tgggtggtcaagccgcgtat

SEQ ID NO: 54101 - DNA, 20 bp, Neisseria gonorrhoeae
cgccgctttggtcgatacgc

SEQ ID NO: 54102 - DNA, 20 bp, Neisseria gonorrhoeae
ggtcgatacgcggcttgacc

SEQ ID NO: 54103 - DNA, 20 bp, Neisseria gonorrhoeae
gtcgatacgcggcttgacca

SEQ ID NO: 54104 - DNA, 20 bp, Neisseria gonorrhoeae
accacccagaactgggtatc

SEQ ID NO: 54105 - DNA, 20 bp, Neisseria gonorrhoeae
gacgatatgctcgaagcggc

SEQ ID NO: 54106 - DNA, 20 bp, Neisseria gonorrhoeae
agcaatgcattcaaccgttt

SEQ ID NO: 54107 - DNA, 20 bp, Neisseria gonorrhoeae
aaccgtttggacagcacacg

SEQ ID NO: 54108 - DNA, 20 bp, Neisseria gonorrhoeae
ggacagcacacgcacctttg

SEQ ID NO: 54109 - DNA, 20 bp, Neisseria gonorrhoeae
gacagcacacgcacctttgt

SEQ ID NO: 54110 - DNA, 20 bp, Neisseria gonorrhoeae
cggcgacgaagcggcgttgc

SEQ ID NO: 54111 - DNA, 20 bp, Neisseria gonorrhoeae
ggcgacgaagcggcgttgct

SEQ ID NO: 54112 - DNA, 20 bp, Neisseria gonorrhoeae
cttgccgctgtcggcgagaa

SEQ ID NO: 54113 - DNA, 20 bp, Neisseria gonorrhoeae
ccgctgtcggcgagaagagc

SEQ ID NO: 54114 - DNA, 20 bp, Neisseria gonorrhoeae
gtcggcaacaccttgccgca

SEQ ID NO: 54115 - DNA, 20 bp, Neisseria gonorrhoeae
ccctgtggcgggcgcgtctt

SEQ ID NO: 54116 - DNA, 20 bp, Neisseria gonorrhoeae
cctgtggcgggcgcgtcttt

SEQ ID NO: 54117 - DNA, 20 bp, Neisseria gonorrhoeae
gttggacgaagcgaccgccg

SEQ ID NO: 54118 - DNA, 20 bp, Neisseria gonorrhoeae
ttggacgaagcgaccgccgc

SEQ ID NO: 54119 - DNA, 20 bp, Neisseria gonorrhoeae
gacgaagcgaccgccgccgc

SEQ ID NO: 54120 - DNA, 20 bp, Neisseria gonorrhoeae
gcaccggggcataccctgac

SEQ ID NO: 54121 - DNA, 20 bp, Neisseria gonorrhoeae
ccgccgcagccttcggttct

SEQ ID NO: 54122 - DNA, 20 bp, Neisseria gonorrhoeae
gcccggcacttgcgctgtgg

SEQ ID NO: 54123 - DNA, 20 bp, Neisseria gonorrhoeae
cccggcacttgcgctgtggg

SEQ ID NO: 54124 - DNA, 20 bp, Neisseria gonorrhoeae
cgctgtgggtgtcggtcagg

SEQ ID NO: 54125 - DNA, 20 bp, Neisseria gonorrhoeae
ccttccctgttgccggcacg

SEQ ID NO: 54126 - DNA, 20 bp, Neisseria gonorrhoeae
cttccctgttgccggcacgc

SEQ ID NO: 54127 - DNA, 20 bp, Neisseria gonorrhoeae
cctgttgccggcacgctgat

SEQ ID NO: 54128 - DNA, 20 bp, Neisseria gonorrhoeae
ccggcacgctgatgatcgaa

SEQ ID NO: 54129 - DNA, 20 bp, Neisseria gonorrhoeae
atcgccgccctgaaatccat

SEQ ID NO: 54130 - DNA, 20 bp, Neisseria gonorrhoeae
ccgctgcccctcgtgcgcga

SEQ ID NO: 54131 - DNA, 20 bp, Neisseria gonorrhoeae
tgttcgcgcacgaggggcag

SEQ ID NO: 54132 - DNA, 20 bp, Neisseria gonorrhoeae
gcgcacgaggggcagcggga

SEQ ID NO: 54133 - DNA, 20 bp, Neisseria gonorrhoeae
ttcgcgagagtacggatgcg

SEQ ID NO: 54134 - DNA, 20 bp, Neisseria gonorrhoeae
gcgagagtacggatgcgccc

SEQ ID NO: 54135 - DNA, 20 bp, Neisseria gonorrhoeae
tttaccgtcaacgccgaccg

SEQ ID NO: 54136 - DNA, 20 bp, Neisseria gonorrhoeae
ttaccgtcaacgccgaccgc

SEQ ID NO: 54137 - DNA, 20 bp, Neisseria gonorrhoeae
taccgtcaacgccgaccgca

SEQ ID NO: 54138 - DNA, 20 bp, Neisseria gonorrhoeae
accgtcaacgccgaccgcag

SEQ ID NO: 54139 - DNA, 20 bp, Neisseria gonorrhoeae
ccgtcaacgccgaccgcagg

SEQ ID NO: 54140 - DNA, 20 bp, Neisseria gonorrhoeae
cctttgccgaacaacaaatg

SEQ ID NO: 54141 - DNA, 20 bp, Neisseria gonorrhoeae
gccgaacaacaaatgctgca

SEQ ID NO: 54142 - DNA, 20 bp, Neisseria gonorrhoeae
ccgaacaacaaatgctgcac

SEQ ID NO: 54143 - DNA, 20 bp, Neisseria gonorrhoeae
gttgttcggcaaaggcaacc

SEQ ID NO: 54144 - DNA, 20 bp, Neisseria gonorrhoeae
ttgttcggcaaaggcaaccc

SEQ ID NO: 54145 - DNA, 20 bp, Neisseria gonorrhoeae
agcactttgccgcgcagggg

SEQ ID NO: 54146 - DNA, 20 bp, Neisseria gonorrhoeae
gccgcgcaggggcaggatgg

SEQ ID NO: 54147 - DNA, 20 bp, Neisseria gonorrhoeae
ccgcgcaggggcaggatggc

SEQ ID NO: 54148 - DNA, 20 bp, Neisseria gonorrhoeae
tgtggctttgtcgcgggcga

SEQ ID NO: 54149 - DNA, 20 bp, Neisseria gonorrhoeae
gtcgcgggcgagtttggcgg

SEQ ID NO: 54150 - DNA, 20 bp, Neisseria gonorrhoeae
tcagaccgtcggggtaatgc

SEQ ID NO: 54151 - DNA, 20 bp, Neisseria gonorrhoeae
cagaccgtcggggtaatgcc

SEQ ID NO: 54152 - DNA, 20 bp, Neisseria gonorrhoeae
agaccgtcggggtaatgcca

SEQ ID NO: 54153 - DNA, 20 bp, Neisseria gonorrhoeae
gggtgtgcgcttcgtcttcg

SEQ ID NO: 54154 - DNA, 20 bp, Neisseria gonorrhoeae
ggtgtgcgcttcgtcttcgc

SEQ ID NO: 54155 - DNA, 20 bp, Neisseria gonorrhoeae
tcgatgacttcttggcagat

SEQ ID NO: 54156 - DNA, 20 bp, Neisseria gonorrhoeae
ttggcagatatgtgtcgggc

SEQ ID NO: 54157 - DNA, 20 bp, Neisseria gonorrhoeae
gcagatatgtgtcgggctgt

SEQ ID NO: 54158 - DNA, 20 bp, Neisseria gonorrhoeae
gggcgaataggcaggcacgc

SEQ ID NO: 54159 - DNA, 20 bp, Neisseria gonorrhoeae
caagcccaactcttcagccg

SEQ ID NO: 54160 - DNA, 20 bp, Neisseria gonorrhoeae
aagcccaactcttcagccgc

SEQ ID NO: 54161 - DNA, 20 bp, Neisseria gonorrhoeae
agccgccttcaaatccacat

SEQ ID NO: 54162 - DNA, 20 bp, Neisseria gonorrhoeae
aaatccacattattgaagcc

SEQ ID NO: 54163 - DNA, 20 bp, Neisseria gonorrhoeae
gagctcgtccgcttcgggca

SEQ ID NO: 54164 - DNA, 20 bp, Neisseria gonorrhoeae
gggcatgacggcaacggtac

SEQ ID NO: 54165 - DNA, 20 bp, Neisseria gonorrhoeae
gctttcggtggcggggacgc

SEQ ID NO: 54166 - DNA, 20 bp, Neisseria gonorrhoeae
cggtggcggggacgcgctgc

SEQ ID NO: 54167 - DNA, 20 bp, Neisseria gonorrhoeae
ggtggcggggacgcgctgca

SEQ ID NO: 54168 - DNA, 20 bp, Neisseria gonorrhoeae
ccgtgtccgtagctttgcag

SEQ ID NO: 54169 - DNA, 20 bp, Neisseria gonorrhoeae
gcaggataagggcttgggcg

SEQ ID NO: 54170 - DNA, 20 bp, Neisseria gonorrhoeae
caggataagggcttgggcgg

SEQ ID NO: 54171 - DNA, 20 bp, Neisseria gonorrhoeae
ggcgggaagctgtccgagcc

SEQ ID NO: 54172 - DNA, 20 bp, Neisseria gonorrhoeae
ttggacggcaaagccgggga

SEQ ID NO: 54173 - DNA, 20 bp, Neisseria gonorrhoeae
gggatgcggacattgtgcca

SEQ ID NO: 54174 - DNA, 20 bp, Neisseria gonorrhoeae
tgccagccccgggtttcgtc

SEQ ID NO: 54175 - DNA, 20 bp, Neisseria gonorrhoeae
cgtcccactcggcaagtgcg

SEQ ID NO: 54176 - DNA, 20 bp, Neisseria gonorrhoeae
gtcccactcggcaagtgcgc

SEQ ID NO: 54177 - DNA, 20 bp, Neisseria gonorrhoeae
cggcaatgcccatttcggcg

SEQ ID NO: 54178 - DNA, 20 bp, Neisseria gonorrhoeae
acgcccaacgcttcccacac

SEQ ID NO: 54179 - DNA, 20 bp, Neisseria gonorrhoeae
ccacaccttcaacgcgtccg

SEQ ID NO: 54180 - DNA, 20 bp, Neisseria gonorrhoeae
aacgcgtccgccgtcgcctt

SEQ ID NO: 54181 - DNA, 20 bp, Neisseria gonorrhoeae
acatcgtgcacgcgcacgat

SEQ ID NO: 54182 - DNA, 20 bp, Neisseria gonorrhoeae
aaggtgtgggaagcgttggg

SEQ ID NO: 54183 - DNA, 20 bp, Neisseria gonorrhoeae
ccccgccgccgaaagccacg

SEQ ID NO: 54184 - DNA, 20 bp, Neisseria gonorrhoeae
cccgccgccgaaagccacgc

SEQ ID NO: 54185 - DNA, 20 bp, Neisseria gonorrhoeae
ggcggcaacgcggctgtctt

SEQ ID NO: 54186 - DNA, 20 bp, Neisseria gonorrhoeae
gcggcaacgcggctgtcttc

SEQ ID NO: 54187 - DNA, 20 bp, Neisseria gonorrhoeae
cgcccgattttcccgactga

SEQ ID NO: 54188 - DNA, 20 bp, Neisseria gonorrhoeae
gcaataaagaatacgcacca

SEQ ID NO: 54189 - DNA, 20 bp, Neisseria gonorrhoeae
cccggcgggtatagcgcacg

SEQ ID NO: 54190 - DNA, 20 bp, Neisseria gonorrhoeae
ttcaggcaggtcgggctgtt

SEQ ID NO: 54191 - DNA, 20 bp, Neisseria gonorrhoeae
tcaggcaggtcgggctgttg

SEQ ID NO: 54192 - DNA, 20 bp, Neisseria gonorrhoeae
caggcaggtcgggctgttgc

SEQ ID NO: 54193 - DNA, 20 bp, Neisseria gonorrhoeae
cggaaatcttcagcctgcag

SEQ ID NO: 54194 - DNA, 20 bp, Neisseria gonorrhoeae
agcctgcagcttgcgggctg

SEQ ID NO: 54195 - DNA, 20 bp, Neisseria gonorrhoeae
cgggctgccacaaccattca

SEQ ID NO: 54196 - DNA, 20 bp, Neisseria gonorrhoeae
acgattgcgatatacccggc

SEQ ID NO: 54197 - DNA, 20 bp, Neisseria gonorrhoeae
cgatatacccggcggcattc

SEQ ID NO: 54198 - DNA, 20 bp, Neisseria gonorrhoeae
ctcaaacggcggcgccgcat

SEQ ID NO: 54199 - DNA, 20 bp, Neisseria gonorrhoeae
gagtaaggcggcgcgtttgg

SEQ ID NO: 54200 - DNA, 20 bp, Neisseria gonorrhoeae
agtaaggcggcgcgtttggt

SEQ ID NO: 54201 - DNA, 20 bp, Neisseria gonorrhoeae
ggtatgcgacgcggcttggg

SEQ ID NO: 54202 - DNA, 20 bp, Neisseria gonorrhoeae
gtatgcgacgcggcttggga

SEQ ID NO: 54203 - DNA, 20 bp, Neisseria gonorrhoeae
gggcagaaatgcgcgcgtgt

SEQ ID NO: 54204 - DNA, 20 bp, Neisseria gonorrhoeae
ggcagaaatgcgcgcgtgtt

SEQ ID NO: 54205 - DNA, 20 bp, Neisseria gonorrhoeae
cagtttgacgtgtccgaccg

SEQ ID NO: 54206 - DNA, 20 bp, Neisseria gonorrhoeae
gacgtgtccgaccgcgaagc

SEQ ID NO: 54207 - DNA, 20 bp, Neisseria gonorrhoeae
acgtgtccgaccgcgaagcc

SEQ ID NO: 54208 - DNA, 20 bp, Neisseria gonorrhoeae
cgcccgaagacatcggccgg

SEQ ID NO: 54209 - DNA, 20 bp, Neisseria gonorrhoeae
atctgcacggcaccgggacg

SEQ ID NO: 54210 - DNA, 20 bp, Neisseria gonorrhoeae
ccgaaaaccgctgcaacggc

SEQ ID NO: 54211 - DNA, 20 bp, Neisseria gonorrhoeae
ccatactgtcgttgtggtgc

SEQ ID NO: 54212 - DNA, 20 bp, Neisseria gonorrhoeae
catactgtcgttgtggtgcg

SEQ ID NO: 54213 - DNA, 20 bp, Neisseria gonorrhoeae
ccgaccggcaaagcaatccc

SEQ ID NO: 54214 - DNA, 20 bp, Neisseria gonorrhoeae
cgccccggctttgggacggg

SEQ ID NO: 54215 - DNA, 20 bp, Neisseria gonorrhoeae
gggacgggcagaacgacccc

SEQ ID NO: 54216 - DNA, 20 bp, Neisseria gonorrhoeae
ggacgggcagaacgaccccg

SEQ ID NO: 54217 - DNA, 20 bp, Neisseria gonorrhoeae
atggcgggcaggtcggggtc

SEQ ID NO: 54218 - DNA, 20 bp, Neisseria gonorrhoeae
aggaggcggtatgggcaggc

SEQ ID NO: 54219 - DNA, 20 bp, Neisseria gonorrhoeae
ggaggcggtatgggcaggca

SEQ ID NO: 54220 - DNA, 20 bp, Neisseria gonorrhoeae
cgggcgcagacgttttctga

SEQ ID NO: 54221 - DNA, 20 bp, Neisseria gonorrhoeae
gggcgcagacgttttctgac

SEQ ID NO: 54222 - DNA, 20 bp, Neisseria gonorrhoeae
tctgacggctgccgccgttg

SEQ ID NO: 54223 - DNA, 20 bp, Neisseria gonorrhoeae
gcgtttgcctgtttgagcgc

SEQ ID NO: 54224 - DNA, 20 bp, Neisseria gonorrhoeae
gcctgtttgagcgcgtgttc

SEQ ID NO: 54225 - DNA, 20 bp, Neisseria gonorrhoeae
cctgtttgagcgcgtgttcg

SEQ ID NO: 54226 - DNA, 20 bp, Neisseria gonorrhoeae
gagcgcgtgttcggcggcgc

SEQ ID NO: 54227 - DNA, 20 bp, Neisseria gonorrhoeae
agcgcgtgttcggcggcgcg

SEQ ID NO: 54228 - DNA, 20 bp, Neisseria gonorrhoeae
gtaagatgccgcacccagtc

SEQ ID NO: 54229 - DNA, 20 bp, Neisseria gonorrhoeae
tagctgctgctgacattgcc

SEQ ID NO: 54230 - DNA, 20 bp, Neisseria gonorrhoeae
ccgccgctcaagctgccttg

SEQ ID NO: 54231 - DNA, 20 bp, Neisseria gonorrhoeae
gcgcgagccgttcgcattgg

SEQ ID NO: 54232 - DNA, 20 bp, Neisseria gonorrhoeae
ccgccaatgcgaacggctcg

SEQ ID NO: 54233 - DNA, 20 bp, Neisseria gonorrhoeae
tgcctcttcgcgcgactgtc

SEQ ID NO: 54234 - DNA, 20 bp, Neisseria gonorrhoeae
gcctcttcgcgcgactgtcc

SEQ ID NO: 54235 - DNA, 20 bp, Neisseria gonorrhoeae
cctcttcgcgcgactgtccg

SEQ ID NO: 54236 - DNA, 20 bp, Neisseria gonorrhoeae
gcgcgactgtccgccccatt

SEQ ID NO: 54237 - DNA, 20 bp, Neisseria gonorrhoeae
gaggctgtaaccgccgccca

SEQ ID NO: 54238 - DNA, 20 bp, Neisseria gonorrhoeae
ccaatgcggtgcggatgtcg

SEQ ID NO: 54239 - DNA, 20 bp, Neisseria gonorrhoeae
cgccgccgctgcggcacggt

SEQ ID NO: 54240 - DNA, 20 bp, Neisseria gonorrhoeae
cgtttgccgacatccgcacc

SEQ ID NO: 54241 - DNA, 20 bp, Neisseria gonorrhoeae
gtttgccgacatccgcaccg

SEQ ID NO: 54242 - DNA, 20 bp, Neisseria gonorrhoeae
gccgacatccgcaccgcatt

SEQ ID NO: 54243 - DNA, 20 bp, Neisseria gonorrhoeae
gtcgcacccgcaggcagttg

SEQ ID NO: 54244 - DNA, 20 bp, Neisseria gonorrhoeae
cacgctaaccataacgaagc

SEQ ID NO: 54245 - DNA, 20 bp, Neisseria gonorrhoeae
gtcttcggtcggcaggaacg

SEQ ID NO: 54246 - DNA, 20 bp, Neisseria gonorrhoeae
ggtcggcaggaacgaagtcg

SEQ ID NO: 54247 - DNA, 20 bp, Neisseria gonorrhoeae
tgggcgtgttcctgtttatg

SEQ ID NO: 54248 - DNA, 20 bp, Neisseria gonorrhoeae
gggaaaaatcttgtccttcg

SEQ ID NO: 54249 - DNA, 20 bp, Neisseria gonorrhoeae
ggaaaaatcttgtccttcgc

SEQ ID NO: 54250 - DNA, 20 bp, Neisseria gonorrhoeae
tccttcgcggcgcgccccga

SEQ ID NO: 54251 - DNA, 20 bp, Neisseria gonorrhoeae
gcggcgcgccccgatatagg

SEQ ID NO: 54252 - DNA, 20 bp, Neisseria gonorrhoeae
cggcgatttgctccgcgtgt

SEQ ID NO: 54253 - DNA, 20 bp, Neisseria gonorrhoeae
ggcgggatgtttggcaacca

SEQ ID NO: 54254 - DNA, 20 bp, Neisseria gonorrhoeae
gcgggatgtttggcaaccag

SEQ ID NO: 54255 - DNA, 20 bp, Neisseria gonorrhoeae
ggcaaccaggtcgaatacgg

SEQ ID NO: 54256 - DNA, 20 bp, Neisseria gonorrhoeae
gcaaccaggtcgaatacggc

SEQ ID NO: 54257 - DNA, 20 bp, Neisseria gonorrhoeae
ggtattgcggggaaaatctc

SEQ ID NO: 54258 - DNA, 20 bp, Neisseria gonorrhoeae
cgctgtcgaggaagcggcgg

SEQ ID NO: 54259 - DNA, 20 bp, Neisseria gonorrhoeae
gctgtcgaggaagcggcgga

SEQ ID NO: 54260 - DNA, 20 bp, Neisseria gonorrhoeae
tccggacagttgccgccgca

SEQ ID NO: 54261 - DNA, 20 bp, Neisseria gonorrhoeae
ccggacagttgccgccgcac

SEQ ID NO: 54262 - DNA, 20 bp, Neisseria gonorrhoeae
cggacagttgccgccgcaca

SEQ ID NO: 54263 - DNA, 20 bp, Neisseria gonorrhoeae
tccgaccgtcgcgggctgcc

SEQ ID NO: 54264 - DNA, 20 bp, Neisseria gonorrhoeae
ctcgaaaccctgtcggatat

SEQ ID NO: 54265 - DNA, 20 bp, Neisseria gonorrhoeae
cccggatatggcggcagccc

SEQ ID NO: 54266 - DNA, 20 bp, Neisseria gonorrhoeae
gggcagcatccagcccaata

SEQ ID NO: 54267 - DNA, 20 bp, Neisseria gonorrhoeae
caggtaaacagctgatccgt

SEQ ID NO: 54268 - DNA, 20 bp, Neisseria gonorrhoeae
ggacggagaaatgcgcggcg

SEQ ID NO: 54269 - DNA, 20 bp, Neisseria gonorrhoeae
gacggagaaatgcgcggcgg

SEQ ID NO: 54270 - DNA, 20 bp, Neisseria gonorrhoeae
acctggaagcaggcggtaga

SEQ ID NO: 54271 - DNA, 20 bp, Neisseria gonorrhoeae
gaggatttgcgccgcttcga

SEQ ID NO: 54272 - DNA, 20 bp, Neisseria gonorrhoeae
aggatttgcgccgcttcgat

SEQ ID NO: 54273 - DNA, 20 bp, Neisseria gonorrhoeae
gcgccgcttcgatgacgttg

SEQ ID NO: 54274 - DNA, 20 bp, Neisseria gonorrhoeae
cgccgcttcgatgacgttgc

SEQ ID NO: 54275 - DNA, 20 bp, Neisseria gonorrhoeae
gatgacgttgccccaatgca

SEQ ID NO: 54276 - DNA, 20 bp, Neisseria gonorrhoeae
gccggccgggaactgactcc

SEQ ID NO: 54277 - DNA, 20 bp, Neisseria gonorrhoeae
ccggccgggaactgactcca

SEQ ID NO: 54278 - DNA, 20 bp, Neisseria gonorrhoeae
ccgccccaaatacctgccca

SEQ ID NO: 54279 - DNA, 20 bp, Neisseria gonorrhoeae
attttactgttgttctgcct

SEQ ID NO: 54280 - DNA, 20 bp, Neisseria gonorrhoeae
tactgttgttctgcctgtcg

SEQ ID NO: 54281 - DNA, 20 bp, Neisseria gonorrhoeae
agcaggtggatgcggtgcca

SEQ ID NO: 54282 - DNA, 20 bp, Neisseria gonorrhoeae
gtcggaatagcggccgccca

SEQ ID NO: 54283 - DNA, 20 bp, Neisseria gonorrhoeae
caaacgtaccggtcctgatt

SEQ ID NO: 54284 - DNA, 20 bp, Neisseria gonorrhoeae
ggcacgtgtgggcggccgct

SEQ ID NO: 54285 - DNA, 20 bp, Neisseria gonorrhoeae
gcacgtgtgggcggccgcta

SEQ ID NO: 54286 - DNA, 20 bp, Neisseria gonorrhoeae
tcacgcgtggaacgtcaaat

SEQ ID NO: 54287 - DNA, 20 bp, Neisseria gonorrhoeae
cacgcgtggaacgtcaaatc

SEQ ID NO: 54288 - DNA, 20 bp, Neisseria gonorrhoeae
acgcgtggaacgtcaaatcc

SEQ ID NO: 54289 - DNA, 20 bp, Neisseria gonorrhoeae
gccccttatgacctcgacaa

SEQ ID NO: 54290 - DNA, 20 bp, Neisseria gonorrhoeae
tgacctcgacaaagaaaact

SEQ ID NO: 54291 - DNA, 20 bp, Neisseria gonorrhoeae
tcgagttggacacggccttc

SEQ ID NO: 54292 - DNA, 20 bp, Neisseria gonorrhoeae
gacacggccttcttcgcgca

SEQ ID NO: 54293 - DNA, 20 bp, Neisseria gonorrhoeae
ttcgcgcacggtgtcggcgt

SEQ ID NO: 54294 - DNA, 20 bp, Neisseria gonorrhoeae
gcgcacggtgtcggcgtttt

SEQ ID NO: 54295 - DNA, 20 bp, Neisseria gonorrhoeae
tgctggcggatgtaggcgcg

SEQ ID NO: 54296 - DNA, 20 bp, Neisseria gonorrhoeae
tgcgcgacgtatccgacgcg

SEQ ID NO: 54297 - DNA, 20 bp, Neisseria gonorrhoeae
gcgcgacgtatccgacgcgc

SEQ ID NO: 54298 - DNA, 20 bp, Neisseria gonorrhoeae
cgcgacgtatccgacgcgct

SEQ ID NO: 54299 - DNA, 20 bp, Neisseria gonorrhoeae
ccgccgtacaaacccagtcc

SEQ ID NO: 54300 - DNA, 20 bp, Neisseria gonorrhoeae
gtacggcggtaacgttgagt

SEQ ID NO: 54301 - DNA, 20 bp, Neisseria gonorrhoeae
cgaatacgtcggtgtcggcg

SEQ ID NO: 54302 - DNA, 20 bp, Neisseria gonorrhoeae
gggcggtacgacttcgatgc

SEQ ID NO: 54303 - DNA, 20 bp, Neisseria gonorrhoeae
gatgccgcgcaggtagaaga

SEQ ID NO: 54304 - DNA, 20 bp, Neisseria gonorrhoeae
tacctgcgcggcatcgaagt

SEQ ID NO: 54305 - DNA, 20 bp, Neisseria gonorrhoeae
gtaaccgtcgacgtattcgg

SEQ ID NO: 54306 - DNA, 20 bp, Neisseria gonorrhoeae
tgttgcccgaaccttggtcg

SEQ ID NO: 54307 - DNA, 20 bp, Neisseria gonorrhoeae
cccgaaccttggtcgcccat

SEQ ID NO: 54308 - DNA, 20 bp, Neisseria gonorrhoeae
gtcgcccataacggagacgt

SEQ ID NO: 54309 - DNA, 20 bp, Neisseria gonorrhoeae
acgtctccgttatgggcgac

SEQ ID NO: 54310 - DNA, 20 bp, Neisseria gonorrhoeae
cgtctccgttatgggcgacc

SEQ ID NO: 54311 - DNA, 20 bp, Neisseria gonorrhoeae
cgaccggcaatatgggtgta

SEQ ID NO: 54312 - DNA, 20 bp, Neisseria gonorrhoeae
ccagcccggcatggagcttt

SEQ ID NO: 54313 - DNA, 20 bp, Neisseria gonorrhoeae
cagcccggcatggagctttg

SEQ ID NO: 54314 - DNA, 20 bp, Neisseria gonorrhoeae
gccgcgcccaaagctccatg

SEQ ID NO: 54315 - DNA, 20 bp, Neisseria gonorrhoeae
ccgcgcccaaagctccatgc

SEQ ID NO: 54316 - DNA, 20 bp, Neisseria gonorrhoeae
gcaagttgcagcgtaatgcc

SEQ ID NO: 54317 - DNA, 20 bp, Neisseria gonorrhoeae
cagcgtaatgcctgccaatc

SEQ ID NO: 54318 - DNA, 20 bp, Neisseria gonorrhoeae
ccggcaagtttgtcggacac

SEQ ID NO: 54319 - DNA, 20 bp, Neisseria gonorrhoeae
gtcggacacctcatcatcct

SEQ ID NO: 54320 - DNA, 20 bp, Neisseria gonorrhoeae
tcggacacctcatcatcctc

SEQ ID NO: 54321 - DNA, 20 bp, Neisseria gonorrhoeae
cgcgctttctcgccctcgtc

SEQ ID NO: 54322 - DNA, 20 bp, Neisseria gonorrhoeae
ctcgccctcgtcccgcaagg

SEQ ID NO: 54323 - DNA, 20 bp, Neisseria gonorrhoeae
tcgccctcgtcccgcaaggc

SEQ ID NO: 54324 - DNA, 20 bp, Neisseria gonorrhoeae
atcagcggaacgctctgcct

SEQ ID NO: 54325 - DNA, 20 bp, Neisseria gonorrhoeae
ccgaatttgtcaggcagcag

SEQ ID NO: 54326 - DNA, 20 bp, Neisseria gonorrhoeae
ggcgttaacaccgagcttgt

SEQ ID NO: 54327 - DNA, 20 bp, Neisseria gonorrhoeae
acaccgagcttgtcgcacaa

SEQ ID NO: 54328 - DNA, 20 bp, Neisseria gonorrhoeae
tcgcacaactcctgtgcacg

SEQ ID NO: 54329 - DNA, 20 bp, Neisseria gonorrhoeae
tgcgacaagctcggtgttaa

SEQ ID NO: 54330 - DNA, 20 bp, Neisseria gonorrhoeae
acgccgaaccgtgcctgctg

SEQ ID NO: 54331 - DNA, 20 bp, Neisseria gonorrhoeae
tacagactcaaccacaccgg

SEQ ID NO: 54332 - DNA, 20 bp, Neisseria gonorrhoeae
acagactcaaccacaccgga

SEQ ID NO: 54333 - DNA, 20 bp, Neisseria gonorrhoeae
cagactcaaccacaccggac

SEQ ID NO: 54334 - DNA, 20 bp, Neisseria gonorrhoeae
ttcggcggcgaggttcgcac

SEQ ID NO: 54335 - DNA, 20 bp, Neisseria gonorrhoeae
ggcggcgaggttcgcaccga

SEQ ID NO: 54336 - DNA, 20 bp, Neisseria gonorrhoeae
ccaaagccgcacaagccttt

SEQ ID NO: 54337 - DNA, 20 bp, Neisseria gonorrhoeae
cccgacgcttcggcaatatt

SEQ ID NO: 54338 - DNA, 20 bp, Neisseria gonorrhoeae
ccgacgcttcggcaatattc

SEQ ID NO: 54339 - DNA, 20 bp, Neisseria gonorrhoeae
ggcaatattcgaacgcaata

SEQ ID NO: 54340 - DNA, 20 bp, Neisseria gonorrhoeae
cgttcgaatattgccgaagc

SEQ ID NO: 54341 - DNA, 20 bp, Neisseria gonorrhoeae
gtcccctccgcctgcggtgg

SEQ ID NO: 54342 - DNA, 20 bp, Neisseria gonorrhoeae
tcccctccgcctgcggtggc

SEQ ID NO: 54343 - DNA, 20 bp, Neisseria gonorrhoeae
gtgcggacaatgccgcgttg

SEQ ID NO: 54344 - DNA, 20 bp, Neisseria gonorrhoeae
tcgtgaaaagcggcggcggc

SEQ ID NO: 54345 - DNA, 20 bp, Neisseria gonorrhoeae
tcacgacaacgcggcattgt

SEQ ID NO: 54346 - DNA, 20 bp, Neisseria gonorrhoeae
tgctcgtttgccaaagcgcg

SEQ ID NO: 54347 - DNA, 20 bp, Neisseria gonorrhoeae
gctcgtttgccaaagcgcgc

SEQ ID NO: 54348 - DNA, 20 bp, Neisseria gonorrhoeae
ctcgtttgccaaagcgcgca

SEQ ID NO: 54349 - DNA, 20 bp, Neisseria gonorrhoeae
gccaaagcgcgcagttgttc

SEQ ID NO: 54350 - DNA, 20 bp, Neisseria gonorrhoeae
ccaaagcgcgcagttgttcg

SEQ ID NO: 54351 - DNA, 20 bp, Neisseria gonorrhoeae
cagacgtgccgccgtccatc

SEQ ID NO: 54352 - DNA, 20 bp, Neisseria gonorrhoeae
agacgtgccgccgtccatca

SEQ ID NO: 54353 - DNA, 20 bp, Neisseria gonorrhoeae
tggcattgctgccgatgcgg

SEQ ID NO: 54354 - DNA, 20 bp, Neisseria gonorrhoeae
ggcattgctgccgatgcgga

SEQ ID NO: 54355 - DNA, 20 bp, Neisseria gonorrhoeae
gcattgctgccgatgcggat

SEQ ID NO: 54356 - DNA, 20 bp, Neisseria gonorrhoeae
ttacctgctccagctctttg

SEQ ID NO: 54357 - DNA, 20 bp, Neisseria gonorrhoeae
cctgctccagctctttgccg

SEQ ID NO: 54358 - DNA, 20 bp, Neisseria gonorrhoeae
gccgccgcaggttatctgtg

SEQ ID NO: 54359 - DNA, 20 bp, Neisseria gonorrhoeae
ccgccgcaggttatctgtgg

SEQ ID NO: 54360 - DNA, 20 bp, Neisseria gonorrhoeae
tctgtggacaggcgcggcga

SEQ ID NO: 54361 - DNA, 20 bp, Neisseria gonorrhoeae
tcgggatgttgattcgagga

SEQ ID NO: 54362 - DNA, 20 bp, Neisseria gonorrhoeae
attcgaggaaaacttgcgca

SEQ ID NO: 54363 - DNA, 20 bp, Neisseria gonorrhoeae
gaggaaaacttgcgcacgtt

SEQ ID NO: 54364 - DNA, 20 bp, Neisseria gonorrhoeae
cgcacgttcgcgttcggcaa

SEQ ID NO: 54365 - DNA, 20 bp, Neisseria gonorrhoeae
gcgttcggcaaggcgcacca

SEQ ID NO: 54366 - DNA, 20 bp, Neisseria gonorrhoeae
tccacccgctttaaaagctg

SEQ ID NO: 54367 - DNA, 20 bp, Neisseria gonorrhoeae
ccacccgctttaaaagctgc

SEQ ID NO: 54368 - DNA, 20 bp, Neisseria gonorrhoeae
cacccgctttaaaagctgcg

SEQ ID NO: 54369 - DNA, 20 bp, Neisseria gonorrhoeae
taaagcgggtggaaaaccgt

SEQ ID NO: 54370 - DNA, 20 bp, Neisseria gonorrhoeae
aaagcgggtggaaaaccgtt

SEQ ID NO: 54371 - DNA, 20 bp, Neisseria gonorrhoeae
ctccgccgttcatcagggcg

SEQ ID NO: 54372 - DNA, 20 bp, Neisseria gonorrhoeae
tccgccgttcatcagggcgc

SEQ ID NO: 54373 - DNA, 20 bp, Neisseria gonorrhoeae
atcagggcgcgggcgatgga

SEQ ID NO: 54374 - DNA, 20 bp, Neisseria gonorrhoeae
gccgggcttgttgccctctt

SEQ ID NO: 54375 - DNA, 20 bp, Neisseria gonorrhoeae
cgccatttccaacgcctgct

SEQ ID NO: 54376 - DNA, 20 bp, Neisseria gonorrhoeae
ccaacgcctgcttgatgtct

SEQ ID NO: 54377 - DNA, 20 bp, Neisseria gonorrhoeae
caacgcctgcttgatgtcta

SEQ ID NO: 54378 - DNA, 20 bp, Neisseria gonorrhoeae
atgtctacggcgacgacgcg

SEQ ID NO: 54379 - DNA, 20 bp, Neisseria gonorrhoeae
ttcctgcatggttacgccga

SEQ ID NO: 54380 - DNA, 20 bp, Neisseria gonorrhoeae
gcatcgtccagcggggcatc

SEQ ID NO: 54381 - DNA, 20 bp, Neisseria gonorrhoeae
gtccagaaggcagaaggggg

SEQ ID NO: 54382 - DNA, 20 bp, Neisseria gonorrhoeae
aggctgaacagggcgaacac

SEQ ID NO: 54383 - DNA, 20 bp, Neisseria gonorrhoeae
gccctgttcagcctcaaccc

SEQ ID NO: 54384 - DNA, 20 bp, Neisseria gonorrhoeae
agcctcaaccccgccccctt

SEQ ID NO: 54385 - DNA, 20 bp, Neisseria gonorrhoeae
ggtcaggttttgatggtagc

SEQ ID NO: 54386 - DNA, 20 bp, Neisseria gonorrhoeae
tgatggtagcgtttggcgtt

SEQ ID NO: 54387 - DNA, 20 bp, Neisseria gonorrhoeae
gatggtagcgtttggcgttg

SEQ ID NO: 54388 - DNA, 20 bp, Neisseria gonorrhoeae
atggtagcgtttggcgttga

SEQ ID NO: 54389 - DNA, 20 bp, Neisseria gonorrhoeae
ggcgttgatcagggcctcct

SEQ ID NO: 54390 - DNA, 20 bp, Neisseria gonorrhoeae
caacacggtctgctcttccg

SEQ ID NO: 54391 - DNA, 20 bp, Neisseria gonorrhoeae
cgccaactgtgccagttcgc

SEQ ID NO: 54392 - DNA, 20 bp, Neisseria gonorrhoeae
gcgctcgatgtgttcgcggc

SEQ ID NO: 54393 - DNA, 20 bp, Neisseria gonorrhoeae
gcggcggatttgcccttggt

SEQ ID NO: 54394 - DNA, 20 bp, Neisseria gonorrhoeae
gcggaagagcagaccgtgtt

SEQ ID NO: 54395 - DNA, 20 bp, Neisseria gonorrhoeae
tttgatgccgccggagaggc

SEQ ID NO: 54396 - DNA, 20 bp, Neisseria gonorrhoeae
ttgatgccgccggagaggcc

SEQ ID NO: 54397 - DNA, 20 bp, Neisseria gonorrhoeae
tgatgccgccggagaggccg

SEQ ID NO: 54398 - DNA, 20 bp, Neisseria gonorrhoeae
gatgccgccggagaggccgt

SEQ ID NO: 54399 - DNA, 20 bp, Neisseria gonorrhoeae
atgccgccggagaggccgtc

SEQ ID NO: 54400 - DNA, 20 bp, Neisseria gonorrhoeae
cctgccaaaagtcggcggct

SEQ ID NO: 54401 - DNA, 20 bp, Neisseria gonorrhoeae
ctgctgttgcgacaggattt

SEQ ID NO: 54402 - DNA, 20 bp, Neisseria gonorrhoeae
cgacaggatttgcgacaacg

SEQ ID NO: 54403 - DNA, 20 bp, Neisseria gonorrhoeae
gcgacaacgcctgctgctgc

SEQ ID NO: 54404 - DNA, 20 bp, Neisseria gonorrhoeae
cgacaacgcctgctgctgcg

SEQ ID NO: 54405 - DNA, 20 bp, Neisseria gonorrhoeae
aacgccagttcgcggcggat

SEQ ID NO: 54406 - DNA, 20 bp, Neisseria gonorrhoeae
gcggcggatgcggtttgcct

SEQ ID NO: 54407 - DNA, 20 bp, Neisseria gonorrhoeae
gcctcgtcctgctgggtttg

SEQ ID NO: 54408 - DNA, 20 bp, Neisseria gonorrhoeae
cctcgtcctgctgggtttgg

SEQ ID NO: 54409 - DNA, 20 bp, Neisseria gonorrhoeae
ggaaggcagcgttgagcgtg

SEQ ID NO: 54410 - DNA, 20 bp, Neisseria gonorrhoeae
cttaatgtggcgggcagttt

SEQ ID NO: 54411 - DNA, 20 bp, Neisseria gonorrhoeae
atgtggcgggcagttttgcc

SEQ ID NO: 54412 - DNA, 20 bp, Neisseria gonorrhoeae
tgccggaccggaccgggctt

SEQ ID NO: 54413 - DNA, 20 bp, Neisseria gonorrhoeae
gccggaccggaccgggcttt

SEQ ID NO: 54414 - DNA, 20 bp, Neisseria gonorrhoeae
ccggaccggaccgggctttc

SEQ ID NO: 54415 - DNA, 20 bp, Neisseria gonorrhoeae
ggtccgattcagcagcaaat

SEQ ID NO: 54416 - DNA, 20 bp, Neisseria gonorrhoeae
agcagcaaatcgcccttgat

SEQ ID NO: 54417 - DNA, 20 bp, Neisseria gonorrhoeae
ataccggcctgtccgtgacc

SEQ ID NO: 54418 - DNA, 20 bp, Neisseria gonorrhoeae
tggcgttgcagtccgtcggc

SEQ ID NO: 54419 - DNA, 20 bp, Neisseria gonorrhoeae
gctgctgaatcggaccgaag

SEQ ID NO: 54420 - DNA, 20 bp, Neisseria gonorrhoeae
tgctacctcgacagccaagt

SEQ ID NO: 54421 - DNA, 20 bp, Neisseria gonorrhoeae
gtacagcttatcgcctccgg

SEQ ID NO: 54422 - DNA, 20 bp, Neisseria gonorrhoeae
tcgcctccggctacggcgaa

SEQ ID NO: 54423 - DNA, 20 bp, Neisseria gonorrhoeae
cggaaaatgtattcgccgta

SEQ ID NO: 54424 - DNA, 20 bp, Neisseria gonorrhoeae
gccgtagccggaggcgataa

SEQ ID NO: 54425 - DNA, 20 bp, Neisseria gonorrhoeae
agcaggaacaaaacggcaaa

SEQ ID NO: 54426 - DNA, 20 bp, Neisseria gonorrhoeae
ataccggcggtaagcctgtg

SEQ ID NO: 54427 - DNA, 20 bp, Neisseria gonorrhoeae
ccgccggtatgaacgccctt

SEQ ID NO: 54428 - DNA, 20 bp, Neisseria gonorrhoeae
ccattgtcggcctgctctac

SEQ ID NO: 54429 - DNA, 20 bp, Neisseria gonorrhoeae
tcggcctgctctacctggcc

SEQ ID NO: 54430 - DNA, 20 bp, Neisseria gonorrhoeae
ccggcagcggcattgagctg

SEQ ID NO: 54431 - DNA, 20 bp, Neisseria gonorrhoeae
cggcagcggcattgagctgc

SEQ ID NO: 54432 - DNA, 20 bp, Neisseria gonorrhoeae
agctgcaaaaaagcgggcaa

SEQ ID NO: 54433 - DNA, 20 bp, Neisseria gonorrhoeae
tcgggcaggtttgccgcgag

SEQ ID NO: 54434 - DNA, 20 bp, Neisseria gonorrhoeae
cgggcaggtttgccgcgagc

SEQ ID NO: 54435 - DNA, 20 bp, Neisseria gonorrhoeae
tcaaagcccatatcgcgctt

SEQ ID NO: 54436 - DNA, 20 bp, Neisseria gonorrhoeae
ccgaagccgtgttccccgaa

SEQ ID NO: 54437 - DNA, 20 bp, Neisseria gonorrhoeae
cccgaaaacatcccctcgcc

SEQ ID NO: 54438 - DNA, 20 bp, Neisseria gonorrhoeae
acgcgatttgccgcaaaccc

SEQ ID NO: 54439 - DNA, 20 bp, Neisseria gonorrhoeae
gccgcaaacccctgtggcag

SEQ ID NO: 54440 - DNA, 20 bp, Neisseria gonorrhoeae
ggcgtggtagcggttgaccc

SEQ ID NO: 54441 - DNA, 20 bp, Neisseria gonorrhoeae
acccattcgatttcgccgtc

SEQ ID NO: 54442 - DNA, 20 bp, Neisseria gonorrhoeae
gatttcgccgtcggtcatca

SEQ ID NO: 54443 - DNA, 20 bp, Neisseria gonorrhoeae
cgccgtcggtcatcagggcg

SEQ ID NO: 54444 - DNA, 20 bp, Neisseria gonorrhoeae
gccgtcggtcatcagggcgg

SEQ ID NO: 54445 - DNA, 20 bp, Neisseria gonorrhoeae
ggcgtgatgtcgaaaccgac

SEQ ID NO: 54446 - DNA, 20 bp, Neisseria gonorrhoeae
ctttcttgatgggcgtcttg

SEQ ID NO: 54447 - DNA, 20 bp, Neisseria gonorrhoeae
cttgatgggcgtcttgcgta

SEQ ID NO: 54448 - DNA, 20 bp, Neisseria gonorrhoeae
ttgatgggcgtcttgcgtat

SEQ ID NO: 54449 - DNA, 20 bp, Neisseria gonorrhoeae
atgggcgtcttgcgtatttt

SEQ ID NO: 54450 - DNA, 20 bp, Neisseria gonorrhoeae
gatgccctgttcggcaatca

SEQ ID NO: 54451 - DNA, 20 bp, Neisseria gonorrhoeae
atgccctgttcggcaatcac

SEQ ID NO: 54452 - DNA, 20 bp, Neisseria gonorrhoeae
ggcaatcacgtccacgccgt

SEQ ID NO: 54453 - DNA, 20 bp, Neisseria gonorrhoeae
cgatgccttcttcccattcc

SEQ ID NO: 54454 - DNA, 20 bp, Neisseria gonorrhoeae
ttcccattccgcgacggcgt

SEQ ID NO: 54455 - DNA, 20 bp, Neisseria gonorrhoeae
gagttcaaagcggttggcac

SEQ ID NO: 54456 - DNA, 20 bp, Neisseria gonorrhoeae
agttcaaagcggttggcacc

SEQ ID NO: 54457 - DNA, 20 bp, Neisseria gonorrhoeae
aaagcggttggcacctgctt

SEQ ID NO: 54458 - DNA, 20 bp, Neisseria gonorrhoeae
gcacctgctttgagcggcac

SEQ ID NO: 54459 - DNA, 20 bp, Neisseria gonorrhoeae
gagcggcacttccaatacgc

SEQ ID NO: 54460 - DNA, 20 bp, Neisseria gonorrhoeae
gtaggcggtcaaggtatcgg

SEQ ID NO: 54461 - DNA, 20 bp, Neisseria gonorrhoeae
taggcggtcaaggtatcggc

SEQ ID NO: 54462 - DNA, 20 bp, Neisseria gonorrhoeae
cagccgataccttgaccgcc

SEQ ID NO: 54463 - DNA, 20 bp, Neisseria gonorrhoeae
accgcctacaaactcgccta

SEQ ID NO: 54464 - DNA, 20 bp, Neisseria gonorrhoeae
ccagtttttcgcggcggaac

SEQ ID NO: 54465 - DNA, 20 bp, Neisseria gonorrhoeae
cagtttttcgcggcggaacg

SEQ ID NO: 54466 - DNA, 20 bp, Neisseria gonorrhoeae
ttcgcggcggaacgcaccat

SEQ ID NO: 54467 - DNA, 20 bp, Neisseria gonorrhoeae
tcgcggcggaacgcaccatg

SEQ ID NO: 54468 - DNA, 20 bp, Neisseria gonorrhoeae
cgcggcggaacgcaccatgg

SEQ ID NO: 54469 - DNA, 20 bp, Neisseria gonorrhoeae
caatacgaacacaatggcgg

SEQ ID NO: 54470 - DNA, 20 bp, Neisseria gonorrhoeae
tgagcgatacgccgagaaac

SEQ ID NO: 54471 - DNA, 20 bp, Neisseria gonorrhoeae
gagcgatacgccgagaaaca

SEQ ID NO: 54472 - DNA, 20 bp, Neisseria gonorrhoeae
agcgatacgccgagaaacac

SEQ ID NO: 54473 - DNA, 20 bp, Neisseria gonorrhoeae
ctcggcgtatcgctcaaaat

SEQ ID NO: 54474 - DNA, 20 bp, Neisseria gonorrhoeae
gaggataaacagcgtggagg

SEQ ID NO: 54475 - DNA, 20 bp, Neisseria gonorrhoeae
atcctcgaagcgatgttggg

SEQ ID NO: 54476 - DNA, 20 bp, Neisseria gonorrhoeae
tcctcgaagcgatgttgggc

SEQ ID NO: 54477 - DNA, 20 bp, Neisseria gonorrhoeae
ggcgtgtggacgcagcaggc

SEQ ID NO: 54478 - DNA, 20 bp, Neisseria gonorrhoeae
ccgccgcattgctgacttcc

SEQ ID NO: 54479 - DNA, 20 bp, Neisseria gonorrhoeae
atacaggcatcggcggcggc

SEQ ID NO: 54480 - DNA, 20 bp, Neisseria gonorrhoeae
cggtttggcgcggtaagcca

SEQ ID NO: 54481 - DNA, 20 bp, Neisseria gonorrhoeae
ggtttggcgcggtaagccac

SEQ ID NO: 54482 - DNA, 20 bp, Neisseria gonorrhoeae
ggcgcggtaagccacgccta

SEQ ID NO: 54483 - DNA, 20 bp, Neisseria gonorrhoeae
gcgcggtaagccacgcctat

SEQ ID NO: 54484 - DNA, 20 bp, Neisseria gonorrhoeae
caacgcattgggcagacaag

SEQ ID NO: 54485 - DNA, 20 bp, Neisseria gonorrhoeae
ggcagacaagccatgatttt

SEQ ID NO: 54486 - DNA, 20 bp, Neisseria gonorrhoeae
ttggtgtgcctgttgtcggt

SEQ ID NO: 54487 - DNA, 20 bp, Neisseria gonorrhoeae
tggtgtgcctgttgtcggtt

SEQ ID NO: 54488 - DNA, 20 bp, Neisseria gonorrhoeae
ggtgtgcctgttgtcggttt

SEQ ID NO: 54489 - DNA, 20 bp, Neisseria gonorrhoeae
aactatgctgtctaaattta

SEQ ID NO: 54490 - DNA, 20 bp, Neisseria gonorrhoeae
actatgctgtctaaatttac

SEQ ID NO: 54491 - DNA, 20 bp, Neisseria gonorrhoeae
acggcagataatcagcagcg

SEQ ID NO: 54492 - DNA, 20 bp, Neisseria gonorrhoeae
cggcagataatcagcagcgt

SEQ ID NO: 54493 - DNA, 20 bp, Neisseria gonorrhoeae
gaacacgattgaccgcttga

SEQ ID NO: 54494 - DNA, 20 bp, Neisseria gonorrhoeae
tgcgtttgatttgaaatcta

SEQ ID NO: 54495 - DNA, 20 bp, Neisseria gonorrhoeae
gatttgaaatctaccaatgg

SEQ ID NO: 54496 - DNA, 20 bp, Neisseria gonorrhoeae
atttgaaatctaccaatggc

SEQ ID NO: 54497 - DNA, 20 bp, Neisseria gonorrhoeae
gaaatctaccaatggcacac

SEQ ID NO: 54498 - DNA, 20 bp, Neisseria gonorrhoeae
aaatctaccaatggcacacc

SEQ ID NO: 54499 - DNA, 20 bp, Neisseria gonorrhoeae
ggagaagacggttttgaatt

SEQ ID NO: 54500 - DNA, 20 bp, Neisseria gonorrhoeae
tgaattgtgggacgaatggt

SEQ ID NO: 54501 - DNA, 20 bp, Neisseria gonorrhoeae
gaattgtgggacgaatggtc

SEQ ID NO: 54502 - DNA, 20 bp, Neisseria gonorrhoeae
aattgtgggacgaatggtcg

SEQ ID NO: 54503 - DNA, 20 bp, Neisseria gonorrhoeae
tgggacgaatggtcgcgcca

SEQ ID NO: 54504 - DNA, 20 bp, Neisseria gonorrhoeae
aatacggtggtttccaacgt

SEQ ID NO: 54505 - DNA, 20 bp, Neisseria gonorrhoeae
ccaacgtgaaattaagcaac

SEQ ID NO: 54506 - DNA, 20 bp, Neisseria gonorrhoeae
caacgtgaaattaagcaacc

SEQ ID NO: 54507 - DNA, 20 bp, Neisseria gonorrhoeae
agcaacctgaaaaacagcct

SEQ ID NO: 54508 - DNA, 20 bp, Neisseria gonorrhoeae
aggctcttctacatcgggtt

SEQ ID NO: 54509 - DNA, 20 bp, Neisseria gonorrhoeae
tcggctgctgacaagctcaa

SEQ ID NO: 54510 - DNA, 20 bp, Neisseria gonorrhoeae
atttggcgttcatcgggcat

SEQ ID NO: 54511 - DNA, 20 bp, Neisseria gonorrhoeae
ggcgttcatcgggcatctcg

SEQ ID NO: 54512 - DNA, 20 bp, Neisseria gonorrhoeae
gcgttcatcgggcatctcgc

SEQ ID NO: 54513 - DNA, 20 bp, Neisseria gonorrhoeae
atcgggcatctcgctttgtg

SEQ ID NO: 54514 - DNA, 20 bp, Neisseria gonorrhoeae
tgtcggtgtttggcaacgtg

SEQ ID NO: 54515 - DNA, 20 bp, Neisseria gonorrhoeae
ggcaacgtgatgatgctaaa

SEQ ID NO: 54516 - DNA, 20 bp, Neisseria gonorrhoeae
gcaacgtgatgatgctaaat

SEQ ID NO: 54517 - DNA, 20 bp, Neisseria gonorrhoeae
ttgcaatttgtagaaatcaa

SEQ ID NO: 54518 - DNA, 20 bp, Neisseria gonorrhoeae
tgcaatttgtagaaatcaaa

SEQ ID NO: 54519 - DNA, 20 bp, Neisseria gonorrhoeae
atcataatcggcggcatctg

SEQ ID NO: 54520 - DNA, 20 bp, Neisseria gonorrhoeae
tgtttgaaaactcgtaaaca

SEQ ID NO: 54521 - DNA, 20 bp, Neisseria gonorrhoeae
gtttgaaaactcgtaaacaa

SEQ ID NO: 54522 - DNA, 20 bp, Neisseria gonorrhoeae
tttgaaaactcgtaaacaag

SEQ ID NO: 54523 - DNA, 20 bp, Neisseria gonorrhoeae
gaaaactcgtaaacaagcgg

SEQ ID NO: 54524 - DNA, 20 bp, Neisseria gonorrhoeae
ttgcaaaatctgtttgtggc

SEQ ID NO: 54525 - DNA, 20 bp, Neisseria gonorrhoeae
caaaatctgtttgtggcagg

SEQ ID NO: 54526 - DNA, 20 bp, Neisseria gonorrhoeae
gtggcagggcagttggcgga

SEQ ID NO: 54527 - DNA, 20 bp, Neisseria gonorrhoeae
tggcagggcagttggcggaa

SEQ ID NO: 54528 - DNA, 20 bp, Neisseria gonorrhoeae
gcggaagcgatgcacaatct

SEQ ID NO: 54529 - DNA, 20 bp, Neisseria gonorrhoeae
tcgcgtgaaatgtttgaagc

SEQ ID NO: 54530 - DNA, 20 bp, Neisseria gonorrhoeae
cgcgtgaaatgtttgaagca

SEQ ID NO: 54531 - DNA, 20 bp, Neisseria gonorrhoeae
gcgtgaaatgtttgaagcat

SEQ ID NO: 54532 - DNA, 20 bp, Neisseria gonorrhoeae
gaagcattggacaatattcc

SEQ ID NO: 54533 - DNA, 20 bp, Neisseria gonorrhoeae
aagcattggacaatattcca

SEQ ID NO: 54534 - DNA, 20 bp, Neisseria gonorrhoeae
agccttttcgcgccattgcg

SEQ ID NO: 54535 - DNA, 20 bp, Neisseria gonorrhoeae
gccttttcgcgccattgcga

SEQ ID NO: 54536 - DNA, 20 bp, Neisseria gonorrhoeae
tcgcgccattgcgagttatc

SEQ ID NO: 54537 - DNA, 20 bp, Neisseria gonorrhoeae
cgcgccattgcgagttatcg

SEQ ID NO: 54538 - DNA, 20 bp, Neisseria gonorrhoeae
gcgccattgcgagttatcgg

SEQ ID NO: 54539 - DNA, 20 bp, Neisseria gonorrhoeae
caaatgcgcgattagattaa

SEQ ID NO: 54540 - DNA, 20 bp, Neisseria gonorrhoeae
gattaatcgtcattttttgt

SEQ ID NO: 54541 - DNA, 20 bp, Neisseria gonorrhoeae
atcgtcattttttgttggat

SEQ ID NO: 54542 - DNA, 20 bp, Neisseria gonorrhoeae
tttgttggattaaggcgtgc

SEQ ID NO: 54543 - DNA, 20 bp, Neisseria gonorrhoeae
ttgttggattaaggcgtgcc

SEQ ID NO: 54544 - DNA, 20 bp, Neisseria gonorrhoeae
gcgtgatagccgctgttgaa

SEQ ID NO: 54545 - DNA, 20 bp, Neisseria gonorrhoeae
aacaataacgcgctttcccg

SEQ ID NO: 54546 - DNA, 20 bp, Neisseria gonorrhoeae
cccgttggaaacgttgtgcg

SEQ ID NO: 54547 - DNA, 20 bp, Neisseria gonorrhoeae
ccgttggaaacgttgtgcga

SEQ ID NO: 54548 - DNA, 20 bp, Neisseria gonorrhoeae
gaaacgttgtgcgacaagct

SEQ ID NO: 54549 - DNA, 20 bp, Neisseria gonorrhoeae
ccgataatggcggcaatcac

SEQ ID NO: 54550 - DNA, 20 bp, Neisseria gonorrhoeae
accccgtcgggtacgggcag

SEQ ID NO: 54551 - DNA, 20 bp, Neisseria gonorrhoeae
gacgctgctggctatgtttg

SEQ ID NO: 54552 - DNA, 20 bp, Neisseria gonorrhoeae
gtcggtgtgattgccgccat

SEQ ID NO: 54553 - DNA, 20 bp, Neisseria gonorrhoeae
tcggtgtgattgccgccatt

SEQ ID NO: 54554 - DNA, 20 bp, Neisseria gonorrhoeae
cgctgcatcacagggcggcg

SEQ ID NO: 54555 - DNA, 20 bp, Neisseria gonorrhoeae
gtcaggcgcacgttttcgct

SEQ ID NO: 54556 - DNA, 20 bp, Neisseria gonorrhoeae
tcgctgatgttttcgtcgtc

SEQ ID NO: 54557 - DNA, 20 bp, Neisseria gonorrhoeae
cgctgatgttttcgtcgtcg

SEQ ID NO: 54558 - DNA, 20 bp, Neisseria gonorrhoeae
gctgatgttttcgtcgtcga

SEQ ID NO: 54559 - DNA, 20 bp, Neisseria gonorrhoeae
ttgccgttggctgacacttc

SEQ ID NO: 54560 - DNA, 20 bp, Neisseria gonorrhoeae
ccgttggctgacacttcgtc

SEQ ID NO: 54561 - DNA, 20 bp, Neisseria gonorrhoeae
gctgacacttcgtcaataac

SEQ ID NO: 54562 - DNA, 20 bp, Neisseria gonorrhoeae
gtcaataaccgatttctgtc

SEQ ID NO: 54563 - DNA, 20 bp, Neisseria gonorrhoeae
ctgtcgcccaggtaagtctt

SEQ ID NO: 54564 - DNA, 20 bp, Neisseria gonorrhoeae
accccgcctgccgacatcac

SEQ ID NO: 54565 - DNA, 20 bp, Neisseria gonorrhoeae
ccccgcctgccgacatcacc

SEQ ID NO: 54566 - DNA, 20 bp, Neisseria gonorrhoeae
acacacggcggcggcggcag

SEQ ID NO: 54567 - DNA, 20 bp, Neisseria gonorrhoeae
tctgccgccgccgccgtgtg

SEQ ID NO: 54568 - DNA, 20 bp, Neisseria gonorrhoeae
ctgccgccgccgccgtgtgt

SEQ ID NO: 54569 - DNA, 20 bp, Neisseria gonorrhoeae
gccctgagccccatcgcatc

SEQ ID NO: 54570 - DNA, 20 bp, Neisseria gonorrhoeae
ccaaaacggtacgcgccccg

SEQ ID NO: 54571 - DNA, 20 bp, Neisseria gonorrhoeae
accgccgcacggatatggcc

SEQ ID NO: 54572 - DNA, 20 bp, Neisseria gonorrhoeae
ccgccgcacggatatggccg

SEQ ID NO: 54573 - DNA, 20 bp, Neisseria gonorrhoeae
tggcaacggcggatgcgatg

SEQ ID NO: 54574 - DNA, 20 bp, Neisseria gonorrhoeae
gtctccatccacgccgacgc

SEQ ID NO: 54575 - DNA, 20 bp, Neisseria gonorrhoeae
caccagcccctccgcgcgcg

SEQ ID NO: 54576 - DNA, 20 bp, Neisseria gonorrhoeae
accagcccctccgcgcgcgg

SEQ ID NO: 54577 - DNA, 20 bp, Neisseria gonorrhoeae
agcatataaacccccgttcc

SEQ ID NO: 54578 - DNA, 20 bp, Neisseria gonorrhoeae
cgcgcgcggaggggctggtg

SEQ ID NO: 54579 - DNA, 20 bp, Neisseria gonorrhoeae
ctgtccaatcctgccgaaga

SEQ ID NO: 54580 - DNA, 20 bp, Neisseria gonorrhoeae
cgtcggcagtgcgcccaatc

SEQ ID NO: 54581 - DNA, 20 bp, Neisseria gonorrhoeae
ggcgcactgccgacggaagg

SEQ ID NO: 54582 - DNA, 20 bp, Neisseria gonorrhoeae
gctgcccagcagcttctctt

SEQ ID NO: 54583 - DNA, 20 bp, Neisseria gonorrhoeae
tcttcggcaggattggacag

SEQ ID NO: 54584 - DNA, 20 bp, Neisseria gonorrhoeae
cagggcttggaagtcggttt

SEQ ID NO: 54585 - DNA, 20 bp, Neisseria gonorrhoeae
gaagtcggtttcgcccgcct

SEQ ID NO: 54586 - DNA, 20 bp, Neisseria gonorrhoeae
cgcccgcctcgaccttgccg

SEQ ID NO: 54587 - DNA, 20 bp, Neisseria gonorrhoeae
gcccgcctcgaccttgccgc

SEQ ID NO: 54588 - DNA, 20 bp, Neisseria gonorrhoeae
ccgccggcaaattcccaata

SEQ ID NO: 54589 - DNA, 20 bp, Neisseria gonorrhoeae
ggacagggcggggccgtaga

SEQ ID NO: 54590 - DNA, 20 bp, Neisseria gonorrhoeae
gggcttgcccaatgcgtcgt

SEQ ID NO: 54591 - DNA, 20 bp, Neisseria gonorrhoeae
cccaatgcgtcgtgcccgat

SEQ ID NO: 54592 - DNA, 20 bp, Neisseria gonorrhoeae
cggaaggaaaccgcgcctcg

SEQ ID NO: 54593 - DNA, 20 bp, Neisseria gonorrhoeae
ccttccgcaacatcggcatc

SEQ ID NO: 54594 - DNA, 20 bp, Neisseria gonorrhoeae
tgcagacgctcgaactgcct

SEQ ID NO: 54595 - DNA, 20 bp, Neisseria gonorrhoeae
gcagacgctcgaactgcctg

SEQ ID NO: 54596 - DNA, 20 bp, Neisseria gonorrhoeae
cagacgctcgaactgcctga

SEQ ID NO: 54597 - DNA, 20 bp, Neisseria gonorrhoeae
gttcggcgtggctgtgtgcg

SEQ ID NO: 54598 - DNA, 20 bp, Neisseria gonorrhoeae
ttcggcgtggctgtgtgcgt

SEQ ID NO: 54599 - DNA, 20 bp, Neisseria gonorrhoeae
ggcgcggtgcagggttttga

SEQ ID NO: 54600 - DNA, 20 bp, Neisseria gonorrhoeae
tgagttcctgactgccgtac

SEQ ID NO: 54601 - DNA, 20 bp, Neisseria gonorrhoeae
gagttcctgactgccgtacc

SEQ ID NO: 54602 - DNA, 20 bp, Neisseria gonorrhoeae
agttcctgactgccgtacca

SEQ ID NO: 54603 - DNA, 20 bp, Neisseria gonorrhoeae
ctgactgccgtaccacgaca

SEQ ID NO: 54604 - DNA, 20 bp, Neisseria gonorrhoeae
tatgcgcggcgtgtccgaaa

SEQ ID NO: 54605 - DNA, 20 bp, Neisseria gonorrhoeae
attgccgcctgttgggtaaa

SEQ ID NO: 54606 - DNA, 20 bp, Neisseria gonorrhoeae
ccgcctgttgggtaaacgtg

SEQ ID NO: 54607 - DNA, 20 bp, Neisseria gonorrhoeae
ggtaaacgtgccctgcggcc

SEQ ID NO: 54608 - DNA, 20 bp, Neisseria gonorrhoeae
acccaacaggcggcaatcaa

SEQ ID NO: 54609 - DNA, 20 bp, Neisseria gonorrhoeae
ccgccaacccgtcccaactc

SEQ ID NO: 54610 - DNA, 20 bp, Neisseria gonorrhoeae
ttcgggttgcccccgttttg

SEQ ID NO: 54611 - DNA, 20 bp, Neisseria gonorrhoeae
tcgggttgcccccgttttgg

SEQ ID NO: 54612 - DNA, 20 bp, Neisseria gonorrhoeae
cgggttgcccccgttttggc

SEQ ID NO: 54613 - DNA, 20 bp, Neisseria gonorrhoeae
gggttgcccccgttttggct

SEQ ID NO: 54614 - DNA, 20 bp, Neisseria gonorrhoeae
gcgtcggacgcatagcggca

SEQ ID NO: 54615 - DNA, 20 bp, Neisseria gonorrhoeae
cgtcggacgcatagcggcac

SEQ ID NO: 54616 - DNA, 20 bp, Neisseria gonorrhoeae
tgtgccgctatgcgtccgac

SEQ ID NO: 54617 - DNA, 20 bp, Neisseria gonorrhoeae
gtgccgctatgcgtccgacg

SEQ ID NO: 54618 - DNA, 20 bp, Neisseria gonorrhoeae
tgccgctatgcgtccgacgc

SEQ ID NO: 54619 - DNA, 20 bp, Neisseria gonorrhoeae
atcctcctcacgaaaatacg

SEQ ID NO: 54620 - DNA, 20 bp, Neisseria gonorrhoeae
tcctcctcacgaaaatacgc

SEQ ID NO: 54621 - DNA, 20 bp, Neisseria gonorrhoeae
ctttcttgatgggcgtcttg

SEQ ID NO: 54622 - DNA, 20 bp, Neisseria gonorrhoeae
cttgatgggcgtcttgcgta

SEQ ID NO: 54623 - DNA, 20 bp, Neisseria gonorrhoeae
ttgatgggcgtcttgcgtat

SEQ ID NO: 54624 - DNA, 20 bp, Neisseria gonorrhoeae
ggcgtgcgctaccgcttctg

SEQ ID NO: 54625 - DNA, 20 bp, Neisseria gonorrhoeae
tgattccccgacaccgatgc

SEQ ID NO: 54626 - DNA, 20 bp, Neisseria gonorrhoeae
cccgacaccgatgccgtctg

SEQ ID NO: 54627 - DNA, 20 bp, Neisseria gonorrhoeae
agacggcatttttaatcgcc

SEQ ID NO: 54628 - DNA, 20 bp, Neisseria gonorrhoeae
ttaatcgcccgccgtttacg

SEQ ID NO: 54629 - DNA, 20 bp, Neisseria gonorrhoeae
tcggataaaacggttgccca

SEQ ID NO: 54630 - DNA, 20 bp, Neisseria gonorrhoeae
cccaaaccccgcgtcctaga

SEQ ID NO: 54631 - DNA, 20 bp, Neisseria gonorrhoeae
ccacttccgtgggaatgacg

SEQ ID NO: 54632 - DNA, 20 bp, Neisseria gonorrhoeae
cgtgggaatgacggttcggt

SEQ ID NO: 54633 - DNA, 20 bp, Neisseria gonorrhoeae
ggttgctacggcccgctgat

SEQ ID NO: 54634 - DNA, 20 bp, Neisseria gonorrhoeae
ccgccatcatcagccaaaac

SEQ ID NO: 54635 - DNA, 20 bp, Neisseria gonorrhoeae
gggcggcggataaatcgaat

SEQ ID NO: 54636 - DNA, 20 bp, Neisseria gonorrhoeae
ggcggcggataaatcgaatt

SEQ ID NO: 54637 - DNA, 20 bp, Neisseria gonorrhoeae
cccgtatgaccgagcgcggt

SEQ ID NO: 54638 - DNA, 20 bp, Neisseria gonorrhoeae
gatttatccgccgcccaaag

SEQ ID NO: 54639 - DNA, 20 bp, Neisseria gonorrhoeae
cgcaccagccgccgtcaatc

SEQ ID NO: 54640 - DNA, 20 bp, Neisseria gonorrhoeae
caaacgctcgcggatttcat

SEQ ID NO: 54641 - DNA, 20 bp, Neisseria gonorrhoeae
cataagggtcggtcaatggt

SEQ ID NO: 54642 - DNA, 20 bp, Neisseria gonorrhoeae
ataagggtcggtcaatggtt

SEQ ID NO: 54643 - DNA, 20 bp, Neisseria gonorrhoeae
accgacccttatgaaatccg

SEQ ID NO: 54644 - DNA, 20 bp, Neisseria gonorrhoeae
ggtggaacgaggtgtccatc

SEQ ID NO: 54645 - DNA, 20 bp, Neisseria gonorrhoeae
gtggaacgaggtgtccatca

SEQ ID NO: 54646 - DNA, 20 bp, Neisseria gonorrhoeae
ggcaggccgggaaagtgttc

SEQ ID NO: 54647 - DNA, 20 bp, Neisseria gonorrhoeae
ctgcgcggcgaggatgccgc

SEQ ID NO: 54648 - DNA, 20 bp, Neisseria gonorrhoeae
gcggggttgtgcagcggggc

SEQ ID NO: 54649 - DNA, 20 bp, Neisseria gonorrhoeae
tttacgcgttccgccgcctg

SEQ ID NO: 54650 - DNA, 20 bp, Neisseria gonorrhoeae
acgcgttccgccgcctgcgg

SEQ ID NO: 54651 - DNA, 20 bp, Neisseria gonorrhoeae
cgcgttccgccgcctgcggc

SEQ ID NO: 54652 - DNA, 20 bp, Neisseria gonorrhoeae
cgccgcctgcggcaaggttg

SEQ ID NO: 54653 - DNA, 20 bp, Neisseria gonorrhoeae
accagcgtaccgagcacggc

SEQ ID NO: 54654 - DNA, 20 bp, Neisseria gonorrhoeae
acggttttgccgctggaggc

SEQ ID NO: 54655 - DNA, 20 bp, Neisseria gonorrhoeae
cggttttgccgctggaggcg

SEQ ID NO: 54656 - DNA, 20 bp, Neisseria gonorrhoeae
tgccgctggaggcggtgtaa

SEQ ID NO: 54657 - DNA, 20 bp, Neisseria gonorrhoeae
gccgctggaggcggtgtaat

SEQ ID NO: 54658 - DNA, 20 bp, Neisseria gonorrhoeae
ccgctggaggcggtgtaatc

SEQ ID NO: 54659 - DNA, 20 bp, Neisseria gonorrhoeae
tcgggcaaaatcgccggcgg

SEQ ID NO: 54660 - DNA, 20 bp, Neisseria gonorrhoeae
atgtacgttcccctgccagt

SEQ ID NO: 54661 - DNA, 20 bp, Neisseria gonorrhoeae
ccctgccagtgcgccttccc

SEQ ID NO: 54662 - DNA, 20 bp, Neisseria gonorrhoeae
ggaaggcgcactggcagggg

SEQ ID NO: 54663 - DNA, 20 bp, Neisseria gonorrhoeae
agaggtatgcgtccgccggc

SEQ ID NO: 54664 - DNA, 20 bp, Neisseria gonorrhoeae
ggccgtctgaaggctcttcg

SEQ ID NO: 54665 - DNA, 20 bp, Neisseria gonorrhoeae
gccgtctgaaggctcttcgt

SEQ ID NO: 54666 - DNA, 20 bp, Neisseria gonorrhoeae
gtaaggcttcgccagccctt

SEQ ID NO: 54667 - DNA, 20 bp, Neisseria gonorrhoeae
gccagccctttcgccgccaa

SEQ ID NO: 54668 - DNA, 20 bp, Neisseria gonorrhoeae
cgccgccaaatcggcggtgg

SEQ ID NO: 54669 - DNA, 20 bp, Neisseria gonorrhoeae
tcgcgccctcgccgaaaaat

SEQ ID NO: 54670 - DNA, 20 bp, Neisseria gonorrhoeae
gacaaacgccccgaccacgc

SEQ ID NO: 54671 - DNA, 20 bp, Neisseria gonorrhoeae
acgcaagaattcggtcagtg

SEQ ID NO: 54672 - DNA, 20 bp, Neisseria gonorrhoeae
cgcaagaattcggtcagtgc

SEQ ID NO: 54673 - DNA, 20 bp, Neisseria gonorrhoeae
gcactgaccgaattcttgcg

SEQ ID NO: 54674 - DNA, 20 bp, Neisseria gonorrhoeae
ccgcttccaaaccgcccacg

SEQ ID NO: 54675 - DNA, 20 bp, Neisseria gonorrhoeae
cgcttccaaaccgcccacgc

SEQ ID NO: 54676 - DNA, 20 bp, Neisseria gonorrhoeae
caaaccgcccacgccacgga

SEQ ID NO: 54677 - DNA, 20 bp, Neisseria gonorrhoeae
atgcgctgggcgtgatttcc

SEQ ID NO: 54678 - DNA, 20 bp, Neisseria gonorrhoeae
ccgtggcgtgggcggtttgg

SEQ ID NO: 54679 - DNA, 20 bp, Neisseria gonorrhoeae
cgctcggtcaggacgacctc

SEQ ID NO: 54680 - DNA, 20 bp, Neisseria gonorrhoeae
cgtcggtcatggtgcgccgc

SEQ ID NO: 54681 - DNA, 20 bp, Neisseria gonorrhoeae
tcccgatacggttgaggtcg

SEQ ID NO: 54682 - DNA, 20 bp, Neisseria gonorrhoeae
cccgatacggttgaggtcgt

SEQ ID NO: 54683 - DNA, 20 bp, Neisseria gonorrhoeae
ccgatacggttgaggtcgtc

SEQ ID NO: 54684 - DNA, 20 bp, Neisseria gonorrhoeae
ggcaacttgatgtcgccgta

SEQ ID NO: 54685 - DNA, 20 bp, Neisseria gonorrhoeae
gcaacttgatgtcgccgtat

SEQ ID NO: 54686 - DNA, 20 bp, Neisseria gonorrhoeae
atgtcgccgtatttttggaa

SEQ ID NO: 54687 - DNA, 20 bp, Neisseria gonorrhoeae
ttggaagcggcggccgacgc

SEQ ID NO: 54688 - DNA, 20 bp, Neisseria gonorrhoeae
tggaagcggcggccgacgcc

SEQ ID NO: 54689 - DNA, 20 bp, Neisseria gonorrhoeae
ctcaaactcgcacccaaacc

SEQ ID NO: 54690 - DNA, 20 bp, Neisseria gonorrhoeae
ccatcagagagtgggtaagc

SEQ ID NO: 54691 - DNA, 20 bp, Neisseria gonorrhoeae
cccactctctgatggcaatc

SEQ ID NO: 54692 - DNA, 20 bp, Neisseria gonorrhoeae
ggtatgggtttgggtgcgag

SEQ ID NO: 54693 - DNA, 20 bp, Neisseria gonorrhoeae
aagccgcagccgtccaaatc

SEQ ID NO: 54694 - DNA, 20 bp, Neisseria gonorrhoeae
gcggcgcatcgacgccgatc

SEQ ID NO: 54695 - DNA, 20 bp, Neisseria gonorrhoeae
cggcgcatcgacgccgatca

SEQ ID NO: 54696 - DNA, 20 bp, Neisseria gonorrhoeae
tgccttatctttcaacgcgt

SEQ ID NO: 54697 - DNA, 20 bp, Neisseria gonorrhoeae
gccttatctttcaacgcgtc

SEQ ID NO: 54698 - DNA, 20 bp, Neisseria gonorrhoeae
gatgtcgcctagcacgcgcc

SEQ ID NO: 54699 - DNA, 20 bp, Neisseria gonorrhoeae
tgcttgaacgcctcgatatc

SEQ ID NO: 54700 - DNA, 20 bp, Neisseria gonorrhoeae
gcttgaacgcctcgatatcc

SEQ ID NO: 54701 - DNA, 20 bp, Neisseria gonorrhoeae
cttgaacgcctcgatatccg

SEQ ID NO: 54702 - DNA, 20 bp, Neisseria gonorrhoeae
aacgcctcgatatccggctg

SEQ ID NO: 54703 - DNA, 20 bp, Neisseria gonorrhoeae
ttgacgaggtgggtttgcgg

SEQ ID NO: 54704 - DNA, 20 bp, Neisseria gonorrhoeae
tgacgaggtgggtttgcggg

SEQ ID NO: 54705 - DNA, 20 bp, Neisseria gonorrhoeae
gacgaggtgggtttgcgggc

SEQ ID NO: 54706 - DNA, 20 bp, Neisseria gonorrhoeae
acgaggtgggtttgcgggcc

SEQ ID NO: 54707 - DNA, 20 bp, Neisseria gonorrhoeae
gcgggccgtcggtacgcact

SEQ ID NO: 54708 - DNA, 20 bp, Neisseria gonorrhoeae
atgttgctgaagccttgcaa

SEQ ID NO: 54709 - DNA, 20 bp, Neisseria gonorrhoeae
ctgaagccttgcaaaccttc

SEQ ID NO: 54710 - DNA, 20 bp, Neisseria gonorrhoeae
caaaccttccgccacatcgt

SEQ ID NO: 54711 - DNA, 20 bp, Neisseria gonorrhoeae
cgccacatcgttcaaactca

SEQ ID NO: 54712 - DNA, 20 bp, Neisseria gonorrhoeae
aaactcaaaccggcagccaa

SEQ ID NO: 54713 - DNA, 20 bp, Neisseria gonorrhoeae
tccaaacgcgggttgtcgct

SEQ ID NO: 54714 - DNA, 20 bp, Neisseria gonorrhoeae
ccaaacgcgggttgtcgctg

SEQ ID NO: 54715 - DNA, 20 bp, Neisseria gonorrhoeae
caaacgcgggttgtcgctgg

SEQ ID NO: 54716 - DNA, 20 bp, Neisseria gonorrhoeae
tcgctggttacgacgacttt

SEQ ID NO: 54717 - DNA, 20 bp, Neisseria gonorrhoeae
cgacgactttatccgcgccc

SEQ ID NO: 54718 - DNA, 20 bp, Neisseria gonorrhoeae
catcgcggcggctgttgcgc

SEQ ID NO: 54719 - DNA, 20 bp, Neisseria gonorrhoeae
cgccttgttgacggaaacgg

SEQ ID NO: 54720 - DNA, 20 bp, Neisseria gonorrhoeae
ttgacggaaacggtagagca

SEQ ID NO: 54721 - DNA, 20 bp, Neisseria gonorrhoeae
acggaaacggtagagcaggg

SEQ ID NO: 54722 - DNA, 20 bp, Neisseria gonorrhoeae
ggacatcgacgggggcgggg

SEQ ID NO: 54723 - DNA, 20 bp, Neisseria gonorrhoeae
gatcatatcggttacggcac

SEQ ID NO: 54724 - DNA, 20 bp, Neisseria gonorrhoeae
cggcacggttgcgccgctgt

SEQ ID NO: 54725 - DNA, 20 bp, Neisseria gonorrhoeae
cgccgctgttcgctgtctgc

SEQ ID NO: 54726 - DNA, 20 bp, Neisseria gonorrhoeae
gctgtctgcccggccgggtc

SEQ ID NO: 54727 - DNA, 20 bp, Neisseria gonorrhoeae
ggatcgtaggcgggcgtatt

SEQ ID NO: 54728 - DNA, 20 bp, Neisseria gonorrhoeae
ctgacctttgccgtcaatat

SEQ ID NO: 54729 - DNA, 20 bp, Neisseria gonorrhoeae
gccgtcaatatcggtaaatc

SEQ ID NO: 54730 - DNA, 20 bp, Neisseria gonorrhoeae
ccgtcaatatcggtaaatcc

SEQ ID NO: 54731 - DNA, 20 bp, Neisseria gonorrhoeae
cccatcgggtaatggcgttt

SEQ ID NO: 54732 - DNA, 20 bp, Neisseria gonorrhoeae
taattctttttcaaatacaa

SEQ ID NO: 54733 - DNA, 20 bp, Neisseria gonorrhoeae
ctgtcgatgcttaattcgtg

SEQ ID NO: 54734 - DNA, 20 bp, Neisseria gonorrhoeae
attcgtgtgcgccgccgaac

SEQ ID NO: 54735 - DNA, 20 bp, Neisseria gonorrhoeae
gtgtgcgccgccgaacatga

SEQ ID NO: 54736 - DNA, 20 bp, Neisseria gonorrhoeae
tacccttgtgattttgattt

SEQ ID NO: 54737 - DNA, 20 bp, Neisseria gonorrhoeae
acccttgtgattttgatttc

SEQ ID NO: 54738 - DNA, 20 bp, Neisseria gonorrhoeae
ccgttccggctcgcccgcct

SEQ ID NO: 54739 - DNA, 20 bp, Neisseria gonorrhoeae
cggctcgcccgccttttctt

SEQ ID NO: 54740 - DNA, 20 bp, Neisseria gonorrhoeae
tcttcaacctcgtcggcttt

SEQ ID NO: 54741 - DNA, 20 bp, Neisseria gonorrhoeae
cttcaacctcgtcggctttg

SEQ ID NO: 54742 - DNA, 20 bp, Neisseria gonorrhoeae
ttcaacctcgtcggctttgt

SEQ ID NO: 54743 - DNA, 20 bp, Neisseria gonorrhoeae
ggaaaatttgttcataaaca

SEQ ID NO: 54744 - DNA, 20 bp, Neisseria gonorrhoeae
gttcataaacataccttaat

SEQ ID NO: 54745 - DNA, 20 bp, Neisseria gonorrhoeae
ttcataaacataccttaatg

SEQ ID NO: 54746 - DNA, 20 bp, Neisseria gonorrhoeae
ataaacataccttaatgtgt

SEQ ID NO: 54747 - DNA, 20 bp, Neisseria gonorrhoeae
atgtgtttcagacggcatta

SEQ ID NO: 54748 - DNA, 20 bp, Neisseria gonorrhoeae
tttgccgcgggcggcgatga

SEQ ID NO: 54749 - DNA, 20 bp, Neisseria gonorrhoeae
gccgcgggcggcgatgacgc

SEQ ID NO: 54750 - DNA, 20 bp, Neisseria gonorrhoeae
ccgcgggcggcgatgacgcg

SEQ ID NO: 54751 - DNA, 20 bp, Neisseria gonorrhoeae
caaaacggacgcactgcttt

SEQ ID NO: 54752 - DNA, 20 bp, Neisseria gonorrhoeae
cgcccgcttcctgctgcatc

SEQ ID NO: 54753 - DNA, 20 bp, Neisseria gonorrhoeae
acgaaggcaacggcatttcc

SEQ ID NO: 54754 - DNA, 20 bp, Neisseria gonorrhoeae
cgaaggcaacggcatttccg

SEQ ID NO: 54755 - DNA, 20 bp, Neisseria gonorrhoeae
ccgtcaaactctccgccatc

SEQ ID NO: 54756 - DNA, 20 bp, Neisseria gonorrhoeae
cgtcaaactctccgccatcc

SEQ ID NO: 54757 - DNA, 20 bp, Neisseria gonorrhoeae
ggcgcgcgagtagcgcggat

SEQ ID NO: 54758 - DNA, 20 bp, Neisseria gonorrhoeae
ccgaagtgcgcgaagccgtc

SEQ ID NO: 54759 - DNA, 20 bp, Neisseria gonorrhoeae
ctgccgctactacgcaaacg

SEQ ID NO: 54760 - DNA, 20 bp, Neisseria gonorrhoeae
tgccgctactacgcaaacga

SEQ ID NO: 54761 - DNA, 20 bp, Neisseria gonorrhoeae
ggcttcgtttgcgtagtagc

SEQ ID NO: 54762 - DNA, 20 bp, Neisseria gonorrhoeae
gtttgcgtagtagcggcaga

SEQ ID NO: 54763 - DNA, 20 bp, Neisseria gonorrhoeae
ccggttatgccgtttccctc

SEQ ID NO: 54764 - DNA, 20 bp, Neisseria gonorrhoeae
tgccgtttccctcatgcacg

SEQ ID NO: 54765 - DNA, 20 bp, Neisseria gonorrhoeae
ccctcatgcacgaagccggc

SEQ ID NO: 54766 - DNA, 20 bp, Neisseria gonorrhoeae
cctcatgcacgaagccggca

SEQ ID NO: 54767 - DNA, 20 bp, Neisseria gonorrhoeae
gtgcatgagggaaacggcat

SEQ ID NO: 54768 - DNA, 20 bp, Neisseria gonorrhoeae
tcacaggctcgaccgaagtg

SEQ ID NO: 54769 - DNA, 20 bp, Neisseria gonorrhoeae
cacaggctcgaccgaagtgg

SEQ ID NO: 54770 - DNA, 20 bp, Neisseria gonorrhoeae
acaggctcgaccgaagtggc

SEQ ID NO: 54771 - DNA, 20 bp, Neisseria gonorrhoeae
ccaaacgcggcgacaatccc

SEQ ID NO: 54772 - DNA, 20 bp, Neisseria gonorrhoeae
cggcaatcaggacgggattg

SEQ ID NO: 54773 - DNA, 20 bp, Neisseria gonorrhoeae
ctactcggccgacttggacg

SEQ ID NO: 54774 - DNA, 20 bp, Neisseria gonorrhoeae
gacggtttgctgcaaatcag

SEQ ID NO: 54775 - DNA, 20 bp, Neisseria gonorrhoeae
gctgcaaatcagcggcaaac

SEQ ID NO: 54776 - DNA, 20 bp, Neisseria gonorrhoeae
ctgcaaatcagcggcaaacc

SEQ ID NO: 54777 - DNA, 20 bp, Neisseria gonorrhoeae
tcgggtttgccgctgatttg

SEQ ID NO: 54778 - DNA, 20 bp, Neisseria gonorrhoeae
gaaaacacccgcttcaaaac

SEQ ID NO: 54779 - DNA, 20 bp, Neisseria gonorrhoeae
aaaacccacgaagcctcgtt

SEQ ID NO: 54780 - DNA, 20 bp, Neisseria gonorrhoeae
gtgggttttgaagcgggtgt

SEQ ID NO: 54781 - DNA, 20 bp, Neisseria gonorrhoeae
tgaagcgggtgttttccaag

SEQ ID NO: 54782 - DNA, 20 bp, Neisseria gonorrhoeae
gaagcgggtgttttccaagc

SEQ ID NO: 54783 - DNA, 20 bp, Neisseria gonorrhoeae
cgcgcttgcctgcggcgcaa

SEQ ID NO: 54784 - DNA, 20 bp, Neisseria gonorrhoeae
cctgcggcgcaatcggcgca

SEQ ID NO: 54785 - DNA, 20 bp, Neisseria gonorrhoeae
cgccgcaggcaagcgcggaa

SEQ ID NO: 54786 - DNA, 20 bp, Neisseria gonorrhoeae
cgtgcgcctttgccgctgtg

SEQ ID NO: 54787 - DNA, 20 bp, Neisseria gonorrhoeae
gccgctgtgggtcagtgcgc

SEQ ID NO: 54788 - DNA, 20 bp, Neisseria gonorrhoeae
ccttcgccaccggcagcgcg

SEQ ID NO: 54789 - DNA, 20 bp, Neisseria gonorrhoeae
gccaccggcagcgcggcgtt

SEQ ID NO: 54790 - DNA, 20 bp, Neisseria gonorrhoeae
ggcggcagtgcgcaatacgc

SEQ ID NO: 54791 - DNA, 20 bp, Neisseria gonorrhoeae
agggcgtattgcgcactgcc

SEQ ID NO: 54792 - DNA, 20 bp, Neisseria gonorrhoeae
cgcactgccgcccaacgccg

SEQ ID NO: 54793 - DNA, 20 bp, Neisseria gonorrhoeae
gatttcggcttggaagcgga

SEQ ID NO: 54794 - DNA, 20 bp, Neisseria gonorrhoeae
cggcttggaagcggacgcac

SEQ ID NO: 54795 - DNA, 20 bp, Neisseria gonorrhoeae
ggcttggaagcggacgcacg

SEQ ID NO: 54796 - DNA, 20 bp, Neisseria gonorrhoeae
gaagcggacgcacggatcca

SEQ ID NO: 54797 - DNA, 20 bp, Neisseria gonorrhoeae
tcgccggtatggacttggcg

SEQ ID NO: 54798 - DNA, 20 bp, Neisseria gonorrhoeae
ggaagcgggcgcaggtttgt

SEQ ID NO: 54799 - DNA, 20 bp, Neisseria gonorrhoeae
gaagcgggcgcaggtttgtg

SEQ ID NO: 54800 - DNA, 20 bp, Neisseria gonorrhoeae
gtgcgacgaagccgccgtcc

SEQ ID NO: 54801 - DNA, 20 bp, Neisseria gonorrhoeae
tgcgacgaagccgccgtccg

SEQ ID NO: 54802 - DNA, 20 bp, Neisseria gonorrhoeae
gattgccggtttgccctgcg

SEQ ID NO: 54803 - DNA, 20 bp, Neisseria gonorrhoeae
gtccgtcggcatttcccgtc

SEQ ID NO: 54804 - DNA, 20 bp, Neisseria gonorrhoeae
cccgtccatccatcggcact

SEQ ID NO: 54805 - DNA, 20 bp, Neisseria gonorrhoeae
ccgtccatccatcggcactg

SEQ ID NO: 54806 - DNA, 20 bp, Neisseria gonorrhoeae
ggacaggcagtgccgatgga

SEQ ID NO: 54807 - DNA, 20 bp, Neisseria gonorrhoeae
gcggctgatgtcgagcgaga

SEQ ID NO: 54808 - DNA, 20 bp, Neisseria gonorrhoeae
ccatcggatagagtgcgccc

SEQ ID NO: 54809 - DNA, 20 bp, Neisseria gonorrhoeae
gcgtgcgttatgctgcgcct

SEQ ID NO: 54810 - DNA, 20 bp, Neisseria gonorrhoeae
tgctgcgcctgcggcaattt

SEQ ID NO: 54811 - DNA, 20 bp, Neisseria gonorrhoeae
ggttgcggcggtattgcagc

SEQ ID NO: 54812 - DNA, 20 bp, Neisseria gonorrhoeae
gttgcggcggtattgcagca

SEQ ID NO: 54813 - DNA, 20 bp, Neisseria gonorrhoeae
gcaaaaaccttgttgggcgg

SEQ ID NO: 54814 - DNA, 20 bp, Neisseria gonorrhoeae
ttgggcggcggcaatgtgtt

SEQ ID NO: 54815 - DNA, 20 bp, Neisseria gonorrhoeae
ggcggcggcaatgtgttgct

SEQ ID NO: 54816 - DNA, 20 bp, Neisseria gonorrhoeae
ctgctggacgaaccgtccaa

SEQ ID NO: 54817 - DNA, 20 bp, Neisseria gonorrhoeae
ccacgtcgagatcgttggac

SEQ ID NO: 54818 - DNA, 20 bp, Neisseria gonorrhoeae
tttgggacgagattgtcgcc

SEQ ID NO: 54819 - DNA, 20 bp, Neisseria gonorrhoeae
gggacgagattgtcgccatg

SEQ ID NO: 54820 - DNA, 20 bp, Neisseria gonorrhoeae
ggacgagattgtcgccatgc

SEQ ID NO: 54821 - DNA, 20 bp, Neisseria gonorrhoeae
tcgccatgctgtttgtgctg

SEQ ID NO: 54822 - DNA, 20 bp, Neisseria gonorrhoeae
gtgctggcgtttgtgccgtt

SEQ ID NO: 54823 - DNA, 20 bp, Neisseria gonorrhoeae
gctcgggacggagcagcttt

SEQ ID NO: 54824 - DNA, 20 bp, Neisseria gonorrhoeae
tgttcgcattcggcgaacac

SEQ ID NO: 54825 - DNA, 20 bp, Neisseria gonorrhoeae
gttcgcattcggcgaacaca

SEQ ID NO: 54826 - DNA, 20 bp, Neisseria gonorrhoeae
ttcgcattcggcgaacacat

SEQ ID NO: 54827 - DNA, 20 bp, Neisseria gonorrhoeae
gcattcggcgaacacatcat

SEQ ID NO: 54828 - DNA, 20 bp, Neisseria gonorrhoeae
ttttcagcacctgcagattg

SEQ ID NO: 54829 - DNA, 20 bp, Neisseria gonorrhoeae
tttcagcacctgcagattga

SEQ ID NO: 54830 - DNA, 20 bp, Neisseria gonorrhoeae
ttcagcacctgcagattgag

SEQ ID NO: 54831 - DNA, 20 bp, Neisseria gonorrhoeae
tcagcacctgcagattgaga

SEQ ID NO: 54832 - DNA, 20 bp, Neisseria gonorrhoeae
cagcacctgcagattgagaa

SEQ ID NO: 54833 - DNA, 20 bp, Neisseria gonorrhoeae
cgccgcaaattgctggattt

SEQ ID NO: 54834 - DNA, 20 bp, Neisseria gonorrhoeae
ctggatttgcaggacacagg

SEQ ID NO: 54835 - DNA, 20 bp, Neisseria gonorrhoeae
gcaggacacaggcacagacg

SEQ ID NO: 54836 - DNA, 20 bp, Neisseria gonorrhoeae
caggacacaggcacagacga

SEQ ID NO: 54837 - DNA, 20 bp, Neisseria gonorrhoeae
tcgcaagaactcagccgcct

SEQ ID NO: 54838 - DNA, 20 bp, Neisseria gonorrhoeae
ccaacatcagcgtactcccc

SEQ ID NO: 54839 - DNA, 20 bp, Neisseria gonorrhoeae
gcaatcccgccgatgttcag

SEQ ID NO: 54840 - DNA, 20 bp, Neisseria gonorrhoeae
agtaccacgcgtgtttccct

SEQ ID NO: 54841 - DNA, 20 bp, Neisseria gonorrhoeae
cacatcggtcttaaacgccc

SEQ ID NO: 54842 - DNA, 20 bp, Neisseria gonorrhoeae
aacgcccccgccgccgccct

SEQ ID NO: 54843 - DNA, 20 bp, Neisseria gonorrhoeae
aagaccgatgtggaagtggt

SEQ ID NO: 54844 - DNA, 20 bp, Neisseria gonorrhoeae
agaccgatgtggaagtggtt

SEQ ID NO: 54845 - DNA, 20 bp, Neisseria gonorrhoeae
cgccggagagcgcgtcggat

SEQ ID NO: 54846 - DNA, 20 bp, Neisseria gonorrhoeae
ccgaaactgtggatgacggt

SEQ ID NO: 54847 - DNA, 20 bp, Neisseria gonorrhoeae
cagtcggagaaggattatct

SEQ ID NO: 54848 - DNA, 20 bp, Neisseria gonorrhoeae
tccgactgcaacggaccgtc

SEQ ID NO: 54849 - DNA, 20 bp, Neisseria gonorrhoeae
cggcaaggctttcctccgtc

SEQ ID NO: 54850 - DNA, 20 bp, Neisseria gonorrhoeae
ggcaaggctttcctccgtcc

SEQ ID NO: 54851 - DNA, 20 bp, Neisseria gonorrhoeae
cgaccgcgctttggctgccg

SEQ ID NO: 54852 - DNA, 20 bp, Neisseria gonorrhoeae
ggctgccggtgcggtcaata

SEQ ID NO: 54853 - DNA, 20 bp, Neisseria gonorrhoeae
gctgccggtgcggtcaatac

SEQ ID NO: 54854 - DNA, 20 bp, Neisseria gonorrhoeae
gaagacggcagaatacgcgg

SEQ ID NO: 54855 - DNA, 20 bp, Neisseria gonorrhoeae
tcgccgcgtattctgccgtc

SEQ ID NO: 54856 - DNA, 20 bp, Neisseria gonorrhoeae
cggaatatcgaggcttcctg

SEQ ID NO: 54857 - DNA, 20 bp, Neisseria gonorrhoeae
ctgcggcaggtagccgacac

SEQ ID NO: 54858 - DNA, 20 bp, Neisseria gonorrhoeae
gtgtatgggcaggtggcgca

SEQ ID NO: 54859 - DNA, 20 bp, Neisseria gonorrhoeae
cgccacctgcccatacacga

SEQ ID NO: 54860 - DNA, 20 bp, Neisseria gonorrhoeae
ccgccattttgcgcccgata

SEQ ID NO: 54861 - DNA, 20 bp, Neisseria gonorrhoeae
tgcgcccgatatgtccggac

SEQ ID NO: 54862 - DNA, 20 bp, Neisseria gonorrhoeae
gcgcccgatatgtccggact

SEQ ID NO: 54863 - DNA, 20 bp, Neisseria gonorrhoeae
cgcccgatatgtccggactt

SEQ ID NO: 54864 - DNA, 20 bp, Neisseria gonorrhoeae
cccatacccgtgatgacgac

SEQ ID NO: 54865 - DNA, 20 bp, Neisseria gonorrhoeae
aagtgcctgccaccgacgca

SEQ ID NO: 54866 - DNA, 20 bp, Neisseria gonorrhoeae
cgagcgcatcgatgcctgcg

SEQ ID NO: 54867 - DNA, 20 bp, Neisseria gonorrhoeae
gagcgcatcgatgcctgcgt

SEQ ID NO: 54868 - DNA, 20 bp, Neisseria gonorrhoeae
aatcatggcgtttttacgcg

SEQ ID NO: 54869 - DNA, 20 bp, Neisseria gonorrhoeae
atcatggcgtttttacgcgc

SEQ ID NO: 54870 - DNA, 20 bp, Neisseria gonorrhoeae
ccaaacgcttggcagccgga

SEQ ID NO: 54871 - DNA, 20 bp, Neisseria gonorrhoeae
gcagccggacaaagcgttgc

SEQ ID NO: 54872 - DNA, 20 bp, Neisseria gonorrhoeae
cccatatccaagttgtcgcc

SEQ ID NO: 54873 - DNA, 20 bp, Neisseria gonorrhoeae
tcgccagcttcttcatctcg

SEQ ID NO: 54874 - DNA, 20 bp, Neisseria gonorrhoeae
ttcatctcgcgcgtggacag

SEQ ID NO: 54875 - DNA, 20 bp, Neisseria gonorrhoeae
gccgcactggaagcccaagg

SEQ ID NO: 54876 - DNA, 20 bp, Neisseria gonorrhoeae
ccgcactggaagcccaaggc

SEQ ID NO: 54877 - DNA, 20 bp, Neisseria gonorrhoeae
tatgggcatctaccggcgtg

SEQ ID NO: 54878 - DNA, 20 bp, Neisseria gonorrhoeae
atgggcatctaccggcgtga

SEQ ID NO: 54879 - DNA, 20 bp, Neisseria gonorrhoeae
tgggcatctaccggcgtgaa

SEQ ID NO: 54880 - DNA, 20 bp, Neisseria gonorrhoeae
tcagacggcatcgtcggcag

SEQ ID NO: 54881 - DNA, 20 bp, Neisseria gonorrhoeae
cagacggcatcgtcggcagt

SEQ ID NO: 54882 - DNA, 20 bp, Neisseria gonorrhoeae
agacggcatcgtcggcagtt

SEQ ID NO: 54883 - DNA, 20 bp, Neisseria gonorrhoeae
cacccaaaacctcgcccgcg

SEQ ID NO: 54884 - DNA, 20 bp, Neisseria gonorrhoeae
cgtcctgttccgtgcagacg

SEQ ID NO: 54885 - DNA, 20 bp, Neisseria gonorrhoeae
ccacaccgcgccaaatctat

SEQ ID NO: 54886 - DNA, 20 bp, Neisseria gonorrhoeae
cacaccgcgccaaatctatt

SEQ ID NO: 54887 - DNA, 20 bp, Neisseria gonorrhoeae
gcagcagtgtttgggcgttc

SEQ ID NO: 54888 - DNA, 20 bp, Neisseria gonorrhoeae
cagcagtgtttgggcgttcc

SEQ ID NO: 54889 - DNA, 20 bp, Neisseria gonorrhoeae
gggcgttccgacaccgcaat

SEQ ID NO: 54890 - DNA, 20 bp, Neisseria gonorrhoeae
gatttggacttggctgtatg

SEQ ID NO: 54891 - DNA, 20 bp, Neisseria gonorrhoeae
ggacttggctgtatgtgtag

SEQ ID NO: 54892 - DNA, 20 bp, Neisseria gonorrhoeae
gacttggctgtatgtgtaga

SEQ ID NO: 54893 - DNA, 20 bp, Neisseria gonorrhoeae
gctgtatgtgtagaggcgtt

SEQ ID NO: 54894 - DNA, 20 bp, Neisseria gonorrhoeae
caccaaatcggcgtattcga

SEQ ID NO: 54895 - DNA, 20 bp, Neisseria gonorrhoeae
aggttgacctcgttgtagcc

SEQ ID NO: 54896 - DNA, 20 bp, Neisseria gonorrhoeae
acctcgttgtagccgtattc

SEQ ID NO: 54897 - DNA, 20 bp, Neisseria gonorrhoeae
tagccgtattcttcggcggc

SEQ ID NO: 54898 - DNA, 20 bp, Neisseria gonorrhoeae
ttcggcggctttggcggctt

SEQ ID NO: 54899 - DNA, 20 bp, Neisseria gonorrhoeae
ggcggctttggcggctttcg

SEQ ID NO: 54900 - DNA, 20 bp, Neisseria gonorrhoeae
tcatcatcggccggcgcacg

SEQ ID NO: 54901 - DNA, 20 bp, Neisseria gonorrhoeae
catcatcggccggcgcacgt

SEQ ID NO: 54902 - DNA, 20 bp, Neisseria gonorrhoeae
atcatcggccggcgcacgtc

SEQ ID NO: 54903 - DNA, 20 bp, Neisseria gonorrhoeae
tccgtcgggggcgcacggga

SEQ ID NO: 54904 - DNA, 20 bp, Neisseria gonorrhoeae
agcggcttgccgtacatcgc

SEQ ID NO: 54905 - DNA, 20 bp, Neisseria gonorrhoeae
tgtgttgttttcaggttcgg

SEQ ID NO: 54906 - DNA, 20 bp, Neisseria gonorrhoeae
gtgttgttttcaggttcggc

SEQ ID NO: 54907 - DNA, 20 bp, Neisseria gonorrhoeae
tgttgttttcaggttcggcg

SEQ ID NO: 54908 - DNA, 20 bp, Neisseria gonorrhoeae
ttttcaggttcggcgggcgt

SEQ ID NO: 54909 - DNA, 20 bp, Neisseria gonorrhoeae
tcaggttcggcgggcgtgga

SEQ ID NO: 54910 - DNA, 20 bp, Neisseria gonorrhoeae
gtacaacgaagttttgggcg

SEQ ID NO: 54911 - DNA, 20 bp, Neisseria gonorrhoeae
tacaacgaagttttgggcgg

SEQ ID NO: 54912 - DNA, 20 bp, Neisseria gonorrhoeae
tgggcggccggttgccaagc

SEQ ID NO: 54913 - DNA, 20 bp, Neisseria gonorrhoeae
gggcggccggttgccaagcg

SEQ ID NO: 54914 - DNA, 20 bp, Neisseria gonorrhoeae
ggcggccggttgccaagcgt

SEQ ID NO: 54915 - DNA, 20 bp, Neisseria gonorrhoeae
gcggcagcggcgcgattgag

SEQ ID NO: 54916 - DNA, 20 bp, Neisseria gonorrhoeae
agcaagacgcaaacatcatc

SEQ ID NO: 54917 - DNA, 20 bp, Neisseria gonorrhoeae
gcggtgcggcatgatgatga

SEQ ID NO: 54918 - DNA, 20 bp, Neisseria gonorrhoeae
gcgtcttgctcaatcgcgcc

SEQ ID NO: 54919 - DNA, 20 bp, Neisseria gonorrhoeae
cgtcttgctcaatcgcgccg

SEQ ID NO: 54920 - DNA, 20 bp, Neisseria gonorrhoeae
ttggcggatttggcgcaaca

SEQ ID NO: 54921 - DNA, 20 bp, Neisseria gonorrhoeae
gcggatttggcgcaacaggg

SEQ ID NO: 54922 - DNA, 20 bp, Neisseria gonorrhoeae
ggcgcaacagggcggtcagg

SEQ ID NO: 54923 - DNA, 20 bp, Neisseria gonorrhoeae
gcgcaacagggcggtcagga

SEQ ID NO: 54924 - DNA, 20 bp, Neisseria gonorrhoeae
cgcgatacggcggacggttt

SEQ ID NO: 54925 - DNA, 20 bp, Neisseria gonorrhoeae
cgcgcttgcgggcgtgaggt

SEQ ID NO: 54926 - DNA, 20 bp, Neisseria gonorrhoeae
cgggcgtgaggtcgggacgc

SEQ ID NO: 54927 - DNA, 20 bp, Neisseria gonorrhoeae
cttgtacatccgccgtggtg

SEQ ID NO: 54928 - DNA, 20 bp, Neisseria gonorrhoeae
tacatccgccgtggtgttgc

SEQ ID NO: 54929 - DNA, 20 bp, Neisseria gonorrhoeae
ccttgcgcgtccctgccgaa

SEQ ID NO: 54930 - DNA, 20 bp, Neisseria gonorrhoeae
gtactttgaagacgaaacgc

SEQ ID NO: 54931 - DNA, 20 bp, Neisseria gonorrhoeae
gaagacgaaacgccgtggtg

SEQ ID NO: 54932 - DNA, 20 bp, Neisseria gonorrhoeae
aagacgaaacgccgtggtgc

SEQ ID NO: 54933 - DNA, 20 bp, Neisseria gonorrhoeae
gtcggacactgcctgggcaa

SEQ ID NO: 54934 - DNA, 20 bp, Neisseria gonorrhoeae
tcggacactgcctgggcaaa

SEQ ID NO: 54935 - DNA, 20 bp, Neisseria gonorrhoeae
acgacggcggttaagccgcc

SEQ ID NO: 54936 - DNA, 20 bp, Neisseria gonorrhoeae
agccgcccgccgatttggtg

SEQ ID NO: 54937 - DNA, 20 bp, Neisseria gonorrhoeae
ggtgcggccctgcccgaaac

SEQ ID NO: 54938 - DNA, 20 bp, Neisseria gonorrhoeae
gtgcggccctgcccgaaact

SEQ ID NO: 54939 - DNA, 20 bp, Neisseria gonorrhoeae
aagggaacacgggcgcggac

SEQ ID NO: 54940 - DNA, 20 bp, Neisseria gonorrhoeae
ttttgttgcaacgctggatt

SEQ ID NO: 54941 - DNA, 20 bp, Neisseria gonorrhoeae
tttgttgcaacgctggattt

SEQ ID NO: 54942 - DNA, 20 bp, Neisseria gonorrhoeae
ttgttgcaacgctggatttt

SEQ ID NO: 54943 - DNA, 20 bp, Neisseria gonorrhoeae
tgttgcaacgctggattttt

SEQ ID NO: 54944 - DNA, 20 bp, Neisseria gonorrhoeae
gttgcaacgctggatttttg

SEQ ID NO: 54945 - DNA, 20 bp, Neisseria gonorrhoeae
cgccgccgaatacgacaatc

SEQ ID NO: 54946 - DNA, 20 bp, Neisseria gonorrhoeae
gaagcataaaaggctggata

SEQ ID NO: 54947 - DNA, 20 bp, Neisseria gonorrhoeae
tcgtattcggcggcgcaacc

SEQ ID NO: 54948 - DNA, 20 bp, Neisseria gonorrhoeae
ggcggcgcaaccattgtttt

SEQ ID NO: 54949 - DNA, 20 bp, Neisseria gonorrhoeae
ccgcatcctttcaggcacat

SEQ ID NO: 54950 - DNA, 20 bp, Neisseria gonorrhoeae
caggcacatgcgcgactggg

SEQ ID NO: 54951 - DNA, 20 bp, Neisseria gonorrhoeae
aggcacatgcgcgactgggc

SEQ ID NO: 54952 - DNA, 20 bp, Neisseria gonorrhoeae
gtcaaggttggaccggatat

SEQ ID NO: 54953 - DNA, 20 bp, Neisseria gonorrhoeae
gaccggatattcagtccgcc

SEQ ID NO: 54954 - DNA, 20 bp, Neisseria gonorrhoeae
gacggcaaagccgtcattgc

SEQ ID NO: 54955 - DNA, 20 bp, Neisseria gonorrhoeae
ccgtttcttccgcacaggca

SEQ ID NO: 54956 - DNA, 20 bp, Neisseria gonorrhoeae
cttccgcacaggcagtccgc

SEQ ID NO: 54957 - DNA, 20 bp, Neisseria gonorrhoeae
ttccgcacaggcagtccgcg

SEQ ID NO: 54958 - DNA, 20 bp, Neisseria gonorrhoeae
cgcacaggcagtccgcgatc

SEQ ID NO: 54959 - DNA, 20 bp, Neisseria gonorrhoeae
cgccctgccgcttcacgcgt

SEQ ID NO: 54960 - DNA, 20 bp, Neisseria gonorrhoeae
acgcgttcgcaggcttcgta

SEQ ID NO: 54961 - DNA, 20 bp, Neisseria gonorrhoeae
gcaggcttcgtaggcatcgt

SEQ ID NO: 54962 - DNA, 20 bp, Neisseria gonorrhoeae
gtaggcatcgtccacttcaa

SEQ ID NO: 54963 - DNA, 20 bp, Neisseria gonorrhoeae
aaccgcgatgtgtccgtagg

SEQ ID NO: 54964 - DNA, 20 bp, Neisseria gonorrhoeae
ggatttgaagtggcagttgc

SEQ ID NO: 54965 - DNA, 20 bp, Neisseria gonorrhoeae
gaagtggcagttgcggcaac

SEQ ID NO: 54966 - DNA, 20 bp, Neisseria gonorrhoeae
aagtggcagttgcggcaacg

SEQ ID NO: 54967 - DNA, 20 bp, Neisseria gonorrhoeae
cggcaacggtacatcacgct

SEQ ID NO: 54968 - DNA, 20 bp, Neisseria gonorrhoeae
ggttatcggacggcagctcc

SEQ ID NO: 54969 - DNA, 20 bp, Neisseria gonorrhoeae
ggaaggcaggctgccggaca

SEQ ID NO: 54970 - DNA, 20 bp, Neisseria gonorrhoeae
gaaggcaggctgccggacac

SEQ ID NO: 54971 - DNA, 20 bp, Neisseria gonorrhoeae
gtagatttcgcctgtggtgc

SEQ ID NO: 54972 - DNA, 20 bp, Neisseria gonorrhoeae
cgcctgtggtgcggtcgaag

SEQ ID NO: 54973 - DNA, 20 bp, Neisseria gonorrhoeae
gcctgtggtgcggtcgaaga

SEQ ID NO: 54974 - DNA, 20 bp, Neisseria gonorrhoeae
tcttcaatgatggtgggtgc

SEQ ID NO: 54975 - DNA, 20 bp, Neisseria gonorrhoeae
aatgatggtgggtgcggcct

SEQ ID NO: 54976 - DNA, 20 bp, Neisseria gonorrhoeae
agcggcggtgtcggcatcgg

SEQ ID NO: 54977 - DNA, 20 bp, Neisseria gonorrhoeae
aagacaactgcttcatcggc

SEQ ID NO: 54978 - DNA, 20 bp, Neisseria gonorrhoeae
cgccgcaatgccgaaacttt

SEQ ID NO: 54979 - DNA, 20 bp, Neisseria gonorrhoeae
cggcattgcggcggaacgcg

SEQ ID NO: 54980 - DNA, 20 bp, Neisseria gonorrhoeae
ggcattgcggcggaacgcgt

SEQ ID NO: 54981 - DNA, 20 bp, Neisseria gonorrhoeae
cggcggaacgcgtgtttgcg

SEQ ID NO: 54982 - DNA, 20 bp, Neisseria gonorrhoeae
gcgatgtacgactgggtggg

SEQ ID NO: 54983 - DNA, 20 bp, Neisseria gonorrhoeae
actttcgcacccgtccgcaa

SEQ ID NO: 54984 - DNA, 20 bp, Neisseria gonorrhoeae
cgcacccgtccgcaaagcac

SEQ ID NO: 54985 - DNA, 20 bp, Neisseria gonorrhoeae
gcacccgtccgcaaagcacg

SEQ ID NO: 54986 - DNA, 20 bp, Neisseria gonorrhoeae
gcggacgggtgcgaaagtca

SEQ ID NO: 54987 - DNA, 20 bp, Neisseria gonorrhoeae
cggacgggtgcgaaagtcaa

SEQ ID NO: 54988 - DNA, 20 bp, Neisseria gonorrhoeae
tgccgatttgggcgtgccgc

SEQ ID NO: 54989 - DNA, 20 bp, Neisseria gonorrhoeae
gccgatttgggcgtgccgcg

SEQ ID NO: 54990 - DNA, 20 bp, Neisseria gonorrhoeae
ccgatttgggcgtgccgcgc

SEQ ID NO: 54991 - DNA, 20 bp, Neisseria gonorrhoeae
cgcggctgccgatttgccgc

SEQ ID NO: 54992 - DNA, 20 bp, Neisseria gonorrhoeae
gccgctgccgattccgccgg

SEQ ID NO: 54993 - DNA, 20 bp, Neisseria gonorrhoeae
accataacccttatggagtt

SEQ ID NO: 54994 - DNA, 20 bp, Neisseria gonorrhoeae
tggagttgagtatgtacgcg

SEQ ID NO: 54995 - DNA, 20 bp, Neisseria gonorrhoeae
agtatgtacgcggtcgtaaa

SEQ ID NO: 54996 - DNA, 20 bp, Neisseria gonorrhoeae
atactgtttgccgccggttt

SEQ ID NO: 54997 - DNA, 20 bp, Neisseria gonorrhoeae
tactgtttgccgccggtttt

SEQ ID NO: 54998 - DNA, 20 bp, Neisseria gonorrhoeae
aacctcgggctttccagcgc

SEQ ID NO: 54999 - DNA, 20 bp, Neisseria gonorrhoeae
ccagcgcggatattctggca

SEQ ID NO: 55000 - DNA, 20 bp, Neisseria gonorrhoeae
cagcgcggatattctggcaa

SEQ ID NO: 55001 - DNA, 20 bp, Neisseria gonorrhoeae
tggcaaaactgatactcgaa

SEQ ID NO: 55002 - DNA, 20 bp, Neisseria gonorrhoeae
ggcttcgagtatcagttttg

SEQ ID NO: 55003 - DNA, 20 bp, Neisseria gonorrhoeae
cttcgccgttcggctaccgt

SEQ ID NO: 55004 - DNA, 20 bp, Neisseria gonorrhoeae
ttcgccgttcggctaccgta

SEQ ID NO: 55005 - DNA, 20 bp, Neisseria gonorrhoeae
gccgttcggctaccgtatgc

SEQ ID NO: 55006 - DNA, 20 bp, Neisseria gonorrhoeae
ggctaccgtatgcaccccat

SEQ ID NO: 55007 - DNA, 20 bp, Neisseria gonorrhoeae
gggacagtctgcacggaagc

SEQ ID NO: 55008 - DNA, 20 bp, Neisseria gonorrhoeae
ggacagtctgcacggaagcg

SEQ ID NO: 55009 - DNA, 20 bp, Neisseria gonorrhoeae
tcgccgatacggtttggagc

SEQ ID NO: 55010 - DNA, 20 bp, Neisseria gonorrhoeae
cgccgatacggtttggagcc

SEQ ID NO: 55011 - DNA, 20 bp, Neisseria gonorrhoeae
gccgatacggtttggagccg

SEQ ID NO: 55012 - DNA, 20 bp, Neisseria gonorrhoeae
cagcagtgggaagaacgctg

SEQ ID NO: 55013 - DNA, 20 bp, Neisseria gonorrhoeae
gcaccgctttacgaagccgt

SEQ ID NO: 55014 - DNA, 20 bp, Neisseria gonorrhoeae
acgaagccgtccgcaccggc

SEQ ID NO: 55015 - DNA, 20 bp, Neisseria gonorrhoeae
cgaagccgtccgcaccggca

SEQ ID NO: 55016 - DNA, 20 bp, Neisseria gonorrhoeae
gattttgccggtgcggacgg

SEQ ID NO: 55017 - DNA, 20 bp, Neisseria gonorrhoeae
aaaccaattttcagacggca

SEQ ID NO: 55018 - DNA, 20 bp, Neisseria gonorrhoeae
tcagacggcatttgtccctt

SEQ ID NO: 55019 - DNA, 20 bp, Neisseria gonorrhoeae
cagacggcatttgtccctta

SEQ ID NO: 55020 - DNA, 20 bp, Neisseria gonorrhoeae
agacggcatttgtcccttaa

SEQ ID NO: 55021 - DNA, 20 bp, Neisseria gonorrhoeae
gtcccttaaaacacgttttt

SEQ ID NO: 55022 - DNA, 20 bp, Neisseria gonorrhoeae
tttccgggcaaagcaaaaac

SEQ ID NO: 55023 - DNA, 20 bp, Neisseria gonorrhoeae
ttccgggcaaagcaaaaacc

SEQ ID NO: 55024 - DNA, 20 bp, Neisseria gonorrhoeae
tccgggcaaagcaaaaaccc

SEQ ID NO: 55025 - DNA, 20 bp, Neisseria gonorrhoeae
ccgggcaaagcaaaaacccc

SEQ ID NO: 55026 - DNA, 20 bp, Neisseria gonorrhoeae
cgggcaaagcaaaaaccccc

SEQ ID NO: 55027 - DNA, 20 bp, Neisseria gonorrhoeae
gcctgacccactgcctgtcc

SEQ ID NO: 55028 - DNA, 20 bp, Neisseria gonorrhoeae
cctgacccactgcctgtccc

SEQ ID NO: 55029 - DNA, 20 bp, Neisseria gonorrhoeae
aactgacccccgtcatccgt

SEQ ID NO: 55030 - DNA, 20 bp, Neisseria gonorrhoeae
aggcgggcgcgtgcatcggt

SEQ ID NO: 55031 - DNA, 20 bp, Neisseria gonorrhoeae
atcatttcgcgcatcatcag

SEQ ID NO: 55032 - DNA, 20 bp, Neisseria gonorrhoeae
cgcgcatcatcagcgtgttg

SEQ ID NO: 55033 - DNA, 20 bp, Neisseria gonorrhoeae
gcgcatcatcagcgtgttgt

SEQ ID NO: 55034 - DNA, 20 bp, Neisseria gonorrhoeae
agcgcggattttttctgcca

SEQ ID NO: 55035 - DNA, 20 bp, Neisseria gonorrhoeae
tttctgccacgttttaaacc

SEQ ID NO: 55036 - DNA, 20 bp, Neisseria gonorrhoeae
ttctgccacgttttaaacct

SEQ ID NO: 55037 - DNA, 20 bp, Neisseria gonorrhoeae
tctgccacgttttaaacctc

SEQ ID NO: 55038 - DNA, 20 bp, Neisseria gonorrhoeae
ctgccacgttttaaacctcc

SEQ ID NO: 55039 - DNA, 20 bp, Neisseria gonorrhoeae
ccaacagcctgtggcggcgc

SEQ ID NO: 55040 - DNA, 20 bp, Neisseria gonorrhoeae
ggccaccctgcaatcgctcg

SEQ ID NO: 55041 - DNA, 20 bp, Neisseria gonorrhoeae
aacttgattttgcgccaaac

SEQ ID NO: 55042 - DNA, 20 bp, Neisseria gonorrhoeae
attttgcgccaaaccggcct

SEQ ID NO: 55043 - DNA, 20 bp, Neisseria gonorrhoeae
tgcgccaaaccggcctgctg

SEQ ID NO: 55044 - DNA, 20 bp, Neisseria gonorrhoeae
cgcccaccgaagccatcggc

SEQ ID NO: 55045 - DNA, 20 bp, Neisseria gonorrhoeae
gcccaccgaagccatcggca

SEQ ID NO: 55046 - DNA, 20 bp, Neisseria gonorrhoeae
ggtgggcgaaatcagcttgg

SEQ ID NO: 55047 - DNA, 20 bp, Neisseria gonorrhoeae
ggcagccattcgatgacggc

SEQ ID NO: 55048 - DNA, 20 bp, Neisseria gonorrhoeae
gatgacggcggcggtgtggg

SEQ ID NO: 55049 - DNA, 20 bp, Neisseria gonorrhoeae
gatagaacaacgcggcggca

SEQ ID NO: 55050 - DNA, 20 bp, Neisseria gonorrhoeae
atcgaaatcaccgtccccga

SEQ ID NO: 55051 - DNA, 20 bp, Neisseria gonorrhoeae
gatgccggcttcggggacgg

SEQ ID NO: 55052 - DNA, 20 bp, Neisseria gonorrhoeae
atgccggcttcggggacggt

SEQ ID NO: 55053 - DNA, 20 bp, Neisseria gonorrhoeae
ggggacggtgatttcgatga

SEQ ID NO: 55054 - DNA, 20 bp, Neisseria gonorrhoeae
tcgtcggcactcaaatcgaa

SEQ ID NO: 55055 - DNA, 20 bp, Neisseria gonorrhoeae
tcttgtccaatatttatttg

SEQ ID NO: 55056 - DNA, 20 bp, Neisseria gonorrhoeae
cttgtccaatatttatttgg

SEQ ID NO: 55057 - DNA, 20 bp, Neisseria gonorrhoeae
ttgtccaatatttatttggg

SEQ ID NO: 55058 - DNA, 20 bp, Neisseria gonorrhoeae
tccaatatttatttggggtt

SEQ ID NO: 55059 - DNA, 20 bp, Neisseria gonorrhoeae
gaatcggctcggcgagcagc

SEQ ID NO: 55060 - DNA, 20 bp, Neisseria gonorrhoeae
aatcggctcggcgagcagct

SEQ ID NO: 55061 - DNA, 20 bp, Neisseria gonorrhoeae
ggttcgagcttgttcagacc

SEQ ID NO: 55062 - DNA, 20 bp, Neisseria gonorrhoeae
gagcttgttcagaccgcgca

SEQ ID NO: 55063 - DNA, 20 bp, Neisseria gonorrhoeae
ttcagaccgcgcaggtgggc

SEQ ID NO: 55064 - DNA, 20 bp, Neisseria gonorrhoeae
gccgatgatttcggcaagtt

SEQ ID NO: 55065 - DNA, 20 bp, Neisseria gonorrhoeae
ccgatgatttcggcaagttt

SEQ ID NO: 55066 - DNA, 20 bp, Neisseria gonorrhoeae
cggcaagtttgggcaggatg

SEQ ID NO: 55067 - DNA, 20 bp, Neisseria gonorrhoeae
ggcaagtttgggcaggatga

SEQ ID NO: 55068 - DNA, 20 bp, Neisseria gonorrhoeae
gggcaggatgacggtttcgc

SEQ ID NO: 55069 - DNA, 20 bp, Neisseria gonorrhoeae
ggtttctgctcgtgcggcag

SEQ ID NO: 55070 - DNA, 20 bp, Neisseria gonorrhoeae
ctgctcgtgcggcagggcaa

SEQ ID NO: 55071 - DNA, 20 bp, Neisseria gonorrhoeae
tgctcgtgcggcagggcaat

SEQ ID NO: 55072 - DNA, 20 bp, Neisseria gonorrhoeae
agccctaccgaaaccgactt

SEQ ID NO: 55073 - DNA, 20 bp, Neisseria gonorrhoeae
ccggcaaacgcgcccttgtt

SEQ ID NO: 55074 - DNA, 20 bp, Neisseria gonorrhoeae
ggtgcggacaggcgcgccga

SEQ ID NO: 55075 - DNA, 20 bp, Neisseria gonorrhoeae
gagcgcgtggacggcttctt

SEQ ID NO: 55076 - DNA, 20 bp, Neisseria gonorrhoeae
agcgcgtggacggcttcttc

SEQ ID NO: 55077 - DNA, 20 bp, Neisseria gonorrhoeae
ttcaaaggcgggaaccatta

SEQ ID NO: 55078 - DNA, 20 bp, Neisseria gonorrhoeae
aaaggcgggaaccattacgc

SEQ ID NO: 55079 - DNA, 20 bp, Neisseria gonorrhoeae
cgcgcctggtcgtagatttt

SEQ ID NO: 55080 - DNA, 20 bp, Neisseria gonorrhoeae
tgcggatggtactttccgcg

SEQ ID NO: 55081 - DNA, 20 bp, Neisseria gonorrhoeae
gcggatggtactttccgcgc

SEQ ID NO: 55082 - DNA, 20 bp, Neisseria gonorrhoeae
cggatggtactttccgcgcc

SEQ ID NO: 55083 - DNA, 20 bp, Neisseria gonorrhoeae
ccgcgccgacggcggcgttt

SEQ ID NO: 55084 - DNA, 20 bp, Neisseria gonorrhoeae
tgcatcactgcctgctggcg

SEQ ID NO: 55085 - DNA, 20 bp, Neisseria gonorrhoeae
gcatcactgcctgctggcgg

SEQ ID NO: 55086 - DNA, 20 bp, Neisseria gonorrhoeae
catcactgcctgctggcgga

SEQ ID NO: 55087 - DNA, 20 bp, Neisseria gonorrhoeae
ttcggcaatgatgttgtcgg

SEQ ID NO: 55088 - DNA, 20 bp, Neisseria gonorrhoeae
tcggcaatgatgttgtcggc

SEQ ID NO: 55089 - DNA, 20 bp, Neisseria gonorrhoeae
tgcgggtgcggcttcttttt

SEQ ID NO: 55090 - DNA, 20 bp, Neisseria gonorrhoeae
tttttgcgccgtggcggcag

SEQ ID NO: 55091 - DNA, 20 bp, Neisseria gonorrhoeae
ttgcgccgtggcggcagctt

SEQ ID NO: 55092 - DNA, 20 bp, Neisseria gonorrhoeae
tgcgccgtggcggcagcttt

SEQ ID NO: 55093 - DNA, 20 bp, Neisseria gonorrhoeae
gcgccgtggcggcagctttg

SEQ ID NO: 55094 - DNA, 20 bp, Neisseria gonorrhoeae
gcagccgccgtccgccttgt

SEQ ID NO: 55095 - DNA, 20 bp, Neisseria gonorrhoeae
cagccgccgtccgccttgtt

SEQ ID NO: 55096 - DNA, 20 bp, Neisseria gonorrhoeae
ttcggtttccatacggacgt

SEQ ID NO: 55097 - DNA, 20 bp, Neisseria gonorrhoeae
ggtttccatacggacgttgt

SEQ ID NO: 55098 - DNA, 20 bp, Neisseria gonorrhoeae
ccatacggacgttgtgcgct

SEQ ID NO: 55099 - DNA, 20 bp, Neisseria gonorrhoeae
cgttactgcaaaacaggcag

SEQ ID NO: 55100 - DNA, 20 bp, Neisseria gonorrhoeae
gttactgcaaaacaggcagg

SEQ ID NO: 55101 - DNA, 20 bp, Neisseria gonorrhoeae
ctgcaaaacaggcaggtcga

SEQ ID NO: 55102 - DNA, 20 bp, Neisseria gonorrhoeae
tgcggattcggacgcgccct

SEQ ID NO: 55103 - DNA, 20 bp, Neisseria gonorrhoeae
ggacgcgccctgcgcaccgc

SEQ ID NO: 55104 - DNA, 20 bp, Neisseria gonorrhoeae
gctccaaggttttcagacgg

SEQ ID NO: 55105 - DNA, 20 bp, Neisseria gonorrhoeae
tcagacggcatttgccgcag

SEQ ID NO: 55106 - DNA, 20 bp, Neisseria gonorrhoeae
cagacggcatttgccgcagg

SEQ ID NO: 55107 - DNA, 20 bp, Neisseria gonorrhoeae
agacggcatttgccgcaggg

SEQ ID NO: 55108 - DNA, 20 bp, Neisseria gonorrhoeae
gccgcagggtgcaaaacact

SEQ ID NO: 55109 - DNA, 20 bp, Neisseria gonorrhoeae
atcgattcgatacgcggcaa

SEQ ID NO: 55110 - DNA, 20 bp, Neisseria gonorrhoeae
gatacgcggcaaacaccgcc

SEQ ID NO: 55111 - DNA, 20 bp, Neisseria gonorrhoeae
ccgaaatcaaaaaggcaagc

SEQ ID NO: 55112 - DNA, 20 bp, Neisseria gonorrhoeae
cctttttgatttcggcaatg

SEQ ID NO: 55113 - DNA, 20 bp, Neisseria gonorrhoeae
ttgatttcggcaatgacggc

SEQ ID NO: 55114 - DNA, 20 bp, Neisseria gonorrhoeae
ccgatatgcttgccgccacg

SEQ ID NO: 55115 - DNA, 20 bp, Neisseria gonorrhoeae
ccgccacgcccgaaaccgaa

SEQ ID NO: 55116 - DNA, 20 bp, Neisseria gonorrhoeae
gaggtcggtttcggtttcgg

SEQ ID NO: 55117 - DNA, 20 bp, Neisseria gonorrhoeae
cggtttcgggcgtggcggca

SEQ ID NO: 55118 - DNA, 20 bp, Neisseria gonorrhoeae
ggtttcgggcgtggcggcaa

SEQ ID NO: 55119 - DNA, 20 bp, Neisseria gonorrhoeae
cagacgaatgtttcgatttc

SEQ ID NO: 55120 - DNA, 20 bp, Neisseria gonorrhoeae
agacgaatgtttcgatttcg

SEQ ID NO: 55121 - DNA, 20 bp, Neisseria gonorrhoeae
cgatttcgtcctacccgttc

SEQ ID NO: 55122 - DNA, 20 bp, Neisseria gonorrhoeae
gatttcgtcctacccgttcc

SEQ ID NO: 55123 - DNA, 20 bp, Neisseria gonorrhoeae
cgtcctacccgttccgctaa

SEQ ID NO: 55124 - DNA, 20 bp, Neisseria gonorrhoeae
caaaaaggcgacgttttact

SEQ ID NO: 55125 - DNA, 20 bp, Neisseria gonorrhoeae
aaaaaggcgacgttttactg

SEQ ID NO: 55126 - DNA, 20 bp, Neisseria gonorrhoeae
tactgttcgggccggaaacg

SEQ ID NO: 55127 - DNA, 20 bp, Neisseria gonorrhoeae
actgttcgggccggaaacgc

SEQ ID NO: 55128 - DNA, 20 bp, Neisseria gonorrhoeae
ctgttcgggccggaaacgcg

SEQ ID NO: 55129 - DNA, 20 bp, Neisseria gonorrhoeae
cggcggagaccgctacgata

SEQ ID NO: 55130 - DNA, 20 bp, Neisseria gonorrhoeae
accgccgcccacaaaaccct

SEQ ID NO: 55131 - DNA, 20 bp, Neisseria gonorrhoeae
ccgccgcccacaaaaccctg

SEQ ID NO: 55132 - DNA, 20 bp, Neisseria gonorrhoeae
ttggtgttggttacgcgcac

SEQ ID NO: 55133 - DNA, 20 bp, Neisseria gonorrhoeae
tggtgttggttacgcgcaca

SEQ ID NO: 55134 - DNA, 20 bp, Neisseria gonorrhoeae
cagaagaagatgtcaaacgc

SEQ ID NO: 55135 - DNA, 20 bp, Neisseria gonorrhoeae
ttttgccgattcccggagcg

SEQ ID NO: 55136 - DNA, 20 bp, Neisseria gonorrhoeae
tttgccgattcccggagcgg

SEQ ID NO: 55137 - DNA, 20 bp, Neisseria gonorrhoeae
ttgccgattcccggagcgga

SEQ ID NO: 55138 - DNA, 20 bp, Neisseria gonorrhoeae
tgccgattcccggagcggag

SEQ ID NO: 55139 - DNA, 20 bp, Neisseria gonorrhoeae
gccgaaaaaggttgggaact

SEQ ID NO: 55140 - DNA, 20 bp, Neisseria gonorrhoeae
ccgaaaaaggttgggaactg

SEQ ID NO: 55141 - DNA, 20 bp, Neisseria gonorrhoeae
ggaactggcggcaatggcgg

SEQ ID NO: 55142 - DNA, 20 bp, Neisseria gonorrhoeae
tcggtcgtgtgggcgtttgc

SEQ ID NO: 55143 - DNA, 20 bp, Neisseria gonorrhoeae
cggtcgtgtgggcgtttgcc

SEQ ID NO: 55144 - DNA, 20 bp, Neisseria gonorrhoeae
atggttacggtgcgcgccca

SEQ ID NO: 55145 - DNA, 20 bp, Neisseria gonorrhoeae
tggttacggtgcgcgcccaa

SEQ ID NO: 55146 - DNA, 20 bp, Neisseria gonorrhoeae
cggtgcgcgcccaaatgcgg

SEQ ID NO: 55147 - DNA, 20 bp, Neisseria gonorrhoeae
gtgcagcttcatcgtcaaca

SEQ ID NO: 55148 - DNA, 20 bp, Neisseria gonorrhoeae
acgatgaagctgcacgaatg

SEQ ID NO: 55149 - DNA, 20 bp, Neisseria gonorrhoeae
ctcagcgaacacgtcgagtg

SEQ ID NO: 55150 - DNA, 20 bp, Neisseria gonorrhoeae
ggacggcatcggttcagtcg

SEQ ID NO: 55151 - DNA, 20 bp, Neisseria gonorrhoeae
agtcgtgctgccactcgacg

SEQ ID NO: 55152 - DNA, 20 bp, Neisseria gonorrhoeae
gctgaggaagccgccgctct

SEQ ID NO: 55153 - DNA, 20 bp, Neisseria gonorrhoeae
cgcctgcggcgaccgcgtcc

SEQ ID NO: 55154 - DNA, 20 bp, Neisseria gonorrhoeae
gcctgcggcgaccgcgtccg

SEQ ID NO: 55155 - DNA, 20 bp, Neisseria gonorrhoeae
tttgcgggtgctggcttcgt

SEQ ID NO: 55156 - DNA, 20 bp, Neisseria gonorrhoeae
ttgcgggtgctggcttcgta

SEQ ID NO: 55157 - DNA, 20 bp, Neisseria gonorrhoeae
tgcgggtgctggcttcgtag

SEQ ID NO: 55158 - DNA, 20 bp, Neisseria gonorrhoeae
gcgcttgagcgcggccacgc

SEQ ID NO: 55159 - DNA, 20 bp, Neisseria gonorrhoeae
cgcttgagcgcggccacgcc

SEQ ID NO: 55160 - DNA, 20 bp, Neisseria gonorrhoeae
agcgcggccacgccgaacag

SEQ ID NO: 55161 - DNA, 20 bp, Neisseria gonorrhoeae
ggcgtggccgcgctcaagcg

SEQ ID NO: 55162 - DNA, 20 bp, Neisseria gonorrhoeae
cggacaccacctgatcgagc

SEQ ID NO: 55163 - DNA, 20 bp, Neisseria gonorrhoeae
gcgtttatggcgggcgcggt

SEQ ID NO: 55164 - DNA, 20 bp, Neisseria gonorrhoeae
atggcgggcgcggtcggctt

SEQ ID NO: 55165 - DNA, 20 bp, Neisseria gonorrhoeae
tggcgggcgcggtcggcttt

SEQ ID NO: 55166 - DNA, 20 bp, Neisseria gonorrhoeae
gcggcgggcctctattacgc

SEQ ID NO: 55167 - DNA, 20 bp, Neisseria gonorrhoeae
cggcgggcctctattacgcc

SEQ ID NO: 55168 - DNA, 20 bp, Neisseria gonorrhoeae
ccaacgcgccgtaatgcgtc

SEQ ID NO: 55169 - DNA, 20 bp, Neisseria gonorrhoeae
gtcatcactggcccacaagt

SEQ ID NO: 55170 - DNA, 20 bp, Neisseria gonorrhoeae
tcatcactggcccacaagtc

SEQ ID NO: 55171 - DNA, 20 bp, Neisseria gonorrhoeae
ttgttgccggcggacttgtg

SEQ ID NO: 55172 - DNA, 20 bp, Neisseria gonorrhoeae
ttgccggcggacttgtgggc

SEQ ID NO: 55173 - DNA, 20 bp, Neisseria gonorrhoeae
catcgaatcaggcagccaga

SEQ ID NO: 55174 - DNA, 20 bp, Neisseria gonorrhoeae
tgccgatttacccatcgcac

SEQ ID NO: 55175 - DNA, 20 bp, Neisseria gonorrhoeae
acccatcgcaccgacaaaca

SEQ ID NO: 55176 - DNA, 20 bp, Neisseria gonorrhoeae
cccatcgcaccgacaaacag

SEQ ID NO: 55177 - DNA, 20 bp, Neisseria gonorrhoeae
gattaccgtaacctgtttgc

SEQ ID NO: 55178 - DNA, 20 bp, Neisseria gonorrhoeae
gccctccccttccgtcttga

SEQ ID NO: 55179 - DNA, 20 bp, Neisseria gonorrhoeae
ccctccccttccgtcttgag

SEQ ID NO: 55180 - DNA, 20 bp, Neisseria gonorrhoeae
cgtcttgaggccgtctgaaa

SEQ ID NO: 55181 - DNA, 20 bp, Neisseria gonorrhoeae
aggccgtctgaaacttcgct

SEQ ID NO: 55182 - DNA, 20 bp, Neisseria gonorrhoeae
gctttcttcggcagattcga

SEQ ID NO: 55183 - DNA, 20 bp, Neisseria gonorrhoeae
gcatctggtgctgaccttct

SEQ ID NO: 55184 - DNA, 20 bp, Neisseria gonorrhoeae
catctggtgctgaccttctg

SEQ ID NO: 55185 - DNA, 20 bp, Neisseria gonorrhoeae
tgcgtgagcgcgatgatttg

SEQ ID NO: 55186 - DNA, 20 bp, Neisseria gonorrhoeae
ggatgctgatgcaggcggag

SEQ ID NO: 55187 - DNA, 20 bp, Neisseria gonorrhoeae
gatgctgatgcaggcggagt

SEQ ID NO: 55188 - DNA, 20 bp, Neisseria gonorrhoeae
gaggccgtctgaacgccctc

SEQ ID NO: 55189 - DNA, 20 bp, Neisseria gonorrhoeae
aggccgtctgaacgccctcc

SEQ ID NO: 55190 - DNA, 20 bp, Neisseria gonorrhoeae
tccagtttggacggcaggct

SEQ ID NO: 55191 - DNA, 20 bp, Neisseria gonorrhoeae
ggacggcaggctttccgcat

SEQ ID NO: 55192 - DNA, 20 bp, Neisseria gonorrhoeae
agacggcctcaaaccgcctc

SEQ ID NO: 55193 - DNA, 20 bp, Neisseria gonorrhoeae
atgtccgtggcagatttgtt

SEQ ID NO: 55194 - DNA, 20 bp, Neisseria gonorrhoeae
tgtccgtggcagatttgttc

SEQ ID NO: 55195 - DNA, 20 bp, Neisseria gonorrhoeae
ccgcacacgcccagccgcgc

SEQ ID NO: 55196 - DNA, 20 bp, Neisseria gonorrhoeae
cgcacacgcccagccgcgct

SEQ ID NO: 55197 - DNA, 20 bp, Neisseria gonorrhoeae
gacaccattgtgccgctgtt

SEQ ID NO: 55198 - DNA, 20 bp, Neisseria gonorrhoeae
cgccagttttttcagcaccc

SEQ ID NO: 55199 - DNA, 20 bp, Neisseria gonorrhoeae
tttcagcacccggttgcttt

SEQ ID NO: 55200 - DNA, 20 bp, Neisseria gonorrhoeae
ttcagcacccggttgctttt

SEQ ID NO: 55201 - DNA, 20 bp, Neisseria gonorrhoeae
tcagcacccggttgcttttt

SEQ ID NO: 55202 - DNA, 20 bp, Neisseria gonorrhoeae
cagcacccggttgctttttt

SEQ ID NO: 55203 - DNA, 20 bp, Neisseria gonorrhoeae
gcatccggactggtcaacgc

SEQ ID NO: 55204 - DNA, 20 bp, Neisseria gonorrhoeae
ggcaggacaattcctgttcg

SEQ ID NO: 55205 - DNA, 20 bp, Neisseria gonorrhoeae
tcctgccgaaccgcctgcgt

SEQ ID NO: 55206 - DNA, 20 bp, Neisseria gonorrhoeae
accagtccggatgccaagcc

SEQ ID NO: 55207 - DNA, 20 bp, Neisseria gonorrhoeae
gtgtgtggggacttgggcgg

SEQ ID NO: 55208 - DNA, 20 bp, Neisseria gonorrhoeae
ccggcggcaacaacgccgcc

SEQ ID NO: 55209 - DNA, 20 bp, Neisseria gonorrhoeae
tgactgcttctccgaggctt

SEQ ID NO: 55210 - DNA, 20 bp, Neisseria gonorrhoeae
gactgcttctccgaggcttt

SEQ ID NO: 55211 - DNA, 20 bp, Neisseria gonorrhoeae
actgcttctccgaggctttg

SEQ ID NO: 55212 - DNA, 20 bp, Neisseria gonorrhoeae
tccgaggctttgtccgtgtg

SEQ ID NO: 55213 - DNA, 20 bp, Neisseria gonorrhoeae
ctcggctcgtacatcggcgg

SEQ ID NO: 55214 - DNA, 20 bp, Neisseria gonorrhoeae
cacaattcggtgactacggc

SEQ ID NO: 55215 - DNA, 20 bp, Neisseria gonorrhoeae
ggtgactacggctggatgtg

SEQ ID NO: 55216 - DNA, 20 bp, Neisseria gonorrhoeae
tgtaatcacgatgccgccga

SEQ ID NO: 55217 - DNA, 20 bp, Neisseria gonorrhoeae
agcccaccgaaaccaatccc

SEQ ID NO: 55218 - DNA, 20 bp, Neisseria gonorrhoeae
tatcccgtcattctcgcgca

SEQ ID NO: 55219 - DNA, 20 bp, Neisseria gonorrhoeae
ctgtgccggtttgagccggt

SEQ ID NO: 55220 - DNA, 20 bp, Neisseria gonorrhoeae
gagccggtgaggttggtggc

SEQ ID NO: 55221 - DNA, 20 bp, Neisseria gonorrhoeae
agccggtgaggttggtggcg

SEQ ID NO: 55222 - DNA, 20 bp, Neisseria gonorrhoeae
cccgacctgaacaaagccgt

SEQ ID NO: 55223 - DNA, 20 bp, Neisseria gonorrhoeae
cgccacaaacaactgggact

SEQ ID NO: 55224 - DNA, 20 bp, Neisseria gonorrhoeae
tggacgctgctgcccgaagc

SEQ ID NO: 55225 - DNA, 20 bp, Neisseria gonorrhoeae
gggcagcagcgtccagaagt

SEQ ID NO: 55226 - DNA, 20 bp, Neisseria gonorrhoeae
tttgtggcggaacgcatatt

SEQ ID NO: 55227 - DNA, 20 bp, Neisseria gonorrhoeae
tcctgcttccgagaccgaag

SEQ ID NO: 55228 - DNA, 20 bp, Neisseria gonorrhoeae
cgagaccgaagcggcttccc

SEQ ID NO: 55229 - DNA, 20 bp, Neisseria gonorrhoeae
ccaagtacaggcctcggaag

SEQ ID NO: 55230 - DNA, 20 bp, Neisseria gonorrhoeae
cgaggcctgtacttgggaag

SEQ ID NO: 55231 - DNA, 20 bp, Neisseria gonorrhoeae
ggaagccgcttcggtctcgg

SEQ ID NO: 55232 - DNA, 20 bp, Neisseria gonorrhoeae
aatgctgcgctgctgggcag

SEQ ID NO: 55233 - DNA, 20 bp, Neisseria gonorrhoeae
tgggacggacgtgccgccga

SEQ ID NO: 55234 - DNA, 20 bp, Neisseria gonorrhoeae
gggacggacgtgccgccgat

SEQ ID NO: 55235 - DNA, 20 bp, Neisseria gonorrhoeae
ggacggacgtgccgccgatg

SEQ ID NO: 55236 - DNA, 20 bp, Neisseria gonorrhoeae
aggaacaggctggcgggcct

SEQ ID NO: 55237 - DNA, 20 bp, Neisseria gonorrhoeae
gaaggattccgccgcgctgc

SEQ ID NO: 55238 - DNA, 20 bp, Neisseria gonorrhoeae
aaggattccgccgcgctgcg

SEQ ID NO: 55239 - DNA, 20 bp, Neisseria gonorrhoeae
cgccgcgctgcgggagccgc

SEQ ID NO: 55240 - DNA, 20 bp, Neisseria gonorrhoeae
cttgccagaagcgtttgcct

SEQ ID NO: 55241 - DNA, 20 bp, Neisseria gonorrhoeae
ttgccagaagcgtttgcctg

SEQ ID NO: 55242 - DNA, 20 bp, Neisseria gonorrhoeae
gtccacttgggtaagcaggt

SEQ ID NO: 55243 - DNA, 20 bp, Neisseria gonorrhoeae
ggtaagcaggtggtgcagtc

SEQ ID NO: 55244 - DNA, 20 bp, Neisseria gonorrhoeae
cgtggaagagggtgaggatt

SEQ ID NO: 55245 - DNA, 20 bp, Neisseria gonorrhoeae
gtggaagagggtgaggattt

SEQ ID NO: 55246 - DNA, 20 bp, Neisseria gonorrhoeae
cgtcgtggcttaaacgcgct

SEQ ID NO: 55247 - DNA, 20 bp, Neisseria gonorrhoeae
ggtgatgccggtcagacgct

SEQ ID NO: 55248 - DNA, 20 bp, Neisseria gonorrhoeae
gcccagccggtgtgcgtttg

SEQ ID NO: 55249 - DNA, 20 bp, Neisseria gonorrhoeae
gacaacaacagctacaaaat

SEQ ID NO: 55250 - DNA, 20 bp, Neisseria gonorrhoeae
cccagtcggacagcgcgttg

SEQ ID NO: 55251 - DNA, 20 bp, Neisseria gonorrhoeae
acgacggatacgcccacgcc

SEQ ID NO: 55252 - DNA, 20 bp, Neisseria gonorrhoeae
tgtagctgttgttgtcgaat

SEQ ID NO: 55253 - DNA, 20 bp, Neisseria gonorrhoeae
gtagctgttgttgtcgaatt

SEQ ID NO: 55254 - DNA, 20 bp, Neisseria gonorrhoeae
ccgccccgaccaacggcgcg

SEQ ID NO: 55255 - DNA, 20 bp, Neisseria gonorrhoeae
ccgccgtattgcattatttc

SEQ ID NO: 55256 - DNA, 20 bp, Neisseria gonorrhoeae
cggaaataatgcaatacggc

SEQ ID NO: 55257 - DNA, 20 bp, Neisseria gonorrhoeae
gtcggggcggtaacgacgcg

SEQ ID NO: 55258 - DNA, 20 bp, Neisseria gonorrhoeae
ccggcgcggatgtcggttgt

SEQ ID NO: 55259 - DNA, 20 bp, Neisseria gonorrhoeae
cggcgcggatgtcggttgtc

SEQ ID NO: 55260 - DNA, 20 bp, Neisseria gonorrhoeae
tcagggcgaagtcggcgtag

SEQ ID NO: 55261 - DNA, 20 bp, Neisseria gonorrhoeae
aatggcggcgggtgcatacg

SEQ ID NO: 55262 - DNA, 20 bp, Neisseria gonorrhoeae
ggcgtatgcacccgccgcca

SEQ ID NO: 55263 - DNA, 20 bp, Neisseria gonorrhoeae
gaagacggcacggacaaaaa

SEQ ID NO: 55264 - DNA, 20 bp, Neisseria gonorrhoeae
tttgtccgtgccgtcttcca

SEQ ID NO: 55265 - DNA, 20 bp, Neisseria gonorrhoeae
ttgtccgtgccgtcttccaa

SEQ ID NO: 55266 - DNA, 20 bp, Neisseria gonorrhoeae
tgtccgtgccgtcttccaag

SEQ ID NO: 55267 - DNA, 20 bp, Neisseria gonorrhoeae
gtccgtgccgtcttccaaga

SEQ ID NO: 55268 - DNA, 20 bp, Neisseria gonorrhoeae
gatgccgtaagccgccatcg

SEQ ID NO: 55269 - DNA, 20 bp, Neisseria gonorrhoeae
atgccgtaagccgccatcgg

SEQ ID NO: 55270 - DNA, 20 bp, Neisseria gonorrhoeae
tgccgacggcgtatgcttct

SEQ ID NO: 55271 - DNA, 20 bp, Neisseria gonorrhoeae
gccgacggcgtatgcttctg

SEQ ID NO: 55272 - DNA, 20 bp, Neisseria gonorrhoeae
ccgacggcgtatgcttctgc

SEQ ID NO: 55273 - DNA, 20 bp, Neisseria gonorrhoeae
tccgacaaaatccggctcac

SEQ ID NO: 55274 - DNA, 20 bp, Neisseria gonorrhoeae
ccgacaaaatccggctcaca

SEQ ID NO: 55275 - DNA, 20 bp, Neisseria gonorrhoeae
cgacaaaatccggctcacaa

SEQ ID NO: 55276 - DNA, 20 bp, Neisseria gonorrhoeae
gcgatgtcgtccacggcgat

SEQ ID NO: 55277 - DNA, 20 bp, Neisseria gonorrhoeae
tgagccggattttgtcggaa

SEQ ID NO: 55278 - DNA, 20 bp, Neisseria gonorrhoeae
ccgaacgcgaagccgccgtc

SEQ ID NO: 55279 - DNA, 20 bp, Neisseria gonorrhoeae
cggacggcggcttcgcgttc

SEQ ID NO: 55280 - DNA, 20 bp, Neisseria gonorrhoeae
gcgttcggcaagcatggcct

SEQ ID NO: 55281 - DNA, 20 bp, Neisseria gonorrhoeae
ggcaagcatggccttgcgtt

SEQ ID NO: 55282 - DNA, 20 bp, Neisseria gonorrhoeae
cgttcgtcggcttcgcgctg

SEQ ID NO: 55283 - DNA, 20 bp, Neisseria gonorrhoeae
gggcgcgccgctgccgcaca

SEQ ID NO: 55284 - DNA, 20 bp, Neisseria gonorrhoeae
cgcaaaacagccgttgaccg

SEQ ID NO: 55285 - DNA, 20 bp, Neisseria gonorrhoeae
accgcaacccgatagctgcc

SEQ ID NO: 55286 - DNA, 20 bp, Neisseria gonorrhoeae
cgcagcgttttcgccagcga

SEQ ID NO: 55287 - DNA, 20 bp, Neisseria gonorrhoeae
cggtcaacggctgttttgcg

SEQ ID NO: 55288 - DNA, 20 bp, Neisseria gonorrhoeae
tccgcgccgtttcacggtcg

SEQ ID NO: 55289 - DNA, 20 bp, Neisseria gonorrhoeae
ccgcgccgtttcacggtcgt

SEQ ID NO: 55290 - DNA, 20 bp, Neisseria gonorrhoeae
cgcgccgtttcacggtcgtc

SEQ ID NO: 55291 - DNA, 20 bp, Neisseria gonorrhoeae
cacggtcgtcttccaagggc

SEQ ID NO: 55292 - DNA, 20 bp, Neisseria gonorrhoeae
acggtcgtcttccaagggca

SEQ ID NO: 55293 - DNA, 20 bp, Neisseria gonorrhoeae
cagacggcatttccttctcc

SEQ ID NO: 55294 - DNA, 20 bp, Neisseria gonorrhoeae
agacggcatttccttctccg

SEQ ID NO: 55295 - DNA, 20 bp, Neisseria gonorrhoeae
ccttctccgccacgcgcaca

SEQ ID NO: 55296 - DNA, 20 bp, Neisseria gonorrhoeae
cttctccgccacgcgcacag

SEQ ID NO: 55297 - DNA, 20 bp, Neisseria gonorrhoeae
tccgccacgcgcacaggcgg

SEQ ID NO: 55298 - DNA, 20 bp, Neisseria gonorrhoeae
cggacttttggaattgagcc

SEQ ID NO: 55299 - DNA, 20 bp, Neisseria gonorrhoeae
ggacttttggaattgagccg

SEQ ID NO: 55300 - DNA, 20 bp, Neisseria gonorrhoeae
tggaattgagccgccaacgc

SEQ ID NO: 55301 - DNA, 20 bp, Neisseria gonorrhoeae
ggaattgagccgccaacgcc

SEQ ID NO: 55302 - DNA, 20 bp, Neisseria gonorrhoeae
gaattgagccgccaacgcct

SEQ ID NO: 55303 - DNA, 20 bp, Neisseria gonorrhoeae
ctgctgaacgaaaaacgcgc

SEQ ID NO: 55304 - DNA, 20 bp, Neisseria gonorrhoeae
cattgcaaacagctcggcgc

SEQ ID NO: 55305 - DNA, 20 bp, Neisseria gonorrhoeae
caaacagctcggcgcgtttt

SEQ ID NO: 55306 - DNA, 20 bp, Neisseria gonorrhoeae
ttcgttcagcaggaaggtgg

SEQ ID NO: 55307 - DNA, 20 bp, Neisseria gonorrhoeae
tcgttcagcaggaaggtggc

SEQ ID NO: 55308 - DNA, 20 bp, Neisseria gonorrhoeae
cggcaacggcggcggtttcc

SEQ ID NO: 55309 - DNA, 20 bp, Neisseria gonorrhoeae
ggcaacggcggcggtttccg

SEQ ID NO: 55310 - DNA, 20 bp, Neisseria gonorrhoeae
ccggtgcggtttggccacgt

SEQ ID NO: 55311 - DNA, 20 bp, Neisseria gonorrhoeae
cggtgcggtttggccacgtt

SEQ ID NO: 55312 - DNA, 20 bp, Neisseria gonorrhoeae
ggccacgttcgttgcggctg

SEQ ID NO: 55313 - DNA, 20 bp, Neisseria gonorrhoeae
ccgtcagcattgccgatccg

SEQ ID NO: 55314 - DNA, 20 bp, Neisseria gonorrhoeae
ccgatccgctcatcgccaca

SEQ ID NO: 55315 - DNA, 20 bp, Neisseria gonorrhoeae
agacggcatcttccgccgtt

SEQ ID NO: 55316 - DNA, 20 bp, Neisseria gonorrhoeae
gaaacggcggaagatgccgt

SEQ ID NO: 55317 - DNA, 20 bp, Neisseria gonorrhoeae
aaacggcggaagatgccgtc

SEQ ID NO: 55318 - DNA, 20 bp, Neisseria gonorrhoeae
acggctgcggcggaacaggc

SEQ ID NO: 55319 - DNA, 20 bp, Neisseria gonorrhoeae
cggctgcggcggaacaggca

SEQ ID NO: 55320 - DNA, 20 bp, Neisseria gonorrhoeae
cgatcaggacgagtccgccg

SEQ ID NO: 55321 - DNA, 20 bp, Neisseria gonorrhoeae
gatcaggacgagtccgccgg

SEQ ID NO: 55322 - DNA, 20 bp, Neisseria gonorrhoeae
gtgcggtttcccgtgcctgt

SEQ ID NO: 55323 - DNA, 20 bp, Neisseria gonorrhoeae
ccgccaaatcgagcgcggtg

SEQ ID NO: 55324 - DNA, 20 bp, Neisseria gonorrhoeae
atccgcacctccgtcgatca

SEQ ID NO: 55325 - DNA, 20 bp, Neisseria gonorrhoeae
tccgcacctccgtcgatcac

SEQ ID NO: 55326 - DNA, 20 bp, Neisseria gonorrhoeae
ggcggcaaccggcagggcgg

SEQ ID NO: 55327 - DNA, 20 bp, Neisseria gonorrhoeae
gcggcaaccggcagggcgga

SEQ ID NO: 55328 - DNA, 20 bp, Neisseria gonorrhoeae
ttgtccggcaaaatccacat

SEQ ID NO: 55329 - DNA, 20 bp, Neisseria gonorrhoeae
tgtccggcaaaatccacatc

SEQ ID NO: 55330 - DNA, 20 bp, Neisseria gonorrhoeae
gtccggcaaaatccacatcg

SEQ ID NO: 55331 - DNA, 20 bp, Neisseria gonorrhoeae
tccggcaaaatccacatcgg

SEQ ID NO: 55332 - DNA, 20 bp, Neisseria gonorrhoeae
ggaaaactacgaaggcggcc

SEQ ID NO: 55333 - DNA, 20 bp, Neisseria gonorrhoeae
ggacaaaaactcagccgcga

SEQ ID NO: 55334 - DNA, 20 bp, Neisseria gonorrhoeae
gttacgccgcccgaacctcg

SEQ ID NO: 55335 - DNA, 20 bp, Neisseria gonorrhoeae
ttacgccgcccgaacctcga

SEQ ID NO: 55336 - DNA, 20 bp, Neisseria gonorrhoeae
cgccgcccgaacctcgatta

SEQ ID NO: 55337 - DNA, 20 bp, Neisseria gonorrhoeae
cgccgcgctgatgacgctcg

SEQ ID NO: 55338 - DNA, 20 bp, Neisseria gonorrhoeae
ccgcaccggccagcgcgcgg

SEQ ID NO: 55339 - DNA, 20 bp, Neisseria gonorrhoeae
cgcaccggccagcgcgcggt

SEQ ID NO: 55340 - DNA, 20 bp, Neisseria gonorrhoeae
gcacccagcacagcgtatcc

SEQ ID NO: 55341 - DNA, 20 bp, Neisseria gonorrhoeae
gctgcgtaccgccgccgact

SEQ ID NO: 55342 - DNA, 20 bp, Neisseria gonorrhoeae
ctgcgtaccgccgccgactg

SEQ ID NO: 55343 - DNA, 20 bp, Neisseria gonorrhoeae
gccgcgcgatgccagcgaag

SEQ ID NO: 55344 - DNA, 20 bp, Neisseria gonorrhoeae
ccgcgcgatgccagcgaagc

SEQ ID NO: 55345 - DNA, 20 bp, Neisseria gonorrhoeae
accgtcgtcgtcgttttgcc

SEQ ID NO: 55346 - DNA, 20 bp, Neisseria gonorrhoeae
ccgtcgtcgtcgttttgccc

SEQ ID NO: 55347 - DNA, 20 bp, Neisseria gonorrhoeae
tgcccacaccgcccttctga

SEQ ID NO: 55348 - DNA, 20 bp, Neisseria gonorrhoeae
ccgccgccaaactgctgccg

SEQ ID NO: 55349 - DNA, 20 bp, Neisseria gonorrhoeae
cagcggcagcagtttggcgg

SEQ ID NO: 55350 - DNA, 20 bp, Neisseria gonorrhoeae
agcggcagcagtttggcggc

SEQ ID NO: 55351 - DNA, 20 bp, Neisseria gonorrhoeae
ggcggcggcaatggcgatgg

SEQ ID NO: 55352 - DNA, 20 bp, Neisseria gonorrhoeae
gcggcggcaatggcgatggc

SEQ ID NO: 55353 - DNA, 20 bp, Neisseria gonorrhoeae
ggagcagaatatggtcaaaa

SEQ ID NO: 55354 - DNA, 20 bp, Neisseria gonorrhoeae
gagcagaatatggtcaaaat

SEQ ID NO: 55355 - DNA, 20 bp, Neisseria gonorrhoeae
cgcccgatgtggcggcgagg

SEQ ID NO: 55356 - DNA, 20 bp, Neisseria gonorrhoeae
gcccgatgtggcggcgaggt

SEQ ID NO: 55357 - DNA, 20 bp, Neisseria gonorrhoeae
tgaccatgcgtgcgttgatt

SEQ ID NO: 55358 - DNA, 20 bp, Neisseria gonorrhoeae
acactgctccaaaccgacct

SEQ ID NO: 55359 - DNA, 20 bp, Neisseria gonorrhoeae
gttgcaggtcggtttggagc

SEQ ID NO: 55360 - DNA, 20 bp, Neisseria gonorrhoeae
ttgcaggtcggtttggagca

SEQ ID NO: 55361 - DNA, 20 bp, Neisseria gonorrhoeae
caggtcggtttggagcagtg

SEQ ID NO: 55362 - DNA, 20 bp, Neisseria gonorrhoeae
ggagcagtgtgaagtggcgg

SEQ ID NO: 55363 - DNA, 20 bp, Neisseria gonorrhoeae
ctctggctcagcaccaatat

SEQ ID NO: 55364 - DNA, 20 bp, Neisseria gonorrhoeae
ccgccctcgtcatcctgctg

SEQ ID NO: 55365 - DNA, 20 bp, Neisseria gonorrhoeae
cgccctcgtcatcctgctgc

SEQ ID NO: 55366 - DNA, 20 bp, Neisseria gonorrhoeae
gcggcgggtgcgttgcagca

SEQ ID NO: 55367 - DNA, 20 bp, Neisseria gonorrhoeae
cggcgggtgcgttgcagcag

SEQ ID NO: 55368 - DNA, 20 bp, Neisseria gonorrhoeae
gagggcaatatggcggccaa

SEQ ID NO: 55369 - DNA, 20 bp, Neisseria gonorrhoeae
agggcaatatggcggccaaa

SEQ ID NO: 55370 - DNA, 20 bp, Neisseria gonorrhoeae
aaacttgggactgaacccgg

SEQ ID NO: 55371 - DNA, 20 bp, Neisseria gonorrhoeae
ggactgaacccggcagctgt

SEQ ID NO: 55372 - DNA, 20 bp, Neisseria gonorrhoeae
agtcccaagtttgaatcgcg

SEQ ID NO: 55373 - DNA, 20 bp, Neisseria gonorrhoeae
ggtctgggttgccgacgttt

SEQ ID NO: 55374 - DNA, 20 bp, Neisseria gonorrhoeae
gtctgggttgccgacgtttg

SEQ ID NO: 55375 - DNA, 20 bp, Neisseria gonorrhoeae
ccgacgtttgcgcgtatttc

SEQ ID NO: 55376 - DNA, 20 bp, Neisseria gonorrhoeae
gcgcgtatttcagcggcaag

SEQ ID NO: 55377 - DNA, 20 bp, Neisseria gonorrhoeae
cgcgtatttcagcggcaagg

SEQ ID NO: 55378 - DNA, 20 bp, Neisseria gonorrhoeae
aactacctgcccgtcaaagt

SEQ ID NO: 55379 - DNA, 20 bp, Neisseria gonorrhoeae
tgatgatggcactgccgtgt

SEQ ID NO: 55380 - DNA, 20 bp, Neisseria gonorrhoeae
gatgatggcactgccgtgtg

SEQ ID NO: 55381 - DNA, 20 bp, Neisseria gonorrhoeae
atgatggcactgccgtgtgt

SEQ ID NO: 55382 - DNA, 20 bp, Neisseria gonorrhoeae
taggtgtcgccgactttgac

SEQ ID NO: 55383 - DNA, 20 bp, Neisseria gonorrhoeae
ggtaatgctgtgggtgacgg

SEQ ID NO: 55384 - DNA, 20 bp, Neisseria gonorrhoeae
tgtcggcgatttcgatgtgt

SEQ ID NO: 55385 - DNA, 20 bp, Neisseria gonorrhoeae
gtcggcgatttcgatgtgtc

SEQ ID NO: 55386 - DNA, 20 bp, Neisseria gonorrhoeae
tcggcgatttcgatgtgtcc

SEQ ID NO: 55387 - DNA, 20 bp, Neisseria gonorrhoeae
cgatgtgtccgaccgtaccg

SEQ ID NO: 55388 - DNA, 20 bp, Neisseria gonorrhoeae
tggatgtggatgaccgctat

SEQ ID NO: 55389 - DNA, 20 bp, Neisseria gonorrhoeae
ccactgcagtcgccacgccg

SEQ ID NO: 55390 - DNA, 20 bp, Neisseria gonorrhoeae
cccgtaccgatggtggcgga

SEQ ID NO: 55391 - DNA, 20 bp, Neisseria gonorrhoeae
cacgatggacgacgtacgcg

SEQ ID NO: 55392 - DNA, 20 bp, Neisseria gonorrhoeae
acgatggacgacgtacgcgc

SEQ ID NO: 55393 - DNA, 20 bp, Neisseria gonorrhoeae
atacaggcgcacgaacactt

SEQ ID NO: 55394 - DNA, 20 bp, Neisseria gonorrhoeae
ggccacggtttcggcgcgta

SEQ ID NO: 55395 - DNA, 20 bp, Neisseria gonorrhoeae
cggcgcgtacgtcgtccatc

SEQ ID NO: 55396 - DNA, 20 bp, Neisseria gonorrhoeae
ccccgaaaccgacggcggcg

SEQ ID NO: 55397 - DNA, 20 bp, Neisseria gonorrhoeae
cccgaaaccgacggcggcga

SEQ ID NO: 55398 - DNA, 20 bp, Neisseria gonorrhoeae
ttcagacggcattcgggcaa

SEQ ID NO: 55399 - DNA, 20 bp, Neisseria gonorrhoeae
agacggcattcgggcaaatg

SEQ ID NO: 55400 - DNA, 20 bp, Neisseria gonorrhoeae
gcccgaatgccgtctgaaca

SEQ ID NO: 55401 - DNA, 20 bp, Neisseria gonorrhoeae
gcagcctcacaaatcaattt

SEQ ID NO: 55402 - DNA, 20 bp, Neisseria gonorrhoeae
cagcctcacaaatcaattta

SEQ ID NO: 55403 - DNA, 20 bp, Neisseria gonorrhoeae
agcacgagtagcaccaatac

SEQ ID NO: 55404 - DNA, 20 bp, Neisseria gonorrhoeae
gcacgagtagcaccaatacc

SEQ ID NO: 55405 - DNA, 20 bp, Neisseria gonorrhoeae
cgatgtgtgcgttattaggg

SEQ ID NO: 55406 - DNA, 20 bp, Neisseria gonorrhoeae
taaccaatgtaaccctaatc

SEQ ID NO: 55407 - DNA, 20 bp, Neisseria gonorrhoeae
aaccaatgtaaccctaatct

SEQ ID NO: 55408 - DNA, 20 bp, Neisseria gonorrhoeae
accaatgtaaccctaatctt

SEQ ID NO: 55409 - DNA, 20 bp, Neisseria gonorrhoeae
ttttgttcagccatggttaa

SEQ ID NO: 55410 - DNA, 20 bp, Neisseria gonorrhoeae
tttgttcagccatggttaac

SEQ ID NO: 55411 - DNA, 20 bp, Neisseria gonorrhoeae
cagaagcaacttgaacaccg

SEQ ID NO: 55412 - DNA, 20 bp, Neisseria gonorrhoeae
aacaccgaacagcagctcga

SEQ ID NO: 55413 - DNA, 20 bp, Neisseria gonorrhoeae
gatttcaggtttggttgcat

SEQ ID NO: 55414 - DNA, 20 bp, Neisseria gonorrhoeae
atttcaggtttggttgcatt

SEQ ID NO: 55415 - DNA, 20 bp, Neisseria gonorrhoeae
caggtttggttgcatttgcc

SEQ ID NO: 55416 - DNA, 20 bp, Neisseria gonorrhoeae
caccgaccgcactgtttttt

SEQ ID NO: 55417 - DNA, 20 bp, Neisseria gonorrhoeae
accgaccgcactgttttttg

SEQ ID NO: 55418 - DNA, 20 bp, Neisseria gonorrhoeae
tttgattttgttgttttgcc

SEQ ID NO: 55419 - DNA, 20 bp, Neisseria gonorrhoeae
ttgattttgttgttttgcct

SEQ ID NO: 55420 - DNA, 20 bp, Neisseria gonorrhoeae
tgattttgttgttttgcctt

SEQ ID NO: 55421 - DNA, 20 bp, Neisseria gonorrhoeae
ccccttcagacggcatcgca

SEQ ID NO: 55422 - DNA, 20 bp, Neisseria gonorrhoeae
cccttcagacggcatcgcag

SEQ ID NO: 55423 - DNA, 20 bp, Neisseria gonorrhoeae
agacggcatcgcagcccgac

SEQ ID NO: 55424 - DNA, 20 bp, Neisseria gonorrhoeae
acgtcggtagtcgggctgcg

SEQ ID NO: 55425 - DNA, 20 bp, Neisseria gonorrhoeae
gcagaggatgtgccgccggt

SEQ ID NO: 55426 - DNA, 20 bp, Neisseria gonorrhoeae
agttacatccaccagacgac

SEQ ID NO: 55427 - DNA, 20 bp, Neisseria gonorrhoeae
catccaccagacgacgggtc

SEQ ID NO: 55428 - DNA, 20 bp, Neisseria gonorrhoeae
gcggttttcaacgcggtatc

SEQ ID NO: 55429 - DNA, 20 bp, Neisseria gonorrhoeae
tcaacgcggtatccgccaaa

SEQ ID NO: 55430 - DNA, 20 bp, Neisseria gonorrhoeae
caacgcggtatccgccaaac

SEQ ID NO: 55431 - DNA, 20 bp, Neisseria gonorrhoeae
gccgccaaactgagctttac

SEQ ID NO: 55432 - DNA, 20 bp, Neisseria gonorrhoeae
accgcccagaggttgttgag

SEQ ID NO: 55433 - DNA, 20 bp, Neisseria gonorrhoeae
ccgcccagaggttgttgagt

SEQ ID NO: 55434 - DNA, 20 bp, Neisseria gonorrhoeae
ttgagtaaccagactgtacg

SEQ ID NO: 55435 - DNA, 20 bp, Neisseria gonorrhoeae
agtaaccagactgtacgggc

SEQ ID NO: 55436 - DNA, 20 bp, Neisseria gonorrhoeae
agacggcatcggtatcggcg

SEQ ID NO: 55437 - DNA, 20 bp, Neisseria gonorrhoeae
ggcgtgcgctaccgcttctg

SEQ ID NO: 55438 - DNA, 20 bp, Neisseria gonorrhoeae
tgattcgccgataccgatgc

SEQ ID NO: 55439 - DNA, 20 bp, Neisseria gonorrhoeae
gccgataccgatgccgtctg

SEQ ID NO: 55440 - DNA, 20 bp, Neisseria gonorrhoeae
agacggcatttttgatgcgc

SEQ ID NO: 55441 - DNA, 20 bp, Neisseria gonorrhoeae
gcgccccatttctgccgcca

SEQ ID NO: 55442 - DNA, 20 bp, Neisseria gonorrhoeae
ctgccgccaggccggcggta

SEQ ID NO: 55443 - DNA, 20 bp, Neisseria gonorrhoeae
tgccgccaggccggcggtaa

SEQ ID NO: 55444 - DNA, 20 bp, Neisseria gonorrhoeae
gaatccggttcgctgattac

SEQ ID NO: 55445 - DNA, 20 bp, Neisseria gonorrhoeae
gctgattaccgccggcctgg

SEQ ID NO: 55446 - DNA, 20 bp, Neisseria gonorrhoeae
attcgcgcagcggcaggtta

SEQ ID NO: 55447 - DNA, 20 bp, Neisseria gonorrhoeae
gcgcagcggcaggttaaagt

SEQ ID NO: 55448 - DNA, 20 bp, Neisseria gonorrhoeae
aagtcgaacccgcacgccat

SEQ ID NO: 55449 - DNA, 20 bp, Neisseria gonorrhoeae
cgtcggcaggcacgccgcgc

SEQ ID NO: 55450 - DNA, 20 bp, Neisseria gonorrhoeae
ttcggcactggggcgcggcg

SEQ ID NO: 55451 - DNA, 20 bp, Neisseria gonorrhoeae
gccacttcaccccacgcggc

SEQ ID NO: 55452 - DNA, 20 bp, Neisseria gonorrhoeae
accccacgcggcttcttttt

SEQ ID NO: 55453 - DNA, 20 bp, Neisseria gonorrhoeae
tttttgcgcgcgtatcagca

SEQ ID NO: 55454 - DNA, 20 bp, Neisseria gonorrhoeae
ttgcgcgcgtatcagcacgg

SEQ ID NO: 55455 - DNA, 20 bp, Neisseria gonorrhoeae
tgcgcgcgtatcagcacggt

SEQ ID NO: 55456 - DNA, 20 bp, Neisseria gonorrhoeae
gattaccccggtgcgcaccc

SEQ ID NO: 55457 - DNA, 20 bp, Neisseria gonorrhoeae
attaccccggtgcgcacccg

SEQ ID NO: 55458 - DNA, 20 bp, Neisseria gonorrhoeae
ccccggtgcgcacccgttcg

SEQ ID NO: 55459 - DNA, 20 bp, Neisseria gonorrhoeae
gatacagccgctggtggtcg

SEQ ID NO: 55460 - DNA, 20 bp, Neisseria gonorrhoeae
ccgaaatacagcagggcgac

SEQ ID NO: 55461 - DNA, 20 bp, Neisseria gonorrhoeae
agcagcagcggcagcgcgtt

SEQ ID NO: 55462 - DNA, 20 bp, Neisseria gonorrhoeae
gcccactcccacagcgaagg

SEQ ID NO: 55463 - DNA, 20 bp, Neisseria gonorrhoeae
cggatgttggggctggtggc

SEQ ID NO: 55464 - DNA, 20 bp, Neisseria gonorrhoeae
gggctggtggcggtattggc

SEQ ID NO: 55465 - DNA, 20 bp, Neisseria gonorrhoeae
gcgttcagcgcgccttcgct

SEQ ID NO: 55466 - DNA, 20 bp, Neisseria gonorrhoeae
gacggcaccgatgcggtgat

SEQ ID NO: 55467 - DNA, 20 bp, Neisseria gonorrhoeae
cgccgaaaccgccgtcggcg

SEQ ID NO: 55468 - DNA, 20 bp, Neisseria gonorrhoeae
gaaaccgtcagccaaatggc

SEQ ID NO: 55469 - DNA, 20 bp, Neisseria gonorrhoeae
aaaccgtcagccaaatggcg

SEQ ID NO: 55470 - DNA, 20 bp, Neisseria gonorrhoeae
ggctgacggtttcaaacgga

SEQ ID NO: 55471 - DNA, 20 bp, Neisseria gonorrhoeae
tggcaaccagcaccgaccac

SEQ ID NO: 55472 - DNA, 20 bp, Neisseria gonorrhoeae
ggcaaccagcaccgaccacg

SEQ ID NO: 55473 - DNA, 20 bp, Neisseria gonorrhoeae
gcaaccagcaccgaccacga

SEQ ID NO: 55474 - DNA, 20 bp, Neisseria gonorrhoeae
aacgaagtcgaaacgatgct

SEQ ID NO: 55475 - DNA, 20 bp, Neisseria gonorrhoeae
tgttccaccagcatcgtttc

SEQ ID NO: 55476 - DNA, 20 bp, Neisseria gonorrhoeae
caaagtttcacacacgctca

SEQ ID NO: 55477 - DNA, 20 bp, Neisseria gonorrhoeae
cacacacgctcaaaggcgat

SEQ ID NO: 55478 - DNA, 20 bp, Neisseria gonorrhoeae
acacacgctcaaaggcgatg

SEQ ID NO: 55479 - DNA, 20 bp, Neisseria gonorrhoeae
ggcatcgcctttgagcgtgt

SEQ ID NO: 55480 - DNA, 20 bp, Neisseria gonorrhoeae
gagcgtgtgtgaaactttgg

SEQ ID NO: 55481 - DNA, 20 bp, Neisseria gonorrhoeae
gtacggtaagtctgacaata

SEQ ID NO: 55482 - DNA, 20 bp, Neisseria gonorrhoeae
caacagaaagcaattgttgg

SEQ ID NO: 55483 - DNA, 20 bp, Neisseria gonorrhoeae
aacagaaagcaattgttgga

SEQ ID NO: 55484 - DNA, 20 bp, Neisseria gonorrhoeae
ttggaatccggcttgttcaa

SEQ ID NO: 55485 - DNA, 20 bp, Neisseria gonorrhoeae
gaatccggcttgttcaaaac

SEQ ID NO: 55486 - DNA, 20 bp, Neisseria gonorrhoeae
cagcaccttcactttgacca

SEQ ID NO: 55487 - DNA, 20 bp, Neisseria gonorrhoeae
actttgaccacgtcgccggc

SEQ ID NO: 55488 - DNA, 20 bp, Neisseria gonorrhoeae
gaccacgtcgccggctttca

SEQ ID NO: 55489 - DNA, 20 bp, Neisseria gonorrhoeae
accacgtcgccggctttcac

SEQ ID NO: 55490 - DNA, 20 bp, Neisseria gonorrhoeae
caccacgtcgcgcgggtctt

SEQ ID NO: 55491 - DNA, 20 bp, Neisseria gonorrhoeae
ggttcacgtcgtgctgatac

SEQ ID NO: 55492 - DNA, 20 bp, Neisseria gonorrhoeae
gttcacgtcgtgctgatact

SEQ ID NO: 55493 - DNA, 20 bp, Neisseria gonorrhoeae
acgtcgtgctgatactgccc

SEQ ID NO: 55494 - DNA, 20 bp, Neisseria gonorrhoeae
ggggtcgattttgaccaact

SEQ ID NO: 55495 - DNA, 20 bp, Neisseria gonorrhoeae
gggtcgattttgaccaactc

SEQ ID NO: 55496 - DNA, 20 bp, Neisseria gonorrhoeae
ggaaacgacgattttgtgca

SEQ ID NO: 55497 - DNA, 20 bp, Neisseria gonorrhoeae
tgtgcaggctgctttcgggc

SEQ ID NO: 55498 - DNA, 20 bp, Neisseria gonorrhoeae
gtgcaggctgctttcgggca

SEQ ID NO: 55499 - DNA, 20 bp, Neisseria gonorrhoeae
tgcaggctgctttcgggcat

SEQ ID NO: 55500 - DNA, 20 bp, Neisseria gonorrhoeae
cgggcattccgcgcaccagt

SEQ ID NO: 55501 - DNA, 20 bp, Neisseria gonorrhoeae
cagccgctcggcaagctggc

SEQ ID NO: 55502 - DNA, 20 bp, Neisseria gonorrhoeae
tttacggtaacgcgcgataa

SEQ ID NO: 55503 - DNA, 20 bp, Neisseria gonorrhoeae
acggtaacgcgcgataaagg

SEQ ID NO: 55504 - DNA, 20 bp, Neisseria gonorrhoeae
cggtaacgcgcgataaaggg

SEQ ID NO: 55505 - DNA, 20 bp, Neisseria gonorrhoeae
atcgcgcgttaccgtaaaga

SEQ ID NO: 55506 - DNA, 20 bp, Neisseria gonorrhoeae
ccgcaccgataaaacgcact

SEQ ID NO: 55507 - DNA, 20 bp, Neisseria gonorrhoeae
ttccttccacagcttcatcg

SEQ ID NO: 55508 - DNA, 20 bp, Neisseria gonorrhoeae
tccttccacagcttcatcgc

SEQ ID NO: 55509 - DNA, 20 bp, Neisseria gonorrhoeae
ccttccacagcttcatcgca

SEQ ID NO: 55510 - DNA, 20 bp, Neisseria gonorrhoeae
cttccacagcttcatcgcaa

SEQ ID NO: 55511 - DNA, 20 bp, Neisseria gonorrhoeae
gggtttctttggggacggtg

SEQ ID NO: 55512 - DNA, 20 bp, Neisseria gonorrhoeae
ggtttctttggggacggtga

SEQ ID NO: 55513 - DNA, 20 bp, Neisseria gonorrhoeae
ctttggggacggtgagcttg

SEQ ID NO: 55514 - DNA, 20 bp, Neisseria gonorrhoeae
tttggggacggtgagcttga

SEQ ID NO: 55515 - DNA, 20 bp, Neisseria gonorrhoeae
ggggacggtgagcttgactt

SEQ ID NO: 55516 - DNA, 20 bp, Neisseria gonorrhoeae
gggtttcggctgtcgaagga

SEQ ID NO: 55517 - DNA, 20 bp, Neisseria gonorrhoeae
ggtttcggctgtcgaaggaa

SEQ ID NO: 55518 - DNA, 20 bp, Neisseria gonorrhoeae
cggctgtcgaaggaagggct

SEQ ID NO: 55519 - DNA, 20 bp, Neisseria gonorrhoeae
ggctgtcgaaggaagggctt

SEQ ID NO: 55520 - DNA, 20 bp, Neisseria gonorrhoeae
tttgcaaaggtctcagaatg

SEQ ID NO: 55521 - DNA, 20 bp, Neisseria gonorrhoeae
ccccgaggtaacggctgagc

SEQ ID NO: 55522 - DNA, 20 bp, Neisseria gonorrhoeae
gtgctttctgtcgcagccgg

SEQ ID NO: 55523 - DNA, 20 bp, Neisseria gonorrhoeae
ctgtcgcagccggattgtcg

SEQ ID NO: 55524 - DNA, 20 bp, Neisseria gonorrhoeae
tgtcgcagccggattgtcgg

SEQ ID NO: 55525 - DNA, 20 bp, Neisseria gonorrhoeae
tcggtcggtacgctcagccg

SEQ ID NO: 55526 - DNA, 20 bp, Neisseria gonorrhoeae
cccgccggagagaaagaaat

SEQ ID NO: 55527 - DNA, 20 bp, Neisseria gonorrhoeae
ggacagcatggaacgcacca

SEQ ID NO: 55528 - DNA, 20 bp, Neisseria gonorrhoeae
ctttctctccggcggggaat

SEQ ID NO: 55529 - DNA, 20 bp, Neisseria gonorrhoeae
tttctctccggcggggaata

SEQ ID NO: 55530 - DNA, 20 bp, Neisseria gonorrhoeae
ctctccggcggggaatacgt

SEQ ID NO: 55531 - DNA, 20 bp, Neisseria gonorrhoeae
gggcgagctgcatcgcgtat

SEQ ID NO: 55532 - DNA, 20 bp, Neisseria gonorrhoeae
ggcgagctgcatcgcgtatt

SEQ ID NO: 55533 - DNA, 20 bp, Neisseria gonorrhoeae
catactttccctgctgcgga

SEQ ID NO: 55534 - DNA, 20 bp, Neisseria gonorrhoeae
ccctgctgcggacttcgccg

SEQ ID NO: 55535 - DNA, 20 bp, Neisseria gonorrhoeae
cctgctgcggacttcgccga

SEQ ID NO: 55536 - DNA, 20 bp, Neisseria gonorrhoeae
accgccgcctccatcgtctg

SEQ ID NO: 55537 - DNA, 20 bp, Neisseria gonorrhoeae
ccgccgcctccatcgtctgg

SEQ ID NO: 55538 - DNA, 20 bp, Neisseria gonorrhoeae
gtactcggcatcatcgccgg

SEQ ID NO: 55539 - DNA, 20 bp, Neisseria gonorrhoeae
ggttcgcctagctgccagac

SEQ ID NO: 55540 - DNA, 20 bp, Neisseria gonorrhoeae
gcctagctgccagacgatgg

SEQ ID NO: 55541 - DNA, 20 bp, Neisseria gonorrhoeae
atgattttatgcggcaccgt

SEQ ID NO: 55542 - DNA, 20 bp, Neisseria gonorrhoeae
tatgcggcaccgtactgtac

SEQ ID NO: 55543 - DNA, 20 bp, Neisseria gonorrhoeae
atgcggcaccgtactgtaca

SEQ ID NO: 55544 - DNA, 20 bp, Neisseria gonorrhoeae
tgcggcaccgtactgtacag

SEQ ID NO: 55545 - DNA, 20 bp, Neisseria gonorrhoeae
caaatcatcctgccccaccg

SEQ ID NO: 55546 - DNA, 20 bp, Neisseria gonorrhoeae
cagacggcaacgacagtccc

SEQ ID NO: 55547 - DNA, 20 bp, Neisseria gonorrhoeae
agacggcaacgacagtcccg

SEQ ID NO: 55548 - DNA, 20 bp, Neisseria gonorrhoeae
tcgacaacctcggcagcgtc

SEQ ID NO: 55549 - DNA, 20 bp, Neisseria gonorrhoeae
tcgagaaggcggctcaggtg

SEQ ID NO: 55550 - DNA, 20 bp, Neisseria gonorrhoeae
ccgtctgaaaggaggcgcag

SEQ ID NO: 55551 - DNA, 20 bp, Neisseria gonorrhoeae
cgccatgccgtccgcctgtc

SEQ ID NO: 55552 - DNA, 20 bp, Neisseria gonorrhoeae
gaggttcagctgcggacgga

SEQ ID NO: 55553 - DNA, 20 bp, Neisseria gonorrhoeae
agctgcggacggattgcctg

SEQ ID NO: 55554 - DNA, 20 bp, Neisseria gonorrhoeae
cgccgagtacggtgccggcg

SEQ ID NO: 55555 - DNA, 20 bp, Neisseria gonorrhoeae
gtacacgcggcttttggtgg

SEQ ID NO: 55556 - DNA, 20 bp, Neisseria gonorrhoeae
accctgctcaaaaccggcta

SEQ ID NO: 55557 - DNA, 20 bp, Neisseria gonorrhoeae
ccctgctcaaaaccggctac

SEQ ID NO: 55558 - DNA, 20 bp, Neisseria gonorrhoeae
ttcgtgcatttcgctgcggt

SEQ ID NO: 55559 - DNA, 20 bp, Neisseria gonorrhoeae
gtgcatttcgctgcggtatg

SEQ ID NO: 55560 - DNA, 20 bp, Neisseria gonorrhoeae
cgctgcggtatgcgccgagg

SEQ ID NO: 55561 - DNA, 20 bp, Neisseria gonorrhoeae
cagacggcattggatacact

SEQ ID NO: 55562 - DNA, 20 bp, Neisseria gonorrhoeae
agacggcattggatacactg

SEQ ID NO: 55563 - DNA, 20 bp, Neisseria gonorrhoeae
gatacactgcgcggcgaact

SEQ ID NO: 55564 - DNA, 20 bp, Neisseria gonorrhoeae
gagctgttggaggaggatgt

SEQ ID NO: 55565 - DNA, 20 bp, Neisseria gonorrhoeae
gaggaggatgtggctttgtg

SEQ ID NO: 55566 - DNA, 20 bp, Neisseria gonorrhoeae
tatagcggattaacaaaaac

SEQ ID NO: 55567 - DNA, 20 bp, Neisseria gonorrhoeae
atagcggattaacaaaaacc

SEQ ID NO: 55568 - DNA, 20 bp, Neisseria gonorrhoeae
tagcggattaacaaaaaccg

SEQ ID NO: 55569 - DNA, 20 bp, Neisseria gonorrhoeae
acaaaaaccggtacggcgtt

SEQ ID NO: 55570 - DNA, 20 bp, Neisseria gonorrhoeae
ccccgccccggctcaaaggg

SEQ ID NO: 55571 - DNA, 20 bp, Neisseria gonorrhoeae
gcccgctgtgtttcgtcgtt

SEQ ID NO: 55572 - DNA, 20 bp, Neisseria gonorrhoeae
cgtcgttcaaagaacagcgc

SEQ ID NO: 55573 - DNA, 20 bp, Neisseria gonorrhoeae
gtcgttcaaagaacagcgcg

SEQ ID NO: 55574 - DNA, 20 bp, Neisseria gonorrhoeae
aaagaacagcgcgtgcagac

SEQ ID NO: 55575 - DNA, 20 bp, Neisseria gonorrhoeae
gcccgaaccgccacgcccgt

SEQ ID NO: 55576 - DNA, 20 bp, Neisseria gonorrhoeae
cccaagccgcgcccgtcgcc

SEQ ID NO: 55577 - DNA, 20 bp, Neisseria gonorrhoeae
atggcgggcgaactcgacgc

SEQ ID NO: 55578 - DNA, 20 bp, Neisseria gonorrhoeae
gggcaaagccttgaaacagc

SEQ ID NO: 55579 - DNA, 20 bp, Neisseria gonorrhoeae
ggcaaagccttgaaacagcc

SEQ ID NO: 55580 - DNA, 20 bp, Neisseria gonorrhoeae
caaggctttgcccaaagcgt

SEQ ID NO: 55581 - DNA, 20 bp, Neisseria gonorrhoeae
gccgccgatgccgaagcggt

SEQ ID NO: 55582 - DNA, 20 bp, Neisseria gonorrhoeae
ccgccgatgccgaagcggtg

SEQ ID NO: 55583 - DNA, 20 bp, Neisseria gonorrhoeae
ccgaagacgagatgattttg

SEQ ID NO: 55584 - DNA, 20 bp, Neisseria gonorrhoeae
tggacatcggcccgaaatcc

SEQ ID NO: 55585 - DNA, 20 bp, Neisseria gonorrhoeae
ggacatcggcccgaaatccg

SEQ ID NO: 55586 - DNA, 20 bp, Neisseria gonorrhoeae
tgagggtaagcagtgtgccg

SEQ ID NO: 55587 - DNA, 20 bp, Neisseria gonorrhoeae
gcgcagaagctgtttgagtg

SEQ ID NO: 55588 - DNA, 20 bp, Neisseria gonorrhoeae
gagtgcggagcgcgcggatt

SEQ ID NO: 55589 - DNA, 20 bp, Neisseria gonorrhoeae
agtgcggagcgcgcggattc

SEQ ID NO: 55590 - DNA, 20 bp, Neisseria gonorrhoeae
tgcgccaacccttcggcaca

SEQ ID NO: 55591 - DNA, 20 bp, Neisseria gonorrhoeae
gtcaaaggcgaaatctccat

SEQ ID NO: 55592 - DNA, 20 bp, Neisseria gonorrhoeae
ttgcccgcgccgacggtacg

SEQ ID NO: 55593 - DNA, 20 bp, Neisseria gonorrhoeae
cccgcgccgacggtacgccg

SEQ ID NO: 55594 - DNA, 20 bp, Neisseria gonorrhoeae
taggtcggcgtaccgtcggc

SEQ ID NO: 55595 - DNA, 20 bp, Neisseria gonorrhoeae
gttggggatggagatttcgc

SEQ ID NO: 55596 - DNA, 20 bp, Neisseria gonorrhoeae
gagggtttcggcaactggca

SEQ ID NO: 55597 - DNA, 20 bp, Neisseria gonorrhoeae
agggtttcggcaactggcag

SEQ ID NO: 55598 - DNA, 20 bp, Neisseria gonorrhoeae
cggcaactggcagggtttcg

SEQ ID NO: 55599 - DNA, 20 bp, Neisseria gonorrhoeae
ggcaactggcagggtttcgg

SEQ ID NO: 55600 - DNA, 20 bp, Neisseria gonorrhoeae
cggggaaaacggctttaagg

SEQ ID NO: 55601 - DNA, 20 bp, Neisseria gonorrhoeae
cgatgcgcacgactttgcgc

SEQ ID NO: 55602 - DNA, 20 bp, Neisseria gonorrhoeae
gcgctccaccggccctttgc

SEQ ID NO: 55603 - DNA, 20 bp, Neisseria gonorrhoeae
cgctccaccggccctttgcc

SEQ ID NO: 55604 - DNA, 20 bp, Neisseria gonorrhoeae
gcccgcgccgacttcgccga

SEQ ID NO: 55605 - DNA, 20 bp, Neisseria gonorrhoeae
cccgcgccgacttcgccgac

SEQ ID NO: 55606 - DNA, 20 bp, Neisseria gonorrhoeae
gaatacttcgcaggcaaaat

SEQ ID NO: 55607 - DNA, 20 bp, Neisseria gonorrhoeae
gcaggcaaaatctaaggctt

SEQ ID NO: 55608 - DNA, 20 bp, Neisseria gonorrhoeae
aacaaacctgtggataagta

SEQ ID NO: 55609 - DNA, 20 bp, Neisseria gonorrhoeae
cgttcagacggcattgttta

SEQ ID NO: 55610 - DNA, 20 bp, Neisseria gonorrhoeae
agacggcattgtttatctgt

SEQ ID NO: 55611 - DNA, 20 bp, Neisseria gonorrhoeae
gggaaacgaggctgaaaaag

SEQ ID NO: 55612 - DNA, 20 bp, Neisseria gonorrhoeae
cagacgggctgccgtttacc

SEQ ID NO: 55613 - DNA, 20 bp, Neisseria gonorrhoeae
accatagtgtgcgctaaaat

SEQ ID NO: 55614 - DNA, 20 bp, Neisseria gonorrhoeae
ccatagtgtgcgctaaaatg

SEQ ID NO: 55615 - DNA, 20 bp, Neisseria gonorrhoeae
attttagcgcacactatggt

SEQ ID NO: 55616 - DNA, 20 bp, Neisseria gonorrhoeae
ataccgataccgatccgatt

SEQ ID NO: 55617 - DNA, 20 bp, Neisseria gonorrhoeae
taccgataccgatccgatta

SEQ ID NO: 55618 - DNA, 20 bp, Neisseria gonorrhoeae
aaacaggcgttcaagtttcg

SEQ ID NO: 55619 - DNA, 20 bp, Neisseria gonorrhoeae
aagtttcggctattgcaaaa

SEQ ID NO: 55620 - DNA, 20 bp, Neisseria gonorrhoeae
cggctattgcaaaaaatgtg

SEQ ID NO: 55621 - DNA, 20 bp, Neisseria gonorrhoeae
cgacattagccaaagcactc

SEQ ID NO: 55622 - DNA, 20 bp, Neisseria gonorrhoeae
gccaaagcactcggtaagtt

SEQ ID NO: 55623 - DNA, 20 bp, Neisseria gonorrhoeae
gcgcatttgaaaaaaaggcc

SEQ ID NO: 55624 - DNA, 20 bp, Neisseria gonorrhoeae
gaaaaaaaggccgcaacaca

SEQ ID NO: 55625 - DNA, 20 bp, Neisseria gonorrhoeae
aaaaaaaggccgcaacacaa

SEQ ID NO: 55626 - DNA, 20 bp, Neisseria gonorrhoeae
tgatggcggttgcaagtgcg

SEQ ID NO: 55627 - DNA, 20 bp, Neisseria gonorrhoeae
gatggcggttgcaagtgcgg

SEQ ID NO: 55628 - DNA, 20 bp, Neisseria gonorrhoeae
atggcggttgcaagtgcggc

SEQ ID NO: 55629 - DNA, 20 bp, Neisseria gonorrhoeae
caagtgcggcgatgagggtg

SEQ ID NO: 55630 - DNA, 20 bp, Neisseria gonorrhoeae
tgccctgtccttttgaaagc

SEQ ID NO: 55631 - DNA, 20 bp, Neisseria gonorrhoeae
gggcgggacaggatgcggta

SEQ ID NO: 55632 - DNA, 20 bp, Neisseria gonorrhoeae
gtcgaacaccgcgccgatat

SEQ ID NO: 55633 - DNA, 20 bp, Neisseria gonorrhoeae
tcgaacaccgcgccgatatc

SEQ ID NO: 55634 - DNA, 20 bp, Neisseria gonorrhoeae
tccatgctgaccgtgccgga

SEQ ID NO: 55635 - DNA, 20 bp, Neisseria gonorrhoeae
ccatgctgaccgtgccggag

SEQ ID NO: 55636 - DNA, 20 bp, Neisseria gonorrhoeae
aatgcgcccaagtcgggaag

SEQ ID NO: 55637 - DNA, 20 bp, Neisseria gonorrhoeae
gccatattgccgccgaaggc

SEQ ID NO: 55638 - DNA, 20 bp, Neisseria gonorrhoeae
ccatattgccgccgaaggcg

SEQ ID NO: 55639 - DNA, 20 bp, Neisseria gonorrhoeae
ggcggcaatatggcaaatac

SEQ ID NO: 55640 - DNA, 20 bp, Neisseria gonorrhoeae
cagcctcccttcccgacttg

SEQ ID NO: 55641 - DNA, 20 bp, Neisseria gonorrhoeae
tcagggaaaatgcgttcaaa

SEQ ID NO: 55642 - DNA, 20 bp, Neisseria gonorrhoeae
cagggaaaatgcgttcaaac

SEQ ID NO: 55643 - DNA, 20 bp, Neisseria gonorrhoeae
agggaaaatgcgttcaaacc

SEQ ID NO: 55644 - DNA, 20 bp, Neisseria gonorrhoeae
aaacccaaagcctgcccgcc

SEQ ID NO: 55645 - DNA, 20 bp, Neisseria gonorrhoeae
gccggctgatattgaggtag

SEQ ID NO: 55646 - DNA, 20 bp, Neisseria gonorrhoeae
atatcggcgcgcatcgggcg

SEQ ID NO: 55647 - DNA, 20 bp, Neisseria gonorrhoeae
tgtcgggcgagcctttgagg

SEQ ID NO: 55648 - DNA, 20 bp, Neisseria gonorrhoeae
taccctcaaaggctcgcccg

SEQ ID NO: 55649 - DNA, 20 bp, Neisseria gonorrhoeae
accctcaaaggctcgcccga

SEQ ID NO: 55650 - DNA, 20 bp, Neisseria gonorrhoeae
ccctcaaaggctcgcccgac

SEQ ID NO: 55651 - DNA, 20 bp, Neisseria gonorrhoeae
agcaggcggtctttaaacag

SEQ ID NO: 55652 - DNA, 20 bp, Neisseria gonorrhoeae
aaacagctcgagatagcctt

SEQ ID NO: 55653 - DNA, 20 bp, Neisseria gonorrhoeae
aacagctcgagatagccttg

SEQ ID NO: 55654 - DNA, 20 bp, Neisseria gonorrhoeae
cgcggtcaggctgccttccc

SEQ ID NO: 55655 - DNA, 20 bp, Neisseria gonorrhoeae
aaagaccgcctgctcaagct

SEQ ID NO: 55656 - DNA, 20 bp, Neisseria gonorrhoeae
gaggttttgggaggaaatgt

SEQ ID NO: 55657 - DNA, 20 bp, Neisseria gonorrhoeae
aggttttgggaggaaatgtt

SEQ ID NO: 55658 - DNA, 20 bp, Neisseria gonorrhoeae
tgggaggaaatgtttacgcc

SEQ ID NO: 55659 - DNA, 20 bp, Neisseria gonorrhoeae
gggaggaaatgtttacgccg

SEQ ID NO: 55660 - DNA, 20 bp, Neisseria gonorrhoeae
ggaggaaatgtttacgccga

SEQ ID NO: 55661 - DNA, 20 bp, Neisseria gonorrhoeae
tttgttttcgggcgtgaaga

SEQ ID NO: 55662 - DNA, 20 bp, Neisseria gonorrhoeae
ttgttttcgggcgtgaagaa

SEQ ID NO: 55663 - DNA, 20 bp, Neisseria gonorrhoeae
tgttttcgggcgtgaagaaa

SEQ ID NO: 55664 - DNA, 20 bp, Neisseria gonorrhoeae
gttttcgggcgtgaagaaat

SEQ ID NO: 55665 - DNA, 20 bp, Neisseria gonorrhoeae
ttttcgggcgtgaagaaata

SEQ ID NO: 55666 - DNA, 20 bp, Neisseria gonorrhoeae
cccaaatcgacatccgagcc

SEQ ID NO: 55667 - DNA, 20 bp, Neisseria gonorrhoeae
tccggccttctgcgagaaat

SEQ ID NO: 55668 - DNA, 20 bp, Neisseria gonorrhoeae
ccggccttctgcgagaaatt

SEQ ID NO: 55669 - DNA, 20 bp, Neisseria gonorrhoeae
cggccttctgcgagaaattc

SEQ ID NO: 55670 - DNA, 20 bp, Neisseria gonorrhoeae
tgcgagaaattccgccccca

SEQ ID NO: 55671 - DNA, 20 bp, Neisseria gonorrhoeae
ttgctgaaaatgccggggaa

SEQ ID NO: 55672 - DNA, 20 bp, Neisseria gonorrhoeae
ctgaaaatgccggggaaggg

SEQ ID NO: 55673 - DNA, 20 bp, Neisseria gonorrhoeae
cgtcctgcgtatcggtttgc

SEQ ID NO: 55674 - DNA, 20 bp, Neisseria gonorrhoeae
gcggcgcaccgcccgctgcc

SEQ ID NO: 55675 - DNA, 20 bp, Neisseria gonorrhoeae
cggcgcaccgcccgctgcct

SEQ ID NO: 55676 - DNA, 20 bp, Neisseria gonorrhoeae
tccatactagtaggtgctcc

SEQ ID NO: 55677 - DNA, 20 bp, Neisseria gonorrhoeae
acaacatcaaccctgtcgcc

SEQ ID NO: 55678 - DNA, 20 bp, Neisseria gonorrhoeae
gcgacagggttgatgttgtt

SEQ ID NO: 55679 - DNA, 20 bp, Neisseria gonorrhoeae
atgttgttaatatgcctgat

SEQ ID NO: 55680 - DNA, 20 bp, Neisseria gonorrhoeae
ttaatatgcctgatggagca

SEQ ID NO: 55681 - DNA, 20 bp, Neisseria gonorrhoeae
gatgtgcatcatgaaacggg

SEQ ID NO: 55682 - DNA, 20 bp, Neisseria gonorrhoeae
gcgcgaggcggtttgcgatg

SEQ ID NO: 55683 - DNA, 20 bp, Neisseria gonorrhoeae
cgcgaggcggtttgcgatgg

SEQ ID NO: 55684 - DNA, 20 bp, Neisseria gonorrhoeae
gcgatggggaggtttggaag

SEQ ID NO: 55685 - DNA, 20 bp, Neisseria gonorrhoeae
cgatggggaggtttggaagc

SEQ ID NO: 55686 - DNA, 20 bp, Neisseria gonorrhoeae
ttgtacaaccgaataacctg

SEQ ID NO: 55687 - DNA, 20 bp, Neisseria gonorrhoeae
tacaaccgaataacctgcat

SEQ ID NO: 55688 - DNA, 20 bp, Neisseria gonorrhoeae
tcggcaacctgctggcaggc

SEQ ID NO: 55689 - DNA, 20 bp, Neisseria gonorrhoeae
cggcaacctgctggcaggcg

SEQ ID NO: 55690 - DNA, 20 bp, Neisseria gonorrhoeae
ggcaacctgctggcaggcgt

SEQ ID NO: 55691 - DNA, 20 bp, Neisseria gonorrhoeae
ggatgaggcggcgtggtggt

SEQ ID NO: 55692 - DNA, 20 bp, Neisseria gonorrhoeae
gggttgggcggcatcttgtc

SEQ ID NO: 55693 - DNA, 20 bp, Neisseria gonorrhoeae
ggcggcatcttgtccgacgg

SEQ ID NO: 55694 - DNA, 20 bp, Neisseria gonorrhoeae
tccgacggcgccgtttggca

SEQ ID NO: 55695 - DNA, 20 bp, Neisseria gonorrhoeae
ggcagccagaattcggtttc

SEQ ID NO: 55696 - DNA, 20 bp, Neisseria gonorrhoeae
ggggcgtgtagcctttggtt

SEQ ID NO: 55697 - DNA, 20 bp, Neisseria gonorrhoeae
gggcgtgtagcctttggttt

SEQ ID NO: 55698 - DNA, 20 bp, Neisseria gonorrhoeae
ggtttggttgttttggcgca

SEQ ID NO: 55699 - DNA, 20 bp, Neisseria gonorrhoeae
gtttggttgttttggcgcag

SEQ ID NO: 55700 - DNA, 20 bp, Neisseria gonorrhoeae
ggttgttttggcgcaggtag

SEQ ID NO: 55701 - DNA, 20 bp, Neisseria gonorrhoeae
tcctgaatgcgggcggtgcg

SEQ ID NO: 55702 - DNA, 20 bp, Neisseria gonorrhoeae
cctgaatgcgggcggtgcgc

SEQ ID NO: 55703 - DNA, 20 bp, Neisseria gonorrhoeae
ctgaatgcgggcggtgcgcg

SEQ ID NO: 55704 - DNA, 20 bp, Neisseria gonorrhoeae
agcagaacgtcggtgtcttt

SEQ ID NO: 55705 - DNA, 20 bp, Neisseria gonorrhoeae
tgctcaacgtcccccatccg

SEQ ID NO: 55706 - DNA, 20 bp, Neisseria gonorrhoeae
ccgacctcacctaccacgga

SEQ ID NO: 55707 - DNA, 20 bp, Neisseria gonorrhoeae
ggcaacatccacttcaaatc

SEQ ID NO: 55708 - DNA, 20 bp, Neisseria gonorrhoeae
acggaggatttgaagtggat

SEQ ID NO: 55709 - DNA, 20 bp, Neisseria gonorrhoeae
gaagtggatgttgcccaagc

SEQ ID NO: 55710 - DNA, 20 bp, Neisseria gonorrhoeae
aagtggatgttgcccaagcc

SEQ ID NO: 55711 - DNA, 20 bp, Neisseria gonorrhoeae
ttaggcatgcccaacgccgg

SEQ ID NO: 55712 - DNA, 20 bp, Neisseria gonorrhoeae
ggcatgcccaacgccggcaa

SEQ ID NO: 55713 - DNA, 20 bp, Neisseria gonorrhoeae
ccgccgtctccgccgcacgc

SEQ ID NO: 55714 - DNA, 20 bp, Neisseria gonorrhoeae
gcgattttggggcgtgcggc

SEQ ID NO: 55715 - DNA, 20 bp, Neisseria gonorrhoeae
tggggcgtgcggcggagacg

SEQ ID NO: 55716 - DNA, 20 bp, Neisseria gonorrhoeae
ctcaaacacctatcacgcac

SEQ ID NO: 55717 - DNA, 20 bp, Neisseria gonorrhoeae
cacgttgtcgatttggcacc

SEQ ID NO: 55718 - DNA, 20 bp, Neisseria gonorrhoeae
tcgatttggcacccttcgac

SEQ ID NO: 55719 - DNA, 20 bp, Neisseria gonorrhoeae
gtcgaagggtgccaaatcga

SEQ ID NO: 55720 - DNA, 20 bp, Neisseria gonorrhoeae
gaggaagcggtggccgaggc

SEQ ID NO: 55721 - DNA, 20 bp, Neisseria gonorrhoeae
tacatggtggagcaaccgcg

SEQ ID NO: 55722 - DNA, 20 bp, Neisseria gonorrhoeae
cgcatacgcctgcccgcggt

SEQ ID NO: 55723 - DNA, 20 bp, Neisseria gonorrhoeae
gcatacgcctgcccgcggtt

SEQ ID NO: 55724 - DNA, 20 bp, Neisseria gonorrhoeae
ctccaccatgtataacccgg

SEQ ID NO: 55725 - DNA, 20 bp, Neisseria gonorrhoeae
gtcgccgacggtgaacgcgc

SEQ ID NO: 55726 - DNA, 20 bp, Neisseria gonorrhoeae
gccgcccatgcccagtttgc

SEQ ID NO: 55727 - DNA, 20 bp, Neisseria gonorrhoeae
gcggatgcgtccgacaggga

SEQ ID NO: 55728 - DNA, 20 bp, Neisseria gonorrhoeae
cggatgcgtccgacagggac

SEQ ID NO: 55729 - DNA, 20 bp, Neisseria gonorrhoeae
accgtcggcgaccaactttt

SEQ ID NO: 55730 - DNA, 20 bp, Neisseria gonorrhoeae
gcgcatatttttcgcgcccg

SEQ ID NO: 55731 - DNA, 20 bp, Neisseria gonorrhoeae
ttcgcgcccgcgccggaagc

SEQ ID NO: 55732 - DNA, 20 bp, Neisseria gonorrhoeae
tcgcgcccgcgccggaagcg

SEQ ID NO: 55733 - DNA, 20 bp, Neisseria gonorrhoeae
cgcgcccgcgccggaagcgg

SEQ ID NO: 55734 - DNA, 20 bp, Neisseria gonorrhoeae
gcgcccgcgccggaagcggc

SEQ ID NO: 55735 - DNA, 20 bp, Neisseria gonorrhoeae
atcggcaagattttcggtcg

SEQ ID NO: 55736 - DNA, 20 bp, Neisseria gonorrhoeae
tcggtcgcactgtggcagac

SEQ ID NO: 55737 - DNA, 20 bp, Neisseria gonorrhoeae
cggtcgcactgtggcagacc

SEQ ID NO: 55738 - DNA, 20 bp, Neisseria gonorrhoeae
ggtcgcactgtggcagaccg

SEQ ID NO: 55739 - DNA, 20 bp, Neisseria gonorrhoeae
ccgatgaagttgccgccgcc

SEQ ID NO: 55740 - DNA, 20 bp, Neisseria gonorrhoeae
gcgcgtgaggcggacatgaa

SEQ ID NO: 55741 - DNA, 20 bp, Neisseria gonorrhoeae
ttggcagcagatgccggcgc

SEQ ID NO: 55742 - DNA, 20 bp, Neisseria gonorrhoeae
tggcagcagatgccggcgca

SEQ ID NO: 55743 - DNA, 20 bp, Neisseria gonorrhoeae
ggcagcagatgccggcgcat

SEQ ID NO: 55744 - DNA, 20 bp, Neisseria gonorrhoeae
gcagcagatgccggcgcata

SEQ ID NO: 55745 - DNA, 20 bp, Neisseria gonorrhoeae
cggctgggcgtttgaccggc

SEQ ID NO: 55746 - DNA, 20 bp, Neisseria gonorrhoeae
ggctgggcgtttgaccggcc

SEQ ID NO: 55747 - DNA, 20 bp, Neisseria gonorrhoeae
gaccggccgcagtatgagtt

SEQ ID NO: 55748 - DNA, 20 bp, Neisseria gonorrhoeae
accggccgcagtatgagttg

SEQ ID NO: 55749 - DNA, 20 bp, Neisseria gonorrhoeae
ggttcgctgtcgcctgttgc

SEQ ID NO: 55750 - DNA, 20 bp, Neisseria gonorrhoeae
ccgtgccgaagcggcgggat

SEQ ID NO: 55751 - DNA, 20 bp, Neisseria gonorrhoeae
cgtgccgaagcggcgggatt

SEQ ID NO: 55752 - DNA, 20 bp, Neisseria gonorrhoeae
ggaacgttttttgctgttgg

SEQ ID NO: 55753 - DNA, 20 bp, Neisseria gonorrhoeae
tttgctgttggacggcggga

SEQ ID NO: 55754 - DNA, 20 bp, Neisseria gonorrhoeae
ttgctgttggacggcgggaa

SEQ ID NO: 55755 - DNA, 20 bp, Neisseria gonorrhoeae
ccgatgccggattcggcggg

SEQ ID NO: 55756 - DNA, 20 bp, Neisseria gonorrhoeae
ggcggggcgcatattgtcga

SEQ ID NO: 55757 - DNA, 20 bp, Neisseria gonorrhoeae
tcgaacactttgccgaagcc

SEQ ID NO: 55758 - DNA, 20 bp, Neisseria gonorrhoeae
gccgaagccgacaggcagga

SEQ ID NO: 55759 - DNA, 20 bp, Neisseria gonorrhoeae
ccgaagccgacaggcaggac

SEQ ID NO: 55760 - DNA, 20 bp, Neisseria gonorrhoeae
gtgcctgtcggaaagaagcc

SEQ ID NO: 55761 - DNA, 20 bp, Neisseria gonorrhoeae
gaacaaccgtccgatttggt

SEQ ID NO: 55762 - DNA, 20 bp, Neisseria gonorrhoeae
aacaaccgtccgatttggtg

SEQ ID NO: 55763 - DNA, 20 bp, Neisseria gonorrhoeae
ggtgcggacagggttgccat

SEQ ID NO: 55764 - DNA, 20 bp, Neisseria gonorrhoeae
gtgcggacagggttgccatt

SEQ ID NO: 55765 - DNA, 20 bp, Neisseria gonorrhoeae
acggggtcgccgctgcgtga

SEQ ID NO: 55766 - DNA, 20 bp, Neisseria gonorrhoeae
agcaatacgccgtcaaaacc

SEQ ID NO: 55767 - DNA, 20 bp, Neisseria gonorrhoeae
catcacttgcgccgcctgcg

SEQ ID NO: 55768 - DNA, 20 bp, Neisseria gonorrhoeae
tgacggcgtattgctgaaca

SEQ ID NO: 55769 - DNA, 20 bp, Neisseria gonorrhoeae
gacggcgtattgctgaacac

SEQ ID NO: 55770 - DNA, 20 bp, Neisseria gonorrhoeae
ggtcgtggtctggaaaatcg

SEQ ID NO: 55771 - DNA, 20 bp, Neisseria gonorrhoeae
gtcgtggtctggaaaatcgc

SEQ ID NO: 55772 - DNA, 20 bp, Neisseria gonorrhoeae
ggcgacggagtgcgtactca

SEQ ID NO: 55773 - DNA, 20 bp, Neisseria gonorrhoeae
ggtttgagtacgcactccgt

SEQ ID NO: 55774 - DNA, 20 bp, Neisseria gonorrhoeae
gagtacgcactccgtcgccg

SEQ ID NO: 55775 - DNA, 20 bp, Neisseria gonorrhoeae
gccgcgtatgccgcgcaagg

SEQ ID NO: 55776 - DNA, 20 bp, Neisseria gonorrhoeae
gttccacgcggttttcgcgc

SEQ ID NO: 55777 - DNA, 20 bp, Neisseria gonorrhoeae
cacgcggttttcgcgccgta

SEQ ID NO: 55778 - DNA, 20 bp, Neisseria gonorrhoeae
tcgcgccgtagccccggcag

SEQ ID NO: 55779 - DNA, 20 bp, Neisseria gonorrhoeae
cgcgccgtagccccggcagt

SEQ ID NO: 55780 - DNA, 20 bp, Neisseria gonorrhoeae
tcctgcccgtgccacacaat

SEQ ID NO: 55781 - DNA, 20 bp, Neisseria gonorrhoeae
tcctgcatcatcgtgagcgt

SEQ ID NO: 55782 - DNA, 20 bp, Neisseria gonorrhoeae
cctgcatcatcgtgagcgtg

SEQ ID NO: 55783 - DNA, 20 bp, Neisseria gonorrhoeae
ctgcatcatcgtgagcgtgt

SEQ ID NO: 55784 - DNA, 20 bp, Neisseria gonorrhoeae
agacggcatcggatgccgcg

SEQ ID NO: 55785 - DNA, 20 bp, Neisseria gonorrhoeae
ccgcaaacgggcggcgtgct

SEQ ID NO: 55786 - DNA, 20 bp, Neisseria gonorrhoeae
gcgcgtgtagtcggcggcca

SEQ ID NO: 55787 - DNA, 20 bp, Neisseria gonorrhoeae
gactgccgttccgaaggtca

SEQ ID NO: 55788 - DNA, 20 bp, Neisseria gonorrhoeae
ggaacggcagtcgaactgtc

SEQ ID NO: 55789 - DNA, 20 bp, Neisseria gonorrhoeae
cctggctgccgctggccgcc

SEQ ID NO: 55790 - DNA, 20 bp, Neisseria gonorrhoeae
cggcaatcgataccgccgcg

SEQ ID NO: 55791 - DNA, 20 bp, Neisseria gonorrhoeae
ggcaatcgataccgccgcgc

SEQ ID NO: 55792 - DNA, 20 bp, Neisseria gonorrhoeae
ggttcggcgcggcggtatcg

SEQ ID NO: 55793 - DNA, 20 bp, Neisseria gonorrhoeae
gttcggcgcggcggtatcga

SEQ ID NO: 55794 - DNA, 20 bp, Neisseria gonorrhoeae
ggcgcggcggtatcgattgc

SEQ ID NO: 55795 - DNA, 20 bp, Neisseria gonorrhoeae
gacctgcgaatacgatatgg

SEQ ID NO: 55796 - DNA, 20 bp, Neisseria gonorrhoeae
acctgcgaatacgatatggt

SEQ ID NO: 55797 - DNA, 20 bp, Neisseria gonorrhoeae
acctcgcccgtctggacggc

SEQ ID NO: 55798 - DNA, 20 bp, Neisseria gonorrhoeae
cctcgcccgtctggacggca

SEQ ID NO: 55799 - DNA, 20 bp, Neisseria gonorrhoeae
aggcgcaccatcgggcggat

SEQ ID NO: 55800 - DNA, 20 bp, Neisseria gonorrhoeae
gaacgcgtcggactgctaga

SEQ ID NO: 55801 - DNA, 20 bp, Neisseria gonorrhoeae
ccggcggtcagaaacagcgc

SEQ ID NO: 55802 - DNA, 20 bp, Neisseria gonorrhoeae
cggcggtcagaaacagcgca

SEQ ID NO: 55803 - DNA, 20 bp, Neisseria gonorrhoeae
ctgaccgccggaaagttcgc

SEQ ID NO: 55804 - DNA, 20 bp, Neisseria gonorrhoeae
tgaccgccggaaagttcgcg

SEQ ID NO: 55805 - DNA, 20 bp, Neisseria gonorrhoeae
acgttgaaatcgccaaagac

SEQ ID NO: 55806 - DNA, 20 bp, Neisseria gonorrhoeae
aaatcgccaaagacctggcc

SEQ ID NO: 55807 - DNA, 20 bp, Neisseria gonorrhoeae
gtcctgaccgaggccgcaaa

SEQ ID NO: 55808 - DNA, 20 bp, Neisseria gonorrhoeae
gacgcggtttgcggcctcgg

SEQ ID NO: 55809 - DNA, 20 bp, Neisseria gonorrhoeae
gcggcctcggtcaggacgaa

SEQ ID NO: 55810 - DNA, 20 bp, Neisseria gonorrhoeae
ggcaacagcaaaggtatggc

SEQ ID NO: 55811 - DNA, 20 bp, Neisseria gonorrhoeae
gcgatgctggtggtggggct

SEQ ID NO: 55812 - DNA, 20 bp, Neisseria gonorrhoeae
ccaaaagccccaccaccagc

SEQ ID NO: 55813 - DNA, 20 bp, Neisseria gonorrhoeae
gctgttgccgaatatcgcca

SEQ ID NO: 55814 - DNA, 20 bp, Neisseria gonorrhoeae
ctgttgccgaatatcgccat

SEQ ID NO: 55815 - DNA, 20 bp, Neisseria gonorrhoeae
ccaccgccgccattgtcggc

SEQ ID NO: 55816 - DNA, 20 bp, Neisseria gonorrhoeae
tcggcacggcgggggcgttg

SEQ ID NO: 55817 - DNA, 20 bp, Neisseria gonorrhoeae
ggcgatgccggttcgcccgc

SEQ ID NO: 55818 - DNA, 20 bp, Neisseria gonorrhoeae
gcccgcgtccgattccacgc

SEQ ID NO: 55819 - DNA, 20 bp, Neisseria gonorrhoeae
cacgctgggcccgacgatgg

SEQ ID NO: 55820 - DNA, 20 bp, Neisseria gonorrhoeae
ccagcccccttccaaggcac

SEQ ID NO: 55821 - DNA, 20 bp, Neisseria gonorrhoeae
caaggcacggtaaaccgcca

SEQ ID NO: 55822 - DNA, 20 bp, Neisseria gonorrhoeae
gcccgcttccagcaggattt

SEQ ID NO: 55823 - DNA, 20 bp, Neisseria gonorrhoeae
cagcaggattttcagagcct

SEQ ID NO: 55824 - DNA, 20 bp, Neisseria gonorrhoeae
tcagagcctccgccgcctgt

SEQ ID NO: 55825 - DNA, 20 bp, Neisseria gonorrhoeae
ccatccgccgcgtcaaagtc

SEQ ID NO: 55826 - DNA, 20 bp, Neisseria gonorrhoeae
catccgccgcgtcaaagtca

SEQ ID NO: 55827 - DNA, 20 bp, Neisseria gonorrhoeae
ttcggtgcgggcgatttctt

SEQ ID NO: 55828 - DNA, 20 bp, Neisseria gonorrhoeae
ggtgcgggcgatttcttcgt

SEQ ID NO: 55829 - DNA, 20 bp, Neisseria gonorrhoeae
cttcgtcaggcgagagggct

SEQ ID NO: 55830 - DNA, 20 bp, Neisseria gonorrhoeae
gaaaccttggttgccgcgac

SEQ ID NO: 55831 - DNA, 20 bp, Neisseria gonorrhoeae
gttgccgcgactttggaagc

SEQ ID NO: 55832 - DNA, 20 bp, Neisseria gonorrhoeae
ccgcgactttggaagccagc

SEQ ID NO: 55833 - DNA, 20 bp, Neisseria gonorrhoeae
ggaagccagcatcctgccgg

SEQ ID NO: 55834 - DNA, 20 bp, Neisseria gonorrhoeae
gaagccagcatcctgccgga

SEQ ID NO: 55835 - DNA, 20 bp, Neisseria gonorrhoeae
gcgcaataccggctgatagt

SEQ ID NO: 55836 - DNA, 20 bp, Neisseria gonorrhoeae
cgcaataccggctgatagtg

SEQ ID NO: 55837 - DNA, 20 bp, Neisseria gonorrhoeae
cgcaaaccttgcgccacgcc

SEQ ID NO: 55838 - DNA, 20 bp, Neisseria gonorrhoeae
cgccacgccgttgatggtca

SEQ ID NO: 55839 - DNA, 20 bp, Neisseria gonorrhoeae
atggtcaggtgcaccatcag

SEQ ID NO: 55840 - DNA, 20 bp, Neisseria gonorrhoeae
tcctttcccgaaaccttgga

SEQ ID NO: 55841 - DNA, 20 bp, Neisseria gonorrhoeae
cctttcccgaaaccttggaa

SEQ ID NO: 55842 - DNA, 20 bp, Neisseria gonorrhoeae
ctttcccgaaaccttggaag

SEQ ID NO: 55843 - DNA, 20 bp, Neisseria gonorrhoeae
cccgaaaccttggaagtgtg

SEQ ID NO: 55844 - DNA, 20 bp, Neisseria gonorrhoeae
ccgaaaccttggaagtgtgt

SEQ ID NO: 55845 - DNA, 20 bp, Neisseria gonorrhoeae
cctccgcaatgggcgcgcag

SEQ ID NO: 55846 - DNA, 20 bp, Neisseria gonorrhoeae
ccggcatcggcgatctcatc

SEQ ID NO: 55847 - DNA, 20 bp, Neisseria gonorrhoeae
acctgtaccggtgcactttc

SEQ ID NO: 55848 - DNA, 20 bp, Neisseria gonorrhoeae
cgcgaaagtgcaccggtaca

SEQ ID NO: 55849 - DNA, 20 bp, Neisseria gonorrhoeae
tgggctgcgcgcccattgcg

SEQ ID NO: 55850 - DNA, 20 bp, Neisseria gonorrhoeae
gcgttcgaacagcggcgtgc

SEQ ID NO: 55851 - DNA, 20 bp, Neisseria gonorrhoeae
cgttcgaacagcggcgtgcc

SEQ ID NO: 55852 - DNA, 20 bp, Neisseria gonorrhoeae
gaacagcggcgtgccgtagt

SEQ ID NO: 55853 - DNA, 20 bp, Neisseria gonorrhoeae
tcgagcatacggatctggtg

SEQ ID NO: 55854 - DNA, 20 bp, Neisseria gonorrhoeae
cgagcatacggatctggtgg

SEQ ID NO: 55855 - DNA, 20 bp, Neisseria gonorrhoeae
cgtcccgacattgcccccgc

SEQ ID NO: 55856 - DNA, 20 bp, Neisseria gonorrhoeae
cccccgccgatttgggcgca

SEQ ID NO: 55857 - DNA, 20 bp, Neisseria gonorrhoeae
gggcgcagactggaagggcg

SEQ ID NO: 55858 - DNA, 20 bp, Neisseria gonorrhoeae
ggcgcagactggaagggcgg

SEQ ID NO: 55859 - DNA, 20 bp, Neisseria gonorrhoeae
ttctgcccgtgccacggttc

SEQ ID NO: 55860 - DNA, 20 bp, Neisseria gonorrhoeae
ctcgaagcgccgaacttcga

SEQ ID NO: 55861 - DNA, 20 bp, Neisseria gonorrhoeae
gatgcggcaaatgcgctgaa

SEQ ID NO: 55862 - DNA, 20 bp, Neisseria gonorrhoeae
tcagcgcatttgccgcatcg

SEQ ID NO: 55863 - DNA, 20 bp, Neisseria gonorrhoeae
cagcgcatttgccgcatcga

SEQ ID NO: 55864 - DNA, 20 bp, Neisseria gonorrhoeae
agcgcatttgccgcatcgaa

SEQ ID NO: 55865 - DNA, 20 bp, Neisseria gonorrhoeae
cagacggcatcattctaaaa

SEQ ID NO: 55866 - DNA, 20 bp, Neisseria gonorrhoeae
agacggcatcattctaaaaa

SEQ ID NO: 55867 - DNA, 20 bp, Neisseria gonorrhoeae
taaaaatgtcaggcatcggg

SEQ ID NO: 55868 - DNA, 20 bp, Neisseria gonorrhoeae
atcagggtttgtggcagatt

SEQ ID NO: 55869 - DNA, 20 bp, Neisseria gonorrhoeae
agttcccgatgcctgacatt

SEQ ID NO: 55870 - DNA, 20 bp, Neisseria gonorrhoeae
tcgccatcacgtccgcgccc

SEQ ID NO: 55871 - DNA, 20 bp, Neisseria gonorrhoeae
cgccatcacgtccgcgcccg

SEQ ID NO: 55872 - DNA, 20 bp, Neisseria gonorrhoeae
gccatcacgtccgcgcccga

SEQ ID NO: 55873 - DNA, 20 bp, Neisseria gonorrhoeae
ggtgtgccggcgcagcggcg

SEQ ID NO: 55874 - DNA, 20 bp, Neisseria gonorrhoeae
gtgtgccggcgcagcggcga

SEQ ID NO: 55875 - DNA, 20 bp, Neisseria gonorrhoeae
accgacttaatcaacgacta

SEQ ID NO: 55876 - DNA, 20 bp, Neisseria gonorrhoeae
atcaacgactacttcggcga

SEQ ID NO: 55877 - DNA, 20 bp, Neisseria gonorrhoeae
ggcgagggcgaataatgagt

SEQ ID NO: 55878 - DNA, 20 bp, Neisseria gonorrhoeae
gcccgccgccacgccgtgca

SEQ ID NO: 55879 - DNA, 20 bp, Neisseria gonorrhoeae
cccgccgccacgccgtgcag

SEQ ID NO: 55880 - DNA, 20 bp, Neisseria gonorrhoeae
ttccatgtgcgggcgaggtg

SEQ ID NO: 55881 - DNA, 20 bp, Neisseria gonorrhoeae
catgtgcgggcgaggtgctg

SEQ ID NO: 55882 - DNA, 20 bp, Neisseria gonorrhoeae
agaaaaatgccgtctgaaga

SEQ ID NO: 55883 - DNA, 20 bp, Neisseria gonorrhoeae
agacggcatttttctgaatg

SEQ ID NO: 55884 - DNA, 20 bp, Neisseria gonorrhoeae
ttctgaatgcggacggctgg

SEQ ID NO: 55885 - DNA, 20 bp, Neisseria gonorrhoeae
cgcgacaacgccctgagcaa

SEQ ID NO: 55886 - DNA, 20 bp, Neisseria gonorrhoeae
gaaacgcgccttgctcaggg

SEQ ID NO: 55887 - DNA, 20 bp, Neisseria gonorrhoeae
ctcagggcgttgtcgcgtaa

SEQ ID NO: 55888 - DNA, 20 bp, Neisseria gonorrhoeae
tcgcgtaattgcgcgtccgg

SEQ ID NO: 55889 - DNA, 20 bp, Neisseria gonorrhoeae
cgcgtccggccagcctttgg

SEQ ID NO: 55890 - DNA, 20 bp, Neisseria gonorrhoeae
gtgtcgatttttttggtgtc

SEQ ID NO: 55891 - DNA, 20 bp, Neisseria gonorrhoeae
ttttggtgtcgtcggcggtg

SEQ ID NO: 55892 - DNA, 20 bp, Neisseria gonorrhoeae
tttggtgtcgtcggcggtgc

SEQ ID NO: 55893 - DNA, 20 bp, Neisseria gonorrhoeae
ttggtgtcgtcggcggtgcc

SEQ ID NO: 55894 - DNA, 20 bp, Neisseria gonorrhoeae
tggtgtcgtcggcggtgccg

SEQ ID NO: 55895 - DNA, 20 bp, Neisseria gonorrhoeae
gcggcggtttgcggcaacac

SEQ ID NO: 55896 - DNA, 20 bp, Neisseria gonorrhoeae
gcggcaacacgggggcgagg

SEQ ID NO: 55897 - DNA, 20 bp, Neisseria gonorrhoeae
cggcaacacgggggcgaggt

SEQ ID NO: 55898 - DNA, 20 bp, Neisseria gonorrhoeae
atgagttcgctgcatacttc

SEQ ID NO: 55899 - DNA, 20 bp, Neisseria gonorrhoeae
accatgctgaccgcctacct

SEQ ID NO: 55900 - DNA, 20 bp, Neisseria gonorrhoeae
gattttgccgtcggtgttga

SEQ ID NO: 55901 - DNA, 20 bp, Neisseria gonorrhoeae
attttgccgtcggtgttgac

SEQ ID NO: 55902 - DNA, 20 bp, Neisseria gonorrhoeae
tgccgtcggtgttgacggca

SEQ ID NO: 55903 - DNA, 20 bp, Neisseria gonorrhoeae
gccgtcggtgttgacggcaa

SEQ ID NO: 55904 - DNA, 20 bp, Neisseria gonorrhoeae
ccgtcggtgttgacggcaat

SEQ ID NO: 55905 - DNA, 20 bp, Neisseria gonorrhoeae
tgcgcgcggtgatggggaat

SEQ ID NO: 55906 - DNA, 20 bp, Neisseria gonorrhoeae
tcgattgtgccgctgttttt

SEQ ID NO: 55907 - DNA, 20 bp, Neisseria gonorrhoeae
tgccgctgttttttcccgtc

SEQ ID NO: 55908 - DNA, 20 bp, Neisseria gonorrhoeae
cccgattccccatcaccgcg

SEQ ID NO: 55909 - DNA, 20 bp, Neisseria gonorrhoeae
ccgattccccatcaccgcgc

SEQ ID NO: 55910 - DNA, 20 bp, Neisseria gonorrhoeae
gcggtttttcaaattggcgc

SEQ ID NO: 55911 - DNA, 20 bp, Neisseria gonorrhoeae
ttcaaattggcgcagccgag

SEQ ID NO: 55912 - DNA, 20 bp, Neisseria gonorrhoeae
tcaaattggcgcagccgagg

SEQ ID NO: 55913 - DNA, 20 bp, Neisseria gonorrhoeae
caaattggcgcagccgaggc

SEQ ID NO: 55914 - DNA, 20 bp, Neisseria gonorrhoeae
aaattggcgcagccgaggcg

SEQ ID NO: 55915 - DNA, 20 bp, Neisseria gonorrhoeae
cttgccgtggcgcgcgaagg

SEQ ID NO: 55916 - DNA, 20 bp, Neisseria gonorrhoeae
ttgccgtggcgcgcgaaggt

SEQ ID NO: 55917 - DNA, 20 bp, Neisseria gonorrhoeae
ccgtggcgcgcgaaggtttg

SEQ ID NO: 55918 - DNA, 20 bp, Neisseria gonorrhoeae
ggagagcgtttttttcctgc

SEQ ID NO: 55919 - DNA, 20 bp, Neisseria gonorrhoeae
gagagcgtttttttcctgct

SEQ ID NO: 55920 - DNA, 20 bp, Neisseria gonorrhoeae
aaatggtgggcacagatgcg

SEQ ID NO: 55921 - DNA, 20 bp, Neisseria gonorrhoeae
aatggtgggcacagatgcgg

SEQ ID NO: 55922 - DNA, 20 bp, Neisseria gonorrhoeae
ggcgaccttcacgccgttct

SEQ ID NO: 55923 - DNA, 20 bp, Neisseria gonorrhoeae
gcgaccttcacgccgttctg

SEQ ID NO: 55924 - DNA, 20 bp, Neisseria gonorrhoeae
acgccgttctgccgcatctg

SEQ ID NO: 55925 - DNA, 20 bp, Neisseria gonorrhoeae
acaagccgagagaagaaacg

SEQ ID NO: 55926 - DNA, 20 bp, Neisseria gonorrhoeae
tcctgatgttccgtcttttg

SEQ ID NO: 55927 - DNA, 20 bp, Neisseria gonorrhoeae
cctgatgttccgtcttttgg

SEQ ID NO: 55928 - DNA, 20 bp, Neisseria gonorrhoeae
ctgatgttccgtcttttggg

SEQ ID NO: 55929 - DNA, 20 bp, Neisseria gonorrhoeae
cgtcttttgggtttttatgt

SEQ ID NO: 55930 - DNA, 20 bp, Neisseria gonorrhoeae
gggcggtccggaacggccgg

SEQ ID NO: 55931 - DNA, 20 bp, Neisseria gonorrhoeae
ggcggtccggaacggccggg

SEQ ID NO: 55932 - DNA, 20 bp, Neisseria gonorrhoeae
ttccgggctgtccgtccgta

SEQ ID NO: 55933 - DNA, 20 bp, Neisseria gonorrhoeae
cgggctgtccgtccgtatcg

SEQ ID NO: 55934 - DNA, 20 bp, Neisseria gonorrhoeae
gcatcgggattcaaatcggg

SEQ ID NO: 55935 - DNA, 20 bp, Neisseria gonorrhoeae
tctttcggccattcgccgtg

SEQ ID NO: 55936 - DNA, 20 bp, Neisseria gonorrhoeae
cggccattcgccgtgattcg

SEQ ID NO: 55937 - DNA, 20 bp, Neisseria gonorrhoeae
ggccattcgccgtgattcgg

SEQ ID NO: 55938 - DNA, 20 bp, Neisseria gonorrhoeae
gccgtgattcgggcaatacc

SEQ ID NO: 55939 - DNA, 20 bp, Neisseria gonorrhoeae
gggcaatacccggcaacgat

SEQ ID NO: 55940 - DNA, 20 bp, Neisseria gonorrhoeae
ggtagagttggcggatttgg

SEQ ID NO: 55941 - DNA, 20 bp, Neisseria gonorrhoeae
gcggatttggcaggcctcaa

SEQ ID NO: 55942 - DNA, 20 bp, Neisseria gonorrhoeae
ggcaggcctcaacccatcct

SEQ ID NO: 55943 - DNA, 20 bp, Neisseria gonorrhoeae
gcaggcctcaacccatcctg

SEQ ID NO: 55944 - DNA, 20 bp, Neisseria gonorrhoeae
gtaaaaggcgggcagggtgg

SEQ ID NO: 55945 - DNA, 20 bp, Neisseria gonorrhoeae
tgatccgctgttttgcttcg

SEQ ID NO: 55946 - DNA, 20 bp, Neisseria gonorrhoeae
gatccgctgttttgcttcgg

SEQ ID NO: 55947 - DNA, 20 bp, Neisseria gonorrhoeae
atccgctgttttgcttcggg

SEQ ID NO: 55948 - DNA, 20 bp, Neisseria gonorrhoeae
tgcttcgggcgtgtaggggg

SEQ ID NO: 55949 - DNA, 20 bp, Neisseria gonorrhoeae
gcttcgggcgtgtagggggc

SEQ ID NO: 55950 - DNA, 20 bp, Neisseria gonorrhoeae
caaaaagtcccgcagcagcg

SEQ ID NO: 55951 - DNA, 20 bp, Neisseria gonorrhoeae
ttcgggcgcgccttcgggga

SEQ ID NO: 55952 - DNA, 20 bp, Neisseria gonorrhoeae
tcgggcgcgccttcggggac

SEQ ID NO: 55953 - DNA, 20 bp, Neisseria gonorrhoeae
cgggcgcgccttcggggacg

SEQ ID NO: 55954 - DNA, 20 bp, Neisseria gonorrhoeae
gggcgcgccttcggggacgc

SEQ ID NO: 55955 - DNA, 20 bp, Neisseria gonorrhoeae
ggtgtttggcgcagatgacg

SEQ ID NO: 55956 - DNA, 20 bp, Neisseria gonorrhoeae
gtgtttggcgcagatgacgg

SEQ ID NO: 55957 - DNA, 20 bp, Neisseria gonorrhoeae
ggcgcagatgacggaggggc

SEQ ID NO: 55958 - DNA, 20 bp, Neisseria gonorrhoeae
gcgcagatgacggaggggcg

SEQ ID NO: 55959 - DNA, 20 bp, Neisseria gonorrhoeae
cgcgccgatgatgcggtatt

SEQ ID NO: 55960 - DNA, 20 bp, Neisseria gonorrhoeae
tttcgcgtcggcgctgtttg

SEQ ID NO: 55961 - DNA, 20 bp, Neisseria gonorrhoeae
ttcgcgtcggcgctgtttgt

SEQ ID NO: 55962 - DNA, 20 bp, Neisseria gonorrhoeae
tcgcgtcggcgctgtttgtc

SEQ ID NO: 55963 - DNA, 20 bp, Neisseria gonorrhoeae
cgcgtcggcgctgtttgtct

SEQ ID NO: 55964 - DNA, 20 bp, Neisseria gonorrhoeae
gcgtcggcgctgtttgtctt

SEQ ID NO: 55965 - DNA, 20 bp, Neisseria gonorrhoeae
ttccaagcaccccggcgcgg

SEQ ID NO: 55966 - DNA, 20 bp, Neisseria gonorrhoeae
tccaagcaccccggcgcggt

SEQ ID NO: 55967 - DNA, 20 bp, Neisseria gonorrhoeae
ccaagcaccccggcgcggta

SEQ ID NO: 55968 - DNA, 20 bp, Neisseria gonorrhoeae
caagcaccccggcgcggtaa

SEQ ID NO: 55969 - DNA, 20 bp, Neisseria gonorrhoeae
ttgaacctgccgatgtcctg

SEQ ID NO: 55970 - DNA, 20 bp, Neisseria gonorrhoeae
gcaggcggcgtactgatgga

SEQ ID NO: 55971 - DNA, 20 bp, Neisseria gonorrhoeae
caggcggcgtactgatggag

SEQ ID NO: 55972 - DNA, 20 bp, Neisseria gonorrhoeae
ggaagccaaagacggcttca

SEQ ID NO: 55973 - DNA, 20 bp, Neisseria gonorrhoeae
gaagccaaagacggcttcat

SEQ ID NO: 55974 - DNA, 20 bp, Neisseria gonorrhoeae
atgcgtgcgaatatggcgat

SEQ ID NO: 55975 - DNA, 20 bp, Neisseria gonorrhoeae
gggcatatcggtgcagaagc

SEQ ID NO: 55976 - DNA, 20 bp, Neisseria gonorrhoeae
ttcatcgggcggggaagcgg

SEQ ID NO: 55977 - DNA, 20 bp, Neisseria gonorrhoeae
tcatcgggcggggaagcggt

SEQ ID NO: 55978 - DNA, 20 bp, Neisseria gonorrhoeae
catcgggcggggaagcggtg

SEQ ID NO: 55979 - DNA, 20 bp, Neisseria gonorrhoeae
atcgggcggggaagcggtga

SEQ ID NO: 55980 - DNA, 20 bp, Neisseria gonorrhoeae
ggcggtggcgtagttgctgc

SEQ ID NO: 55981 - DNA, 20 bp, Neisseria gonorrhoeae
gcggtggcgtagttgctgcg

SEQ ID NO: 55982 - DNA, 20 bp, Neisseria gonorrhoeae
ctgcggttgcggcgtatggc

SEQ ID NO: 55983 - DNA, 20 bp, Neisseria gonorrhoeae
cggcgtatggcgaggcggtc

SEQ ID NO: 55984 - DNA, 20 bp, Neisseria gonorrhoeae
tccgacggtgagcgaaattt

SEQ ID NO: 55985 - DNA, 20 bp, Neisseria gonorrhoeae
tgccgcctactgcgctgccg

SEQ ID NO: 55986 - DNA, 20 bp, Neisseria gonorrhoeae
gccgcctactgcgctgccga

SEQ ID NO: 55987 - DNA, 20 bp, Neisseria gonorrhoeae
ccgcctactgcgctgccgat

SEQ ID NO: 55988 - DNA, 20 bp, Neisseria gonorrhoeae
cgctcaccgtcggacaactc

SEQ ID NO: 55989 - DNA, 20 bp, Neisseria gonorrhoeae
cgttttggcgggcaagccgg

SEQ ID NO: 55990 - DNA, 20 bp, Neisseria gonorrhoeae
tggcgggcaagccggcctgc

SEQ ID NO: 55991 - DNA, 20 bp, Neisseria gonorrhoeae
ggcgggcaagccggcctgcc

SEQ ID NO: 55992 - DNA, 20 bp, Neisseria gonorrhoeae
gcgggcaagccggcctgcct

SEQ ID NO: 55993 - DNA, 20 bp, Neisseria gonorrhoeae
cctgcctgaaaggttcggat

SEQ ID NO: 55994 - DNA, 20 bp, Neisseria gonorrhoeae
cgatgcgtggtggacggaag

SEQ ID NO: 55995 - DNA, 20 bp, Neisseria gonorrhoeae
cgaaatcgatgcgctgaagg

SEQ ID NO: 55996 - DNA, 20 bp, Neisseria gonorrhoeae
agcgcatcgatttcggaaca

SEQ ID NO: 55997 - DNA, 20 bp, Neisseria gonorrhoeae
cggaacacagcagcgcggca

SEQ ID NO: 55998 - DNA, 20 bp, Neisseria gonorrhoeae
ggaacacagcagcgcggcat

SEQ ID NO: 55999 - DNA, 20 bp, Neisseria gonorrhoeae
gccttcggctccgcgcagaa

SEQ ID NO: 56000 - DNA, 20 bp, Neisseria gonorrhoeae
ccttcggctccgcgcagaat

SEQ ID NO: 56001 - DNA, 20 bp, Neisseria gonorrhoeae
ggctccgcgcagaatgtcgc

SEQ ID NO: 56002 - DNA, 20 bp, Neisseria gonorrhoeae
gagggcggaacaggttacga

SEQ ID NO: 56003 - DNA, 20 bp, Neisseria gonorrhoeae
agggcggaacaggttacgat

SEQ ID NO: 56004 - DNA, 20 bp, Neisseria gonorrhoeae
tcgcggttggcttgggtgtg

SEQ ID NO: 56005 - DNA, 20 bp, Neisseria gonorrhoeae
gcttgggtgtggaactcgtc

SEQ ID NO: 56006 - DNA, 20 bp, Neisseria gonorrhoeae
ggtgtggaactcgtcgcctt

SEQ ID NO: 56007 - DNA, 20 bp, Neisseria gonorrhoeae
ggcatagggacattgaccga

SEQ ID NO: 56008 - DNA, 20 bp, Neisseria gonorrhoeae
accgaggtgtttctgcaggg

SEQ ID NO: 56009 - DNA, 20 bp, Neisseria gonorrhoeae
ccgatgccggaagcgcgcaa

SEQ ID NO: 56010 - DNA, 20 bp, Neisseria gonorrhoeae
cgtgattctgattaccggcg

SEQ ID NO: 56011 - DNA, 20 bp, Neisseria gonorrhoeae
tgattaccggcgcgggcggt

SEQ ID NO: 56012 - DNA, 20 bp, Neisseria gonorrhoeae
ccggcgcgggcggtatgttc

SEQ ID NO: 56013 - DNA, 20 bp, Neisseria gonorrhoeae
ggcggcgttttgcgcgcttc

SEQ ID NO: 56014 - DNA, 20 bp, Neisseria gonorrhoeae
gggaacgggaacatggatgg

SEQ ID NO: 56015 - DNA, 20 bp, Neisseria gonorrhoeae
gccgagcatatagccgctga

SEQ ID NO: 56016 - DNA, 20 bp, Neisseria gonorrhoeae
ccgagcatatagccgctgaa

SEQ ID NO: 56017 - DNA, 20 bp, Neisseria gonorrhoeae
atcacatggtatttcagcgg

SEQ ID NO: 56018 - DNA, 20 bp, Neisseria gonorrhoeae
cagcggctatatgctcggca

SEQ ID NO: 56019 - DNA, 20 bp, Neisseria gonorrhoeae
catgcgccgtgcggtggcga

SEQ ID NO: 56020 - DNA, 20 bp, Neisseria gonorrhoeae
atgcgccgtgcggtggcgaa

SEQ ID NO: 56021 - DNA, 20 bp, Neisseria gonorrhoeae
gccaccgcacggcgcatgaa

SEQ ID NO: 56022 - DNA, 20 bp, Neisseria gonorrhoeae
gcgcttgcctccgtcggcgc

SEQ ID NO: 56023 - DNA, 20 bp, Neisseria gonorrhoeae
cctccgtcggcgcattttcc

SEQ ID NO: 56024 - DNA, 20 bp, Neisseria gonorrhoeae
cggcagggcggcggcaggtt

SEQ ID NO: 56025 - DNA, 20 bp, Neisseria gonorrhoeae
gggcgcaaacggctttcaga

SEQ ID NO: 56026 - DNA, 20 bp, Neisseria gonorrhoeae
ggcgcaaacggctttcagac

SEQ ID NO: 56027 - DNA, 20 bp, Neisseria gonorrhoeae
cagacggcatgccgtatcac

SEQ ID NO: 56028 - DNA, 20 bp, Neisseria gonorrhoeae
agacggcatgccgtatcacg

SEQ ID NO: 56029 - DNA, 20 bp, Neisseria gonorrhoeae
ggttgatgaggccgtcgccg

SEQ ID NO: 56030 - DNA, 20 bp, Neisseria gonorrhoeae
atgaggccgtcgccgaatac

SEQ ID NO: 56031 - DNA, 20 bp, Neisseria gonorrhoeae
ggacgcgacgccgcctacgc

SEQ ID NO: 56032 - DNA, 20 bp, Neisseria gonorrhoeae
ttcgggtttgatttctttga

SEQ ID NO: 56033 - DNA, 20 bp, Neisseria gonorrhoeae
tcgggtttgatttctttgag

SEQ ID NO: 56034 - DNA, 20 bp, Neisseria gonorrhoeae
catcaactgttccataagca

SEQ ID NO: 56035 - DNA, 20 bp, Neisseria gonorrhoeae
cataagcaccttatcacttg

SEQ ID NO: 56036 - DNA, 20 bp, Neisseria gonorrhoeae
tcacttgtagccggaacacc

SEQ ID NO: 56037 - DNA, 20 bp, Neisseria gonorrhoeae
tagccggaacaccttggctc

SEQ ID NO: 56038 - DNA, 20 bp, Neisseria gonorrhoeae
gctcgttccaaatttccaag

SEQ ID NO: 56039 - DNA, 20 bp, Neisseria gonorrhoeae
acgctcaccgtctcgcccag

SEQ ID NO: 56040 - DNA, 20 bp, Neisseria gonorrhoeae
ggattacgggcggtttggcg

SEQ ID NO: 56041 - DNA, 20 bp, Neisseria gonorrhoeae
gattacgggcggtttggcgg

SEQ ID NO: 56042 - DNA, 20 bp, Neisseria gonorrhoeae
cgggcggtttggcggtgttt

SEQ ID NO: 56043 - DNA, 20 bp, Neisseria gonorrhoeae
ggcggtgtttgcctacctga

SEQ ID NO: 56044 - DNA, 20 bp, Neisseria gonorrhoeae
tttggcttgtggggcagggt

SEQ ID NO: 56045 - DNA, 20 bp, Neisseria gonorrhoeae
ggcttgtggggcagggtcgg

SEQ ID NO: 56046 - DNA, 20 bp, Neisseria gonorrhoeae
gcttgtggggcagggtcgga

SEQ ID NO: 56047 - DNA, 20 bp, Neisseria gonorrhoeae
tggggcagggtcggaatttt

SEQ ID NO: 56048 - DNA, 20 bp, Neisseria gonorrhoeae
tgcggcgaacacgcgcccaa

SEQ ID NO: 56049 - DNA, 20 bp, Neisseria gonorrhoeae
gccgtgggtttgcagcgcgt

SEQ ID NO: 56050 - DNA, 20 bp, Neisseria gonorrhoeae
ccgtgggtttgcagcgcgtc

SEQ ID NO: 56051 - DNA, 20 bp, Neisseria gonorrhoeae
gcagcgcgtcatacaggcgc

SEQ ID NO: 56052 - DNA, 20 bp, Neisseria gonorrhoeae
cagcgcgtcatacaggcgcg

SEQ ID NO: 56053 - DNA, 20 bp, Neisseria gonorrhoeae
cgcgctgcaacacgccgcgt

SEQ ID NO: 56054 - DNA, 20 bp, Neisseria gonorrhoeae
cagcgcggaacgggttactt

SEQ ID NO: 56055 - DNA, 20 bp, Neisseria gonorrhoeae
ctttggcagggtcgagtacg

SEQ ID NO: 56056 - DNA, 20 bp, Neisseria gonorrhoeae
ggcagggtcgagtacgccca

SEQ ID NO: 56057 - DNA, 20 bp, Neisseria gonorrhoeae
gcagggtcgagtacgcccat

SEQ ID NO: 56058 - DNA, 20 bp, Neisseria gonorrhoeae
tgacggcgggcatcccgctg

SEQ ID NO: 56059 - DNA, 20 bp, Neisseria gonorrhoeae
tgccatcggccaccgttacc

SEQ ID NO: 56060 - DNA, 20 bp, Neisseria gonorrhoeae
ccggggttctgcgcccttgg

SEQ ID NO: 56061 - DNA, 20 bp, Neisseria gonorrhoeae
tgcgcccttggctttccgcc

SEQ ID NO: 56062 - DNA, 20 bp, Neisseria gonorrhoeae
gctttccgccgcctcggacg

SEQ ID NO: 56063 - DNA, 20 bp, Neisseria gonorrhoeae
ccgccatcatcatcggcggc

SEQ ID NO: 56064 - DNA, 20 bp, Neisseria gonorrhoeae
ccggaattacgcaggcacct

SEQ ID NO: 56065 - DNA, 20 bp, Neisseria gonorrhoeae
cgcaggcacctgaacgcctt

SEQ ID NO: 56066 - DNA, 20 bp, Neisseria gonorrhoeae
tcctccatccgcgtcggcgg

SEQ ID NO: 56067 - DNA, 20 bp, Neisseria gonorrhoeae
aggtgcctgcgtaattccgg

SEQ ID NO: 56068 - DNA, 20 bp, Neisseria gonorrhoeae
gcgggttggatgggcgcgct

SEQ ID NO: 56069 - DNA, 20 bp, Neisseria gonorrhoeae
gatgggcgcgcttttcggca

SEQ ID NO: 56070 - DNA, 20 bp, Neisseria gonorrhoeae
tcggcagggtgcgaagcggc

SEQ ID NO: 56071 - DNA, 20 bp, Neisseria gonorrhoeae
cggcagggtgcgaagcggcg

SEQ ID NO: 56072 - DNA, 20 bp, Neisseria gonorrhoeae
ggcagggtgcgaagcggcgg

SEQ ID NO: 56073 - DNA, 20 bp, Neisseria gonorrhoeae
tggcgcacctctccggtgac

SEQ ID NO: 56074 - DNA, 20 bp, Neisseria gonorrhoeae
ccgcatttcaaagcggcgaa

SEQ ID NO: 56075 - DNA, 20 bp, Neisseria gonorrhoeae
caaagcggcgaagacgtaca

SEQ ID NO: 56076 - DNA, 20 bp, Neisseria gonorrhoeae
aaagcggcgaagacgtacac

SEQ ID NO: 56077 - DNA, 20 bp, Neisseria gonorrhoeae
ggcggcggtgcggcggtgta

SEQ ID NO: 56078 - DNA, 20 bp, Neisseria gonorrhoeae
cccgaaaacggcaccgtggg

SEQ ID NO: 56079 - DNA, 20 bp, Neisseria gonorrhoeae
cccacggtgccgttttcggg

SEQ ID NO: 56080 - DNA, 20 bp, Neisseria gonorrhoeae
tcgggcaatacggcatcggc

SEQ ID NO: 56081 - DNA, 20 bp, Neisseria gonorrhoeae
cgggcaatacggcatcggca

SEQ ID NO: 56082 - DNA, 20 bp, Neisseria gonorrhoeae
gggcaatacggcatcggcag

SEQ ID NO: 56083 - DNA, 20 bp, Neisseria gonorrhoeae
ttctgcataccgatttggcg

SEQ ID NO: 56084 - DNA, 20 bp, Neisseria gonorrhoeae
tctgcataccgatttggcgc

SEQ ID NO: 56085 - DNA, 20 bp, Neisseria gonorrhoeae
ctgcataccgatttggcgca

SEQ ID NO: 56086 - DNA, 20 bp, Neisseria gonorrhoeae
tgcataccgatttggcgcag

SEQ ID NO: 56087 - DNA, 20 bp, Neisseria gonorrhoeae
ggcgcaggtcggtttgttgg

SEQ ID NO: 56088 - DNA, 20 bp, Neisseria gonorrhoeae
cgaacccaaatggggaatct

SEQ ID NO: 56089 - DNA, 20 bp, Neisseria gonorrhoeae
cccatttgggttcggaacgc

SEQ ID NO: 56090 - DNA, 20 bp, Neisseria gonorrhoeae
gggttcggaacgcgcgcacg

SEQ ID NO: 56091 - DNA, 20 bp, Neisseria gonorrhoeae
ggttcggaacgcgcgcacgc

SEQ ID NO: 56092 - DNA, 20 bp, Neisseria gonorrhoeae
ggaacgcgcgcacgcgggct

SEQ ID NO: 56093 - DNA, 20 bp, Neisseria gonorrhoeae
ccagccgcattcgcgatatt

SEQ ID NO: 56094 - DNA, 20 bp, Neisseria gonorrhoeae
cagccgcattcgcgatattc

SEQ ID NO: 56095 - DNA, 20 bp, Neisseria gonorrhoeae
gcgatattcggcggcggggt

SEQ ID NO: 56096 - DNA, 20 bp, Neisseria gonorrhoeae
ggcggcggggtcgctgtcga

SEQ ID NO: 56097 - DNA, 20 bp, Neisseria gonorrhoeae
cggcatcgtcatcgacagcg

SEQ ID NO: 56098 - DNA, 20 bp, Neisseria gonorrhoeae
gagcgacagggtgcggatga

SEQ ID NO: 56099 - DNA, 20 bp, Neisseria gonorrhoeae
agcgacagggtgcggatgac

SEQ ID NO: 56100 - DNA, 20 bp, Neisseria gonorrhoeae
aacgcgccttcaaaccccaa

SEQ ID NO: 56101 - DNA, 20 bp, Neisseria gonorrhoeae
aaaccccaagccgccggaac

SEQ ID NO: 56102 - DNA, 20 bp, Neisseria gonorrhoeae
gaacccgtgttccggcggct

SEQ ID NO: 56103 - DNA, 20 bp, Neisseria gonorrhoeae
tcggcgcggtttttcgggtc

SEQ ID NO: 56104 - DNA, 20 bp, Neisseria gonorrhoeae
cggcgcggtttttcgggtct

SEQ ID NO: 56105 - DNA, 20 bp, Neisseria gonorrhoeae
ggcgcggtttttcgggtctg

SEQ ID NO: 56106 - DNA, 20 bp, Neisseria gonorrhoeae
ttcgggtctgcttgcaactc

SEQ ID NO: 56107 - DNA, 20 bp, Neisseria gonorrhoeae
tcgggtctgcttgcaactcg

SEQ ID NO: 56108 - DNA, 20 bp, Neisseria gonorrhoeae
cggatacggaggattgcggc

SEQ ID NO: 56109 - DNA, 20 bp, Neisseria gonorrhoeae
ggatacggaggattgcggcg

SEQ ID NO: 56110 - DNA, 20 bp, Neisseria gonorrhoeae
cggcgtggaaatgccggcgg

SEQ ID NO: 56111 - DNA, 20 bp, Neisseria gonorrhoeae
cccgacattcagacggcctc

SEQ ID NO: 56112 - DNA, 20 bp, Neisseria gonorrhoeae
agacggcctccccgccggca

SEQ ID NO: 56113 - DNA, 20 bp, Neisseria gonorrhoeae
gcaccttgtttgacggcccg

SEQ ID NO: 56114 - DNA, 20 bp, Neisseria gonorrhoeae
tttgacggcccgttccactt

SEQ ID NO: 56115 - DNA, 20 bp, Neisseria gonorrhoeae
gacggcccgttccacttttt

SEQ ID NO: 56116 - DNA, 20 bp, Neisseria gonorrhoeae
acggcccgttccactttttc

SEQ ID NO: 56117 - DNA, 20 bp, Neisseria gonorrhoeae
cactttttcggcaacggctt

SEQ ID NO: 56118 - DNA, 20 bp, Neisseria gonorrhoeae
cagttttcatgccgcctgaa

SEQ ID NO: 56119 - DNA, 20 bp, Neisseria gonorrhoeae
tcatgccgcctgaaaacccc

SEQ ID NO: 56120 - DNA, 20 bp, Neisseria gonorrhoeae
catgccgcctgaaaaccccc

SEQ ID NO: 56121 - DNA, 20 bp, Neisseria gonorrhoeae
atgccgcctgaaaacccccg

SEQ ID NO: 56122 - DNA, 20 bp, Neisseria gonorrhoeae
tgctgacccagacgattaca

SEQ ID NO: 56123 - DNA, 20 bp, Neisseria gonorrhoeae
atggcgtttgcctggctgtg

SEQ ID NO: 56124 - DNA, 20 bp, Neisseria gonorrhoeae
gcctggctgtggcccggcgt

SEQ ID NO: 56125 - DNA, 20 bp, Neisseria gonorrhoeae
cctggctgtggcccggcgtg

SEQ ID NO: 56126 - DNA, 20 bp, Neisseria gonorrhoeae
tcccacgatttgtggaatcc

SEQ ID NO: 56127 - DNA, 20 bp, Neisseria gonorrhoeae
cccacgatttgtggaatcct

SEQ ID NO: 56128 - DNA, 20 bp, Neisseria gonorrhoeae
ccaactgggcggcaggcgtt

SEQ ID NO: 56129 - DNA, 20 bp, Neisseria gonorrhoeae
ccctgacctgggctttgctg

SEQ ID NO: 56130 - DNA, 20 bp, Neisseria gonorrhoeae
gctgatgacgctgttcctgc

SEQ ID NO: 56131 - DNA, 20 bp, Neisseria gonorrhoeae
ctgatgacgctgttcctgcc

SEQ ID NO: 56132 - DNA, 20 bp, Neisseria gonorrhoeae
ctgccgtggctggacgcggc

SEQ ID NO: 56133 - DNA, 20 bp, Neisseria gonorrhoeae
cgcgctgttgaccgccatat

SEQ ID NO: 56134 - DNA, 20 bp, Neisseria gonorrhoeae
accgccatatcgtaaaaacc

SEQ ID NO: 56135 - DNA, 20 bp, Neisseria gonorrhoeae
gcgcggcggccagcagcttg

SEQ ID NO: 56136 - DNA, 20 bp, Neisseria gonorrhoeae
cgcggcggccagcagcttgt

SEQ ID NO: 56137 - DNA, 20 bp, Neisseria gonorrhoeae
tcttcgtcaaagccgcgtgt

SEQ ID NO: 56138 - DNA, 20 bp, Neisseria gonorrhoeae
tgtaccgccgtcaaacgggc

SEQ ID NO: 56139 - DNA, 20 bp, Neisseria gonorrhoeae
cgcgcgtctgtggtttggcg

SEQ ID NO: 56140 - DNA, 20 bp, Neisseria gonorrhoeae
ggcggccggccagcagtccg

SEQ ID NO: 56141 - DNA, 20 bp, Neisseria gonorrhoeae
gcggccggccagcagtccgc

SEQ ID NO: 56142 - DNA, 20 bp, Neisseria gonorrhoeae
ccgccgcattgggcagcccg

SEQ ID NO: 56143 - DNA, 20 bp, Neisseria gonorrhoeae
ggcgacctcgccatccgcta

SEQ ID NO: 56144 - DNA, 20 bp, Neisseria gonorrhoeae
atcgtcgccctcctcgtgct

SEQ ID NO: 56145 - DNA, 20 bp, Neisseria gonorrhoeae
ggtttggtagcggtagtagc

SEQ ID NO: 56146 - DNA, 20 bp, Neisseria gonorrhoeae
ggtagcggtagtagccgtag

SEQ ID NO: 56147 - DNA, 20 bp, Neisseria gonorrhoeae
gtagcggtagtagccgtagc

SEQ ID NO: 56148 - DNA, 20 bp, Neisseria gonorrhoeae
atattgtccaaatgggcaag

SEQ ID NO: 56149 - DNA, 20 bp, Neisseria gonorrhoeae
tccaaatgggcaaggttcag

SEQ ID NO: 56150 - DNA, 20 bp, Neisseria gonorrhoeae
agcggcgtttcgcgcaccat

SEQ ID NO: 56151 - DNA, 20 bp, Neisseria gonorrhoeae
cgcgcaccatcagcaccagc

SEQ ID NO: 56152 - DNA, 20 bp, Neisseria gonorrhoeae
gcgcaccatcagcaccagcc

SEQ ID NO: 56153 - DNA, 20 bp, Neisseria gonorrhoeae
agacggcattggaagggcag

SEQ ID NO: 56154 - DNA, 20 bp, Neisseria gonorrhoeae
gaagggcaggcacgccgtct

SEQ ID NO: 56155 - DNA, 20 bp, Neisseria gonorrhoeae
ccgccgatgaagccctgttg

SEQ ID NO: 56156 - DNA, 20 bp, Neisseria gonorrhoeae
gtccaacagggcttcatcgg

SEQ ID NO: 56157 - DNA, 20 bp, Neisseria gonorrhoeae
atcggcggcaacggtcgcgt

SEQ ID NO: 56158 - DNA, 20 bp, Neisseria gonorrhoeae
ccgacaaactggaaaccctg

SEQ ID NO: 56159 - DNA, 20 bp, Neisseria gonorrhoeae
ggggcatcggtttgattcct

SEQ ID NO: 56160 - DNA, 20 bp, Neisseria gonorrhoeae
gggcatcggtttgattccta

SEQ ID NO: 56161 - DNA, 20 bp, Neisseria gonorrhoeae
gattcctaccggcgacaaag

SEQ ID NO: 56162 - DNA, 20 bp, Neisseria gonorrhoeae
attcctaccggcgacaaaga

SEQ ID NO: 56163 - DNA, 20 bp, Neisseria gonorrhoeae
ggcgcggttaacgaaagcct

SEQ ID NO: 56164 - DNA, 20 bp, Neisseria gonorrhoeae
cgttaaccgcgcccaactcg

SEQ ID NO: 56165 - DNA, 20 bp, Neisseria gonorrhoeae
gttaaccgcgcccaactcgg

SEQ ID NO: 56166 - DNA, 20 bp, Neisseria gonorrhoeae
accgcgcccaactcggcatc

SEQ ID NO: 56167 - DNA, 20 bp, Neisseria gonorrhoeae
tttcagcaggttttgcacgc

SEQ ID NO: 56168 - DNA, 20 bp, Neisseria gonorrhoeae
cgtcccgccataccgacccg

SEQ ID NO: 56169 - DNA, 20 bp, Neisseria gonorrhoeae
acctcgaccgtaccaatacg

SEQ ID NO: 56170 - DNA, 20 bp, Neisseria gonorrhoeae
cctcgaccgtaccaatacgg

SEQ ID NO: 56171 - DNA, 20 bp, Neisseria gonorrhoeae
ttgcggctcggcaaagccgt

SEQ ID NO: 56172 - DNA, 20 bp, Neisseria gonorrhoeae
cggctcggcaaagccgtggc

SEQ ID NO: 56173 - DNA, 20 bp, Neisseria gonorrhoeae
gatgttgagcgaggcggaca

SEQ ID NO: 56174 - DNA, 20 bp, Neisseria gonorrhoeae
agcgaggcggacattgccgc

SEQ ID NO: 56175 - DNA, 20 bp, Neisseria gonorrhoeae
ccgcgcagacggcatttgcc

SEQ ID NO: 56176 - DNA, 20 bp, Neisseria gonorrhoeae
gccgccgcgttgccgcttct

SEQ ID NO: 56177 - DNA, 20 bp, Neisseria gonorrhoeae
ccgccgcgttgccgcttctg

SEQ ID NO: 56178 - DNA, 20 bp, Neisseria gonorrhoeae
ggcggtgggcggcaggattt

SEQ ID NO: 56179 - DNA, 20 bp, Neisseria gonorrhoeae
gcggtacggcgcgtatgtgc

SEQ ID NO: 56180 - DNA, 20 bp, Neisseria gonorrhoeae
tcgactacatcatcgctact

SEQ ID NO: 56181 - DNA, 20 bp, Neisseria gonorrhoeae
gggcggtaaatgtttggcgg

SEQ ID NO: 56182 - DNA, 20 bp, Neisseria gonorrhoeae
ggcggtaaatgtttggcggg

SEQ ID NO: 56183 - DNA, 20 bp, Neisseria gonorrhoeae
ggcgggtttcttcgggcagg

SEQ ID NO: 56184 - DNA, 20 bp, Neisseria gonorrhoeae
gcgggtttcttcgggcaggg

SEQ ID NO: 56185 - DNA, 20 bp, Neisseria gonorrhoeae
cttcgggcagggcgcgggtc

SEQ ID NO: 56186 - DNA, 20 bp, Neisseria gonorrhoeae
gtccaataataatatcggcg

SEQ ID NO: 56187 - DNA, 20 bp, Neisseria gonorrhoeae
caaaatggcgcgggcaatgg

SEQ ID NO: 56188 - DNA, 20 bp, Neisseria gonorrhoeae
aaaatggcgcgggcaatggc

SEQ ID NO: 56189 - DNA, 20 bp, Neisseria gonorrhoeae
ccgctgtccgccggataagt

SEQ ID NO: 56190 - DNA, 20 bp, Neisseria gonorrhoeae
tccggcggacagcggcaacg

SEQ ID NO: 56191 - DNA, 20 bp, Neisseria gonorrhoeae
gtcctgttcgggcggggtgt

SEQ ID NO: 56192 - DNA, 20 bp, Neisseria gonorrhoeae
tcctgttcgggcggggtgtc

SEQ ID NO: 56193 - DNA, 20 bp, Neisseria gonorrhoeae
gggcggggtgtcgagaaatg

SEQ ID NO: 56194 - DNA, 20 bp, Neisseria gonorrhoeae
ccaacatcagcatccctatg

SEQ ID NO: 56195 - DNA, 20 bp, Neisseria gonorrhoeae
ctcgccgccgacggcgtatg

SEQ ID NO: 56196 - DNA, 20 bp, Neisseria gonorrhoeae
atcaggggggcgatgaaggc

SEQ ID NO: 56197 - DNA, 20 bp, Neisseria gonorrhoeae
ggcgttgccgccaccgaaag

SEQ ID NO: 56198 - DNA, 20 bp, Neisseria gonorrhoeae
ccgccaccgaaagctatctt

SEQ ID NO: 56199 - DNA, 20 bp, Neisseria gonorrhoeae
ccgccttcatcgcccccctg

SEQ ID NO: 56200 - DNA, 20 bp, Neisseria gonorrhoeae
atcgcccccctgatcaacca

SEQ ID NO: 56201 - DNA, 20 bp, Neisseria gonorrhoeae
ggctccggcttctttggcgg

SEQ ID NO: 56202 - DNA, 20 bp, Neisseria gonorrhoeae
gctccggcttctttggcggc

SEQ ID NO: 56203 - DNA, 20 bp, Neisseria gonorrhoeae
tttggcggcagccatggtgc

SEQ ID NO: 56204 - DNA, 20 bp, Neisseria gonorrhoeae
ggcggcagccatggtgcgtc

SEQ ID NO: 56205 - DNA, 20 bp, Neisseria gonorrhoeae
gcggcagccatggtgcgtcc

SEQ ID NO: 56206 - DNA, 20 bp, Neisseria gonorrhoeae
tgatcatacctgtttcccgc

SEQ ID NO: 56207 - DNA, 20 bp, Neisseria gonorrhoeae
cccgcatccggttgcggggt

SEQ ID NO: 56208 - DNA, 20 bp, Neisseria gonorrhoeae
ccgcatccggttgcggggtt

SEQ ID NO: 56209 - DNA, 20 bp, Neisseria gonorrhoeae
cggggttgccgaacatgagt

SEQ ID NO: 56210 - DNA, 20 bp, Neisseria gonorrhoeae
ccgaacatgagttgtgccag

SEQ ID NO: 56211 - DNA, 20 bp, Human papillomavirus type 129
tttgacttaaaactaccatg

SEQ ID NO: 56212 - DNA, 20 bp, Human papillomavirus type 129
ttgacttaaaactaccatgt

SEQ ID NO: 56213 - DNA, 20 bp, Human papillomavirus type 129
tgacttaaaactaccatgta

SEQ ID NO: 56214 - DNA, 20 bp, Human papillomavirus type 129
gacttaaaactaccatgtat

SEQ ID NO: 56215 - DNA, 20 bp, Human papillomavirus type 129
acttaaaactaccatgtata

SEQ ID NO: 56216 - DNA, 20 bp, Human papillomavirus type 129
tctacggatgaggaaccaga

SEQ ID NO: 56217 - DNA, 20 bp, Human papillomavirus type 129
ccaagttgacagttggtgtc

SEQ ID NO: 56218 - DNA, 20 bp, Human papillomavirus type 129
acagttggtgtcctaattgt

SEQ ID NO: 56219 - DNA, 20 bp, Human papillomavirus type 129
gtgtcctaattgtaacaaag

SEQ ID NO: 56220 - DNA, 20 bp, Human papillomavirus type 129
taacaaaggtgtaagagttt

SEQ ID NO: 56221 - DNA, 20 bp, Human papillomavirus type 129
cagatattagtccgagactg

SEQ ID NO: 56222 - DNA, 20 bp, Human papillomavirus type 129
gtccgagactggaagcgatt

SEQ ID NO: 56223 - DNA, 20 bp, Human papillomavirus type 129
gtatatctccagaaaaagaa

SEQ ID NO: 56224 - DNA, 20 bp, Human papillomavirus type 129
tatatctccagaaaaagaaa

SEQ ID NO: 56225 - DNA, 20 bp, Human papillomavirus type 129
ttgtttgaggacagtggaat

SEQ ID NO: 56226 - DNA, 20 bp, Human papillomavirus type 129
atatttttataaaaaggagc

SEQ ID NO: 56227 - DNA, 20 bp, Human papillomavirus type 129
tatttttataaaaaggagca

SEQ ID NO: 56228 - DNA, 20 bp, Human papillomavirus type 129
ttataaaaaggagcatacgg

SEQ ID NO: 56229 - DNA, 20 bp, Human papillomavirus type 129
tataaaaaggagcatacgga

SEQ ID NO: 56230 - DNA, 20 bp, Human papillomavirus type 129
ataaaaaggagcatacggaa

SEQ ID NO: 56231 - DNA, 20 bp, Human papillomavirus type 129
caatacaaatgggcatcgtt

SEQ ID NO: 56232 - DNA, 20 bp, Human papillomavirus type 129
taaaatcccttgcgaaatct

SEQ ID NO: 56233 - DNA, 20 bp, Human papillomavirus type 129
aaaatcccttgcgaaatcta

SEQ ID NO: 56234 - DNA, 20 bp, Human papillomavirus type 129
aaatcccttgcgaaatctaa

SEQ ID NO: 56235 - DNA, 20 bp, Human papillomavirus type 129
cgaaatctaaatatgcagca

SEQ ID NO: 56236 - DNA, 20 bp, Human papillomavirus type 129
tattatgtggacaaagatgg

SEQ ID NO: 56237 - DNA, 20 bp, Human papillomavirus type 129
tgtggacaaagatggaaaca

SEQ ID NO: 56238 - DNA, 20 bp, Human papillomavirus type 129
ttttctattgttttttgaag

SEQ ID NO: 56239 - DNA, 20 bp, Human papillomavirus type 129
tctattgttttttgaagatg

SEQ ID NO: 56240 - DNA, 20 bp, Human papillomavirus type 129
ctattgttttttgaagatgc

SEQ ID NO: 56241 - DNA, 20 bp, Human papillomavirus type 129
ctcagaggcccagctaacaa

SEQ ID NO: 56242 - DNA, 20 bp, Human papillomavirus type 129
aagtgctggaggtatagatg

SEQ ID NO: 56243 - DNA, 20 bp, Human papillomavirus type 129
ggtcccctggctttagtaca

SEQ ID NO: 56244 - DNA, 20 bp, Human papillomavirus type 129
agtacagtctttaaatgggt

SEQ ID NO: 56245 - DNA, 20 bp, Human papillomavirus type 129
aaagactgtactaaagccag

SEQ ID NO: 56246 - DNA, 20 bp, Human papillomavirus type 129
ccagtggagcctggtgcttc

SEQ ID NO: 56247 - DNA, 20 bp, Human papillomavirus type 129
atctattgttcctttagctg

SEQ ID NO: 56248 - DNA, 20 bp, Human papillomavirus type 129
ttcctttagctgaaggttta

SEQ ID NO: 56249 - DNA, 20 bp, Human papillomavirus type 129
ctttagctgaaggtttacct

SEQ ID NO: 56250 - DNA, 20 bp, Human papillomavirus type 129
agctgaaggtttacctgata

SEQ ID NO: 56251 - DNA, 20 bp, Human papillomavirus type 129
atctgaaaggctgatcaata

SEQ ID NO: 56252 - DNA, 20 bp, Human papillomavirus type 129
tctgaaaggctgatcaatag

SEQ ID NO: 56253 - DNA, 20 bp, Human papillomavirus type 129
caacaagacaggttttaaat

SEQ ID NO: 56254 - DNA, 20 bp, Human papillomavirus type 129
taaatgtcaccgcccctagg

SEQ ID NO: 56255 - DNA, 20 bp, Human papillomavirus type 129
aaatgtcaccgcccctaggg

SEQ ID NO: 56256 - DNA, 20 bp, Human papillomavirus type 129
ccagaatcctttagtggagg

SEQ ID NO: 56257 - DNA, 20 bp, Human papillomavirus type 129
agtggaggtcacttaattgt

SEQ ID NO: 56258 - DNA, 20 bp, Human papillomavirus type 129
gtggaggtcacttaattgtt

SEQ ID NO: 56259 - DNA, 20 bp, Human papillomavirus type 129
attgttaccactacagacac

SEQ ID NO: 56260 - DNA, 20 bp, Human papillomavirus type 129
ttaccactacagacacacag

SEQ ID NO: 56261 - DNA, 20 bp, Human papillomavirus type 129
gccttagttgattcttcagt

SEQ ID NO: 56262 - DNA, 20 bp, Human papillomavirus type 129
ccttagttgattcttcagta

SEQ ID NO: 56263 - DNA, 20 bp, Human papillomavirus type 129
gttgattcttcagtatatga

SEQ ID NO: 56264 - DNA, 20 bp, Human papillomavirus type 129
attcttcagtatatgatcct

SEQ ID NO: 56265 - DNA, 20 bp, Human papillomavirus type 129
ttcagtatatgatcctcaaa

SEQ ID NO: 56266 - DNA, 20 bp, Human papillomavirus type 129
ttttttggaaaaagagaaca

SEQ ID NO: 56267 - DNA, 20 bp, Human papillomavirus type 129
tttggaaaaagagaacaact

SEQ ID NO: 56268 - DNA, 20 bp, Human papillomavirus type 129
ttggaaaaagagaacaactt

SEQ ID NO: 56269 - DNA, 20 bp, Human papillomavirus type 129
tggaaaaagagaacaacttt

SEQ ID NO: 56270 - DNA, 20 bp, Human papillomavirus type 129
ggaaaaagagaacaacttta

SEQ ID NO: 56271 - DNA, 20 bp, Human papillomavirus type 129
gcaaagtaccgttagaagca

SEQ ID NO: 56272 - DNA, 20 bp, Human papillomavirus type 129
caaagtaccgttagaagcag

SEQ ID NO: 56273 - DNA, 20 bp, Human papillomavirus type 129
gaagcagatgttttagctca

SEQ ID NO: 56274 - DNA, 20 bp, Human papillomavirus type 129
tagctcatattaatgcaatg

SEQ ID NO: 56275 - DNA, 20 bp, Human papillomavirus type 129
agctcatattaatgcaatgg

SEQ ID NO: 56276 - DNA, 20 bp, Human papillomavirus type 129
ctaatatgcattccatgtta

SEQ ID NO: 56277 - DNA, 20 bp, Human papillomavirus type 129
catgttaaactgtgaatgtt

SEQ ID NO: 56278 - DNA, 20 bp, Human papillomavirus type 129
aactgtgaatgtttacattg

SEQ ID NO: 56279 - DNA, 20 bp, Human papillomavirus type 129
acattgtacttgaatatcct

SEQ ID NO: 56280 - DNA, 20 bp, Human papillomavirus type 129
cattgtacttgaatatcctg

SEQ ID NO: 56281 - DNA, 20 bp, Influenza A virus
tcgaacttgcggaaaaggca

SEQ ID NO: 56282 - DNA, 20 bp, Influenza A virus
cggaaaaggcaatgaaagag

SEQ ID NO: 56283 - DNA, 20 bp, Influenza A virus
gcagcaatatgcactcactt

SEQ ID NO: 56284 - DNA, 20 bp, Influenza A virus
cagcaatatgcactcacttg

SEQ ID NO: 56285 - DNA, 20 bp, Influenza A virus
caagtgagtgcatattgctg

SEQ ID NO: 56286 - DNA, 20 bp, Influenza A virus
gcaacaccacaggagctgag

SEQ ID NO: 56287 - DNA, 20 bp, Influenza A virus
caacaccacaggagctgaga

SEQ ID NO: 56288 - DNA, 20 bp, Influenza A virus
ctgccagatttgtatgatta

SEQ ID NO: 56289 - DNA, 20 bp, Influenza A virus
tgccagatttgtatgattac

SEQ ID NO: 56290 - DNA, 20 bp, Influenza A virus
gtatgattacaaggagaata

SEQ ID NO: 56291 - DNA, 20 bp, Influenza A virus
gacttccggatgggcctcct

SEQ ID NO: 56292 - DNA, 20 bp, Influenza A virus
cggatgggcctccttgtttt

SEQ ID NO: 56293 - DNA, 20 bp, Influenza A virus
ttttcagcggtccaaattcc

SEQ ID NO: 56294 - DNA, 20 bp, Influenza A virus
tcagcggtccaaattcctgc

SEQ ID NO: 56295 - DNA, 20 bp, Influenza A virus
cagcggtccaaattcctgct

SEQ ID NO: 56296 - DNA, 20 bp, Influenza A virus
agaatgaggagaagattcca

SEQ ID NO: 56297 - DNA, 20 bp, Influenza A virus
caagaactaaaaacatgaag

SEQ ID NO: 56298 - DNA, 20 bp, Influenza A virus
gtgagaacatggcaccagag

SEQ ID NO: 56299 - DNA, 20 bp, Influenza A virus
tctggtgccatgttctcacc

SEQ ID NO: 56300 - DNA, 20 bp, Influenza A virus
tcaccaagtgcccactttag

SEQ ID NO: 56301 - DNA, 20 bp, Influenza A virus
gagaagacgtggctccaatt

SEQ ID NO: 56302 - DNA, 20 bp, Influenza A virus
aacacattgcaagcatgaga

SEQ ID NO: 56303 - DNA, 20 bp, Influenza A virus
caagcatgagaaggaattac

SEQ ID NO: 56304 - DNA, 20 bp, Influenza A virus
cttcacagcagaggtgtccc

SEQ ID NO: 56305 - DNA, 20 bp, Influenza A virus
acagcagaggtgtcccattg

SEQ ID NO: 56306 - DNA, 20 bp, Influenza A virus
aggaatgacaccgacgtggt

SEQ ID NO: 56307 - DNA, 20 bp, Influenza A virus
gtgagcatggagttttctct

SEQ ID NO: 56308 - DNA, 20 bp, Influenza A virus
tgagcatggagttttctctc

SEQ ID NO: 56309 - DNA, 20 bp, Influenza A virus
tctctcactgacccgagact

SEQ ID NO: 56310 - DNA, 20 bp, Influenza A virus
ctctcactgacccgagactt

SEQ ID NO: 56311 - DNA, 20 bp, Influenza A virus
aagccgagtcctctgtcaaa

SEQ ID NO: 56312 - DNA, 20 bp, Influenza A virus
tttgagaataaatcagaaac

SEQ ID NO: 56313 - DNA, 20 bp, Influenza A virus
ttgagaataaatcagaaaca

SEQ ID NO: 56314 - DNA, 20 bp, Influenza A virus
tgagaataaatcagaaacat

SEQ ID NO: 56315 - DNA, 20 bp, Influenza A virus
gagaataaatcagaaacatg

SEQ ID NO: 56316 - DNA, 20 bp, Hepatitis delta virus
agcgaacagagagcgcatcg

SEQ ID NO: 56317 - DNA, 20 bp, Hepatitis delta virus
ggggagaccgaagcgaggag

SEQ ID NO: 56318 - DNA, 20 bp, Hepatitis delta virus
gctttcctcctcgcttcggt

SEQ ID NO: 56319 - DNA, 20 bp, Hepatitis delta virus
ctttcctcctcgcttcggtc

SEQ ID NO: 56320 - DNA, 20 bp, Hepatitis delta virus
cctcctcgcttcggtctccc

SEQ ID NO: 56321 - DNA, 20 bp, Hepatitis delta virus
gaacattggggaccagtgga

SEQ ID NO: 56322 - DNA, 20 bp, Hepatitis delta virus
aacattggggaccagtggag

SEQ ID NO: 56323 - DNA, 20 bp, Hepatitis delta virus
gggaccagtggagccatggg

SEQ ID NO: 56324 - DNA, 20 bp, Hepatitis delta virus
cgcccaagctccttcccccc

SEQ ID NO: 56325 - DNA, 20 bp, Hepatitis delta virus
gggggaaggagcttgggcgg

SEQ ID NO: 56326 - DNA, 20 bp, Hepatitis delta virus
gccatccgagtggacgtgcg

SEQ ID NO: 56327 - DNA, 20 bp, Hepatitis delta virus
ggatgcccaggtcggaccgc

SEQ ID NO: 56328 - DNA, 20 bp, Hepatitis delta virus
catgctggggacgaagccgc

SEQ ID NO: 56329 - DNA, 20 bp, Hepatitis delta virus
caccttcgagggggttcaca

SEQ ID NO: 56330 - DNA, 20 bp, Hepatitis delta virus
gagggggttcacacccccaa

SEQ ID NO: 56331 - DNA, 20 bp, Hepatitis delta virus
ggggtgtgaaccccctcgaa

SEQ ID NO: 56332 - DNA, 20 bp, Hepatitis delta virus
gtccccagcatgcaaggagt

SEQ ID NO: 56333 - DNA, 20 bp, Hepatitis delta virus
gtcggtgatcctgcctctcc

SEQ ID NO: 56334 - DNA, 20 bp, Hepatitis delta virus
tcggtgaatcctcccctgga

SEQ ID NO: 56335 - DNA, 20 bp, Hepatitis delta virus
ctaggtccggagtctacttc

SEQ ID NO: 56336 - DNA, 20 bp, Hepatitis delta virus
catctggtccgttcgggccc

SEQ ID NO: 56337 - DNA, 20 bp, Hepatitis delta virus
gggccctcttcgccggggga

SEQ ID NO: 56338 - DNA, 20 bp, Human papillomavirus type 26
gaggatcctagagaacgacc

SEQ ID NO: 56339 - DNA, 20 bp, Human papillomavirus type 26
aatactactttgcaaaattt

SEQ ID NO: 56340 - DNA, 20 bp, Human papillomavirus type 26
tgcaaagtagtattcaagct

SEQ ID NO: 56341 - DNA, 20 bp, Human papillomavirus type 26
gcaaagtagtattcaagctt

SEQ ID NO: 56342 - DNA, 20 bp, Human papillomavirus type 26
caaagtagtattcaagcttt

SEQ ID NO: 56343 - DNA, 20 bp, Human papillomavirus type 26
actaaaaaaagtttatgtaa

SEQ ID NO: 56344 - DNA, 20 bp, Human papillomavirus type 26
atgtaatttgttaataaggt

SEQ ID NO: 56345 - DNA, 20 bp, Human papillomavirus type 26
tgtaatttgttaataaggtg

SEQ ID NO: 56346 - DNA, 20 bp, Human papillomavirus type 26
gttaataaggtgtcatagat

SEQ ID NO: 56347 - DNA, 20 bp, Human papillomavirus type 26
ttaataaggtgtcatagatg

SEQ ID NO: 56348 - DNA, 20 bp, Human papillomavirus type 26
acctacgctgctacgaacaa

SEQ ID NO: 56349 - DNA, 20 bp, Human papillomavirus type 26
gactatgaacaatttgacag

SEQ ID NO: 56350 - DNA, 20 bp, Human papillomavirus type 26
gacagctcagatgaggatga

SEQ ID NO: 56351 - DNA, 20 bp, Human papillomavirus type 26
acagctcagatgaggatgaa

SEQ ID NO: 56352 - DNA, 20 bp, Human papillomavirus type 26
tctgtttcatcctcatctga

SEQ ID NO: 56353 - DNA, 20 bp, Human papillomavirus type 26
tcagtagaagctatagtgga

SEQ ID NO: 56354 - DNA, 20 bp, Human papillomavirus type 26
cagtagaagctatagtggaa

SEQ ID NO: 56355 - DNA, 20 bp, Human papillomavirus type 26
agtagaagctatagtggaaa

SEQ ID NO: 56356 - DNA, 20 bp, Human papillomavirus type 26
tgtcccctgtatgtttttcc

SEQ ID NO: 56357 - DNA, 20 bp, Human papillomavirus type 26
ttccactatagcttctactg

SEQ ID NO: 56358 - DNA, 20 bp, Human papillomavirus type 26
aggcacaacaaaaacaggca

SEQ ID NO: 56359 - DNA, 20 bp, Human papillomavirus type 26
aaaacgaaagttactaggta

SEQ ID NO: 56360 - DNA, 20 bp, Human papillomavirus type 26
aaacgaaagttactaggtag

SEQ ID NO: 56361 - DNA, 20 bp, Human papillomavirus type 26
ctaggtagtcagaacagccc

SEQ ID NO: 56362 - DNA, 20 bp, Human papillomavirus type 26
caagacataacaaatcaaca

SEQ ID NO: 56363 - DNA, 20 bp, Human papillomavirus type 26
actgatgtaaattggaaaag

SEQ ID NO: 56364 - DNA, 20 bp, Human papillomavirus type 26
gaaaagctttttttccacca

SEQ ID NO: 56365 - DNA, 20 bp, Human papillomavirus type 26
ttttccaccacctggtccag

SEQ ID NO: 56366 - DNA, 20 bp, Human papillomavirus type 26
tttccaccacctggtccaga

SEQ ID NO: 56367 - DNA, 20 bp, Human papillomavirus type 26
ttccaccacctggtccagat

SEQ ID NO: 56368 - DNA, 20 bp, Human papillomavirus type 26
tgtgtaaacaaaaggcatgg

SEQ ID NO: 56369 - DNA, 20 bp, Human papillomavirus type 26
aaatacatatagcattgcag

SEQ ID NO: 56370 - DNA, 20 bp, Human papillomavirus type 26
cagtcgttaataaacacgga

SEQ ID NO: 56371 - DNA, 20 bp, Human papillomavirus type 26
ataaacacggactataatac

SEQ ID NO: 56372 - DNA, 20 bp, Human papillomavirus type 26
gacaatgcgagacacaagct

SEQ ID NO: 56373 - DNA, 20 bp, Human papillomavirus type 26
atgcaaaagggatatattat

SEQ ID NO: 56374 - DNA, 20 bp, Human papillomavirus type 26
tacacaaggggcatataagc

SEQ ID NO: 56375 - DNA, 20 bp, Human papillomavirus type 26
cgtggactttaaacaagagg

SEQ ID NO: 56376 - DNA, 20 bp, Human papillomavirus type 26
aaacaagaggcggaaaaata

SEQ ID NO: 56377 - DNA, 20 bp, Human papillomavirus type 26
aacaagaggcggaaaaatat

SEQ ID NO: 56378 - DNA, 20 bp, Human papillomavirus type 26
ttgtttgtatagtccactga

SEQ ID NO: 56379 - DNA, 20 bp, Human papillomavirus type 26
tttgtatagtccactgactg

SEQ ID NO: 56380 - DNA, 20 bp, Human papillomavirus type 26
gtatagtccactgactgtcc

SEQ ID NO: 56381 - DNA, 20 bp, Human papillomavirus type 26
tatagtccactgactgtccg

SEQ ID NO: 56382 - DNA, 20 bp, Human papillomavirus type 26
tatagttactttggtggagg

SEQ ID NO: 56383 - DNA, 20 bp, Human papillomavirus type 26
ctttggtggaggaatctagt

SEQ ID NO: 56384 - DNA, 20 bp, Human papillomavirus type 26
ggtggaggaatctagtatta

SEQ ID NO: 56385 - DNA, 20 bp, Human papillomavirus type 26
gtggaggaatctagtattat

SEQ ID NO: 56386 - DNA, 20 bp, Human papillomavirus type 26
tacaatctggagcccctata

SEQ ID NO: 56387 - DNA, 20 bp, Human papillomavirus type 26
tttggacattattgcattgc

SEQ ID NO: 56388 - DNA, 20 bp, Human papillomavirus type 26
ttggacattattgcattgca

SEQ ID NO: 56389 - DNA, 20 bp, Human papillomavirus type 26
tggacattattgcattgcat

SEQ ID NO: 56390 - DNA, 20 bp, Human papillomavirus type 26
ggacattattgcattgcatc

SEQ ID NO: 56391 - DNA, 20 bp, Human papillomavirus type 26
gacattattgcattgcatcg

SEQ ID NO: 56392 - DNA, 20 bp, Human papillomavirus type 26
ctagcatacatacgccgcgc

SEQ ID NO: 56393 - DNA, 20 bp, Human papillomavirus type 26
ccctacaacattaccagttc

SEQ ID NO: 56394 - DNA, 20 bp, Human papillomavirus type 26
ccagttccaagatatgcctc

SEQ ID NO: 56395 - DNA, 20 bp, Human papillomavirus type 26
caagatatgcctccaatgtg

SEQ ID NO: 56396 - DNA, 20 bp, Human papillomavirus type 26
atagaggaaaacacattgga

SEQ ID NO: 56397 - DNA, 20 bp, Human papillomavirus type 26
atttaatccataaacgccgt

SEQ ID NO: 56398 - DNA, 20 bp, Human papillomavirus type 26
tttaatccataaacgccgta

SEQ ID NO: 56399 - DNA, 20 bp, Human papillomavirus type 26
aatccataaacgccgtaaac

SEQ ID NO: 56400 - DNA, 20 bp, Human papillomavirus type 26
atccataaacgccgtaaacg

SEQ ID NO: 56401 - DNA, 20 bp, Human papillomavirus type 26
ttttttttcagatggctttg

SEQ ID NO: 56402 - DNA, 20 bp, Human papillomavirus type 26
agagtgcacctacctgatcc

SEQ ID NO: 56403 - DNA, 20 bp, Human papillomavirus type 26
gagtgcacctacctgatcct

SEQ ID NO: 56404 - DNA, 20 bp, Human papillomavirus type 26
ggattgcctgatccacagtt

SEQ ID NO: 56405 - DNA, 20 bp, Human papillomavirus type 26
gattgcctgatccacagtta

SEQ ID NO: 56406 - DNA, 20 bp, Human papillomavirus type 26
cctgatccacagttatataa

SEQ ID NO: 56407 - DNA, 20 bp, Human papillomavirus type 26
ggagagcactggggtattgg

SEQ ID NO: 56408 - DNA, 20 bp, Human papillomavirus type 26
gcactatatgtaaaaataca

SEQ ID NO: 56409 - DNA, 20 bp, Human papillomavirus type 26
cccccccttagaattaattt

SEQ ID NO: 56410 - DNA, 20 bp, Human papillomavirus type 26
gaattaatttccagcattat

SEQ ID NO: 56411 - DNA, 20 bp, Human papillomavirus type 26
atttccagcattattgagga

SEQ ID NO: 56412 - DNA, 20 bp, Human papillomavirus type 26
gccgggaacaattatttgcc

SEQ ID NO: 56413 - DNA, 20 bp, Human papillomavirus type 26
tttgccagacatttttataa

SEQ ID NO: 56414 - DNA, 20 bp, Human papillomavirus type 26
gccagacatttttataataa

SEQ ID NO: 56415 - DNA, 20 bp, Human papillomavirus type 26
ccagacatttttataataag

SEQ ID NO: 56416 - DNA, 20 bp, Human papillomavirus type 26
ttataataaggcgggggctg

SEQ ID NO: 56417 - DNA, 20 bp, Human papillomavirus type 26
ctaaataattccgcatgttt

SEQ ID NO: 56418 - DNA, 20 bp, Human papillomavirus type 26
cgcatgtttgtgtgtgtgta

SEQ ID NO: 56419 - DNA, 20 bp, Human papillomavirus type 26
gtgtgtgtgtatatgtttgt

SEQ ID NO: 56420 - DNA, 20 bp, Human papillomavirus type 26
tgtgtgtgtatatgtttgtg

SEQ ID NO: 56421 - DNA, 20 bp, Human papillomavirus type 26
gtggtatgttatgtaaggtg

SEQ ID NO: 56422 - DNA, 20 bp, Hepatitis GB virus B
cccctgcccgtctgcagaag

SEQ ID NO: 56423 - DNA, 20 bp, Hepatitis GB virus B
ccctgcccgtctgcagaagg

SEQ ID NO: 56424 - DNA, 20 bp, Hepatitis GB virus B
gtatgtaggcggcgggactc

SEQ ID NO: 56425 - DNA, 20 bp, Hepatitis GB virus B
gcgcttgtcatcacgcgagc

SEQ ID NO: 56426 - DNA, 20 bp, Hepatitis GB virus B
tcatcacgcgagcgtcatga

SEQ ID NO: 56427 - DNA, 20 bp, Hepatitis GB virus B
ggatggttggggttagccat

SEQ ID NO: 56428 - DNA, 20 bp, Hepatitis GB virus B
gggttagccatccataccgt

SEQ ID NO: 56429 - DNA, 20 bp, Hepatitis GB virus B
gccatccataccgtactgcc

SEQ ID NO: 56430 - DNA, 20 bp, Hepatitis GB virus B
cgaggggatctgggagtctc

SEQ ID NO: 56431 - DNA, 20 bp, Hepatitis GB virus B
tttgagtagaaataacaggc

SEQ ID NO: 56432 - DNA, 20 bp, Hepatitis GB virus B
gaccagtctgccagatagta

SEQ ID NO: 56433 - DNA, 20 bp, Hepatitis GB virus B
ctggaggatggagtcaactg

SEQ ID NO: 56434 - DNA, 20 bp, Hepatitis GB virus B
gttcggtgtccacctttttg

SEQ ID NO: 56435 - DNA, 20 bp, Hepatitis GB virus B
ggtgtccacctttttgtggt

SEQ ID NO: 56436 - DNA, 20 bp, Hepatitis GB virus B
actccatcctccagcaagcg

SEQ ID NO: 56437 - DNA, 20 bp, Hepatitis GB virus B
tgtgatctgtgcggacgagt

SEQ ID NO: 56438 - DNA, 20 bp, Hepatitis GB virus B
ccgccaatccgtacatctca

SEQ ID NO: 56439 - DNA, 20 bp, Hepatitis GB virus B
caattggactggcacggact

SEQ ID NO: 56440 - DNA, 20 bp, Hepatitis GB virus B
gactggcacggactccttct

SEQ ID NO: 56441 - DNA, 20 bp, Hepatitis GB virus B
ttggctgaccacattgattt

SEQ ID NO: 56442 - DNA, 20 bp, Hepatitis GB virus B
gtacccctatacaatccctg

SEQ ID NO: 56443 - DNA, 20 bp, Hepatitis GB virus B
aattcaaaaataacacatgg

SEQ ID NO: 56444 - DNA, 20 bp, Hepatitis GB virus B
aaaaataacacatggggttg

SEQ ID NO: 56445 - DNA, 20 bp, Hepatitis GB virus B
ctgccgtattcgcaatgtgc

SEQ ID NO: 56446 - DNA, 20 bp, Hepatitis GB virus B
cgaatacggcagcaacccca

SEQ ID NO: 56447 - DNA, 20 bp, Hepatitis GB virus B
acttttatgaccctgtgaat

SEQ ID NO: 56448 - DNA, 20 bp, Hepatitis GB virus B
cttttatgaccctgtgaatt

SEQ ID NO: 56449 - DNA, 20 bp, Hepatitis GB virus B
tatgaccctgtgaattccac

SEQ ID NO: 56450 - DNA, 20 bp, Hepatitis GB virus B
atgaccctgtgaattccact

SEQ ID NO: 56451 - DNA, 20 bp, Hepatitis GB virus B
tgaccctgtgaattccactc

SEQ ID NO: 56452 - DNA, 20 bp, Hepatitis GB virus B
taggtccttggcctctggta

SEQ ID NO: 56453 - DNA, 20 bp, Hepatitis GB virus B
gcctctggtagcgcttttaa

SEQ ID NO: 56454 - DNA, 20 bp, Hepatitis GB virus B
taaccctcttgcatttggtt

SEQ ID NO: 56455 - DNA, 20 bp, Hepatitis GB virus B
aaccctcttgcatttggtta

SEQ ID NO: 56456 - DNA, 20 bp, Hepatitis GB virus B
accctcttgcatttggttac

SEQ ID NO: 56457 - DNA, 20 bp, Hepatitis GB virus B
tatgtttaacatccagtgca

SEQ ID NO: 56458 - DNA, 20 bp, Hepatitis GB virus B
aacatccagtgcagcatcgt

SEQ ID NO: 56459 - DNA, 20 bp, Hepatitis GB virus B
acatccagtgcagcatcgtt

SEQ ID NO: 56460 - DNA, 20 bp, Hepatitis GB virus B
tttgggactgactctagggt

SEQ ID NO: 56461 - DNA, 20 bp, Hepatitis GB virus B
gggactgactctagggttag

SEQ ID NO: 56462 - DNA, 20 bp, Hepatitis GB virus B
ttgcgcgtctcggcgacctt

SEQ ID NO: 56463 - DNA, 20 bp, Hepatitis GB virus B
cgcgtctcggcgaccttgtt

SEQ ID NO: 56464 - DNA, 20 bp, Hepatitis GB virus B
ttttcgcagggttggctatg

SEQ ID NO: 56465 - DNA, 20 bp, Hepatitis GB virus B
tcgcagggttggctatgccg

SEQ ID NO: 56466 - DNA, 20 bp, Hepatitis GB virus B
cgcagggttggctatgccgc

SEQ ID NO: 56467 - DNA, 20 bp, Hepatitis GB virus B
ctcggtgctcttgcggggag

SEQ ID NO: 56468 - DNA, 20 bp, Hepatitis GB virus B
cggggagaccaaggggtatc

SEQ ID NO: 56469 - DNA, 20 bp, Hepatitis GB virus B
ccagataccccttggtctcc

SEQ ID NO: 56470 - DNA, 20 bp, Hepatitis GB virus B
gtctccccgcaagagcaccg

SEQ ID NO: 56471 - DNA, 20 bp, Hepatitis GB virus B
atagatgtcctggtcattag

SEQ ID NO: 56472 - DNA, 20 bp, Hepatitis GB virus B
agtgcaaattttaattgccc

SEQ ID NO: 56473 - DNA, 20 bp, Hepatitis GB virus B
taattgcccccactggcagc

SEQ ID NO: 56474 - DNA, 20 bp, Hepatitis GB virus B
aattgcccccactggcagcg

SEQ ID NO: 56475 - DNA, 20 bp, Hepatitis GB virus B
attgcccccactggcagcgg

SEQ ID NO: 56476 - DNA, 20 bp, Hepatitis GB virus B
cccccactggcagcggcaag

SEQ ID NO: 56477 - DNA, 20 bp, Hepatitis GB virus B
ggctagtggttcttgccacg

SEQ ID NO: 56478 - DNA, 20 bp, Hepatitis GB virus B
ttgccacggctaccccccct

SEQ ID NO: 56479 - DNA, 20 bp, Hepatitis GB virus B
ccacggctaccccccctgga

SEQ ID NO: 56480 - DNA, 20 bp, Hepatitis GB virus B
aattaaccgatgaaggcact

SEQ ID NO: 56481 - DNA, 20 bp, Hepatitis GB virus B
accgatgaaggcactatccc

SEQ ID NO: 56482 - DNA, 20 bp, Hepatitis GB virus B
gtcatcaacagaagctcaaa

SEQ ID NO: 56483 - DNA, 20 bp, Hepatitis GB virus B
tcatcaacagaagctcaaac

SEQ ID NO: 56484 - DNA, 20 bp, Hepatitis GB virus B
tggacacctatcgcacccaa

SEQ ID NO: 56485 - DNA, 20 bp, Hepatitis GB virus B
cctgcgataggagcaaattt

SEQ ID NO: 56486 - DNA, 20 bp, Hepatitis GB virus B
ggacgagtgggctgatctct

SEQ ID NO: 56487 - DNA, 20 bp, Hepatitis GB virus B
cacattggaaaccgcccttg

SEQ ID NO: 56488 - DNA, 20 bp, Hepatitis GB virus B
acattggaaaccgcccttga

SEQ ID NO: 56489 - DNA, 20 bp, Hepatitis GB virus B
gaaaccgcccttgaaaaact

SEQ ID NO: 56490 - DNA, 20 bp, Hepatitis GB virus B
aaaaacttaacacctttctt

SEQ ID NO: 56491 - DNA, 20 bp, Hepatitis GB virus B
acacctttcttgggcctcat

SEQ ID NO: 56492 - DNA, 20 bp, Hepatitis GB virus B
cttgacatttaaatgcttga

SEQ ID NO: 56493 - DNA, 20 bp, Hepatitis GB virus B
acatttaaatgcttgatggg

SEQ ID NO: 56494 - DNA, 20 bp, Hepatitis GB virus B
aaatgcttgatgggtgagtg

SEQ ID NO: 56495 - DNA, 20 bp, Hepatitis GB virus B
aatgcttgatgggtgagtgg

SEQ ID NO: 56496 - DNA, 20 bp, Hepatitis GB virus B
atgggtgagtggcccactat

SEQ ID NO: 56497 - DNA, 20 bp, Hepatitis GB virus B
cagtcaacgctaggctgtgt

SEQ ID NO: 56498 - DNA, 20 bp, Hepatitis GB virus B
gactagtcttgtcgtcaatt

SEQ ID NO: 56499 - DNA, 20 bp, Hepatitis GB virus B
tcgtcaattatggcgttagg

SEQ ID NO: 56500 - DNA, 20 bp, Hepatitis GB virus B
tggcgttagggactactgta

SEQ ID NO: 56501 - DNA, 20 bp, Hepatitis GB virus B
acagtagtccctaacgccat

SEQ ID NO: 56502 - DNA, 20 bp, Hepatitis GB virus B
gaaggtccttcaaacctccc

SEQ ID NO: 56503 - DNA, 20 bp, Hepatitis GB virus B
aaacctccctccttcaccac

SEQ ID NO: 56504 - DNA, 20 bp, Hepatitis GB virus B
accacctgttctacagttgg

SEQ ID NO: 56505 - DNA, 20 bp, Hepatitis GB virus B
tacagttggccatgccgatg

SEQ ID NO: 56506 - DNA, 20 bp, Hepatitis GB virus B
gccatgccgatgcccctgtt

SEQ ID NO: 56507 - DNA, 20 bp, Hepatitis GB virus B
gtgcagcatgagctacacct

SEQ ID NO: 56508 - DNA, 20 bp, Hepatitis GB virus B
gcttcaaaactgcttctaaa

SEQ ID NO: 56509 - DNA, 20 bp, Hepatitis GB virus B
aaaactgcttctaaagttct

SEQ ID NO: 56510 - DNA, 20 bp, Hepatitis GB virus B
taaagttctgtctgcaactc

SEQ ID NO: 56511 - DNA, 20 bp, Hepatitis GB virus B
tgtctgcaactcgggccatc

SEQ ID NO: 56512 - DNA, 20 bp, Hepatitis GB virus B
ggggcactgatgttcgttct

SEQ ID NO: 56513 - DNA, 20 bp, Hepatitis GB virus B
gttctggagcagcccgcaag

SEQ ID NO: 56514 - DNA, 20 bp, Hepatitis GB virus B
tggagcagcccgcaaggctg

SEQ ID NO: 56515 - DNA, 20 bp, Hepatitis GB virus B
tggacttgcagaagtgtgtc

SEQ ID NO: 56516 - DNA, 20 bp, Hepatitis GB virus B
cagaagtgtgtcgaggcagg

SEQ ID NO: 56517 - DNA, 20 bp, Hepatitis GB virus B
tgacagtaccatcacacccg

SEQ ID NO: 56518 - DNA, 20 bp, Hepatitis GB virus B
gacagtaccatcacacccga

SEQ ID NO: 56519 - DNA, 20 bp, Hepatitis GB virus B
acagtaccatcacacccgag

SEQ ID NO: 56520 - DNA, 20 bp, Hepatitis GB virus B
gtcactgagtttagctgctg

SEQ ID NO: 56521 - DNA, 20 bp, Hepatitis GB virus B
agctgctgagtagatgtctg

SEQ ID NO: 56522 - DNA, 20 bp, Hepatitis GB virus B
cttatttgcggcgatgattg

SEQ ID NO: 56523 - DNA, 20 bp, Hepatitis GB virus B
tttgcggcgatgattgcacc

SEQ ID NO: 56524 - DNA, 20 bp, Hepatitis GB virus B
gcggcgatgattgcaccgta

SEQ ID NO: 56525 - DNA, 20 bp, Hepatitis GB virus B
cggcgatgattgcaccgtaa

SEQ ID NO: 56526 - DNA, 20 bp, Hepatitis GB virus B
caccgtaatttggaagagcg

SEQ ID NO: 56527 - DNA, 20 bp, Hepatitis GB virus B
gactggtatgggaaaaatta

SEQ ID NO: 56528 - DNA, 20 bp, Hepatitis GB virus B
actggtatgggaaaaattat

SEQ ID NO: 56529 - DNA, 20 bp, Hepatitis GB virus B
tacggtgcctgtagaagatc

SEQ ID NO: 56530 - DNA, 20 bp, Hepatitis GB virus B
ctggtgtgcacggtattgag

SEQ ID NO: 56531 - DNA, 20 bp, Hepatitis GB virus B
aggctttctcggtggtgcgc

SEQ ID NO: 56532 - DNA, 20 bp, Hepatitis GB virus B
ggataagacgagcgtggctc

SEQ ID NO: 56533 - DNA, 20 bp, Hepatitis GB virus B
gataagacgagcgtggctcg

SEQ ID NO: 56534 - DNA, 20 bp, Hepatitis GB virus B
caattattgtgatgtttact

SEQ ID NO: 56535 - DNA, 20 bp, Hepatitis GB virus B
aattattgtgatgtttactc

SEQ ID NO: 56536 - DNA, 20 bp, Hepatitis GB virus B
ttgtgatgtttactccccgg

SEQ ID NO: 56537 - DNA, 20 bp, Hepatitis GB virus B
acgaccccgccgatgtgagt

SEQ ID NO: 56538 - DNA, 20 bp, Hepatitis GB virus B
ggcgaccatggtggatcaga

SEQ ID NO: 56539 - DNA, 20 bp, Hepatitis GB virus B
gcgaccatggtggatcagaa

SEQ ID NO: 56540 - DNA, 20 bp, Hepatitis GB virus B
cgggtgaagccatggtctga

SEQ ID NO: 56541 - DNA, 20 bp, Hepatitis GB virus B
gggtgaagccatggtctgaa

SEQ ID NO: 56542 - DNA, 20 bp, Influenza A virus
cacaatatgcttcttcatgc

SEQ ID NO: 56543 - DNA, 20 bp, Influenza A virus
ttcatgcaaattgccatcct

SEQ ID NO: 56544 - DNA, 20 bp, Influenza A virus
atgcaaattgccatcctgat

SEQ ID NO: 56545 - DNA, 20 bp, Influenza A virus
ccatcctgataaccactgta

SEQ ID NO: 56546 - DNA, 20 bp, Influenza A virus
catttcaagcaatatgaatt

SEQ ID NO: 56547 - DNA, 20 bp, Influenza A virus
caggatttgcacctttttct

SEQ ID NO: 56548 - DNA, 20 bp, Influenza A virus
gcacctttttctaaggacaa

SEQ ID NO: 56549 - DNA, 20 bp, Influenza A virus
cacctttttctaaggacaat

SEQ ID NO: 56550 - DNA, 20 bp, Influenza A virus
ttctaaggacaattcgatta

SEQ ID NO: 56551 - DNA, 20 bp, Influenza A virus
tctaaggacaattcgattag

SEQ ID NO: 56552 - DNA, 20 bp, Influenza A virus
tcacgatggaaaagcatggc

SEQ ID NO: 56553 - DNA, 20 bp, Influenza A virus
gtgtaacgggggatgataaa

SEQ ID NO: 56554 - DNA, 20 bp, Influenza A virus
tgtaacgggggatgataaaa

SEQ ID NO: 56555 - DNA, 20 bp, Influenza A virus
taaatgaagctagcagttgc

SEQ ID NO: 56556 - DNA, 20 bp, Influenza A virus
catttttatcatcccccgtt

SEQ ID NO: 56557 - DNA, 20 bp, Influenza A virus
tcaggaagtgctcagcatgt

SEQ ID NO: 56558 - DNA, 20 bp, Influenza A virus
gagcctttccagttgtctct

SEQ ID NO: 56559 - DNA, 20 bp, Influenza A virus
ccagttgtctctgcagacac

SEQ ID NO: 56560 - DNA, 20 bp, Influenza A virus
cagttgtctctgcagacaca

SEQ ID NO: 56561 - DNA, 20 bp, Influenza A virus
tctctgcagacacatctgac

SEQ ID NO: 56562 - DNA, 20 bp, Influenza A virus
gatgatggaaatgacgtgtg

SEQ ID NO: 56563 - DNA, 20 bp, Influenza A virus
atgatggaaatgacgtgtgg

SEQ ID NO: 56564 - DNA, 20 bp, Influenza A virus
atatcctgagcgtaacttct

SEQ ID NO: 56565 - DNA, 20 bp, Influenza A virus
tcgctgatcgttcttcccat

SEQ ID NO: 56566 - DNA, 20 bp, Influenza A virus
ttcccatccacacgtcattt

SEQ ID NO: 56567 - DNA, 20 bp, Human papillomavirus
ttacaattgtttaactttat

SEQ ID NO: 56568 - DNA, 20 bp, Human papillomavirus
caattgtttaactttattgg

SEQ ID NO: 56569 - DNA, 20 bp, Human papillomavirus
tttaactttattggatactg

SEQ ID NO: 56570 - DNA, 20 bp, Human papillomavirus
aactttattggatactgctg

SEQ ID NO: 56571 - DNA, 20 bp, Human papillomavirus
actttattggatactgctga

SEQ ID NO: 56572 - DNA, 20 bp, Human papillomavirus
cggtacctgtaaagcaactg

SEQ ID NO: 56573 - DNA, 20 bp, Human papillomavirus
ttgctacttcaactgctgtt

SEQ ID NO: 56574 - DNA, 20 bp, Human papillomavirus
tgctacttcaactgctgttt

SEQ ID NO: 56575 - DNA, 20 bp, Human papillomavirus
gctacttcaactgctgtttg

SEQ ID NO: 56576 - DNA, 20 bp, Human papillomavirus
ctacttcaactgctgtttgc

SEQ ID NO: 56577 - DNA, 20 bp, Human papillomavirus
tgttatttctgaattgattg

SEQ ID NO: 56578 - DNA, 20 bp, Human papillomavirus
tttctgaattgattgatgat

SEQ ID NO: 56579 - DNA, 20 bp, Human papillomavirus
ctgaattgattgatgatgtg

SEQ ID NO: 56580 - DNA, 20 bp, Human papillomavirus
tgaattgattgatgatgtgg

SEQ ID NO: 56581 - DNA, 20 bp, Human papillomavirus
attgatgatgtggataatgc

SEQ ID NO: 56582 - DNA, 20 bp, Human papillomavirus
aggaagatgaaactgcaaat

SEQ ID NO: 56583 - DNA, 20 bp, Human papillomavirus
ctcaggtacaagctgatact

SEQ ID NO: 56584 - DNA, 20 bp, Human papillomavirus
tcaggtacaagctgatactc

SEQ ID NO: 56585 - DNA, 20 bp, Human papillomavirus
acaaatcaactgtttcatca

SEQ ID NO: 56586 - DNA, 20 bp, Human papillomavirus
catcagctcctgcgggtaca

SEQ ID NO: 56587 - DNA, 20 bp, Human papillomavirus
ttggctaatgcctttgatag

SEQ ID NO: 56588 - DNA, 20 bp, Human papillomavirus
tggctaatgcctttgataga

SEQ ID NO: 56589 - DNA, 20 bp, Human papillomavirus
ggctaatgcctttgatagat

SEQ ID NO: 56590 - DNA, 20 bp, Human papillomavirus
gctaatgcctttgatagatg

SEQ ID NO: 56591 - DNA, 20 bp, Human papillomavirus
gatagatggtaaaattggct

SEQ ID NO: 56592 - DNA, 20 bp, Human papillomavirus
acccaaccctctacctccgg

SEQ ID NO: 56593 - DNA, 20 bp, Human papillomavirus
ctcaacatcatcatcatcat

SEQ ID NO: 56594 - DNA, 20 bp, Human papillomavirus
aggaatctgcctcttctgca

SEQ ID NO: 56595 - DNA, 20 bp, Human papillomavirus
tgcagctcgtcgacgcttcg

SEQ ID NO: 56596 - DNA, 20 bp, Human papillomavirus
ggcgatggggtcttggagta

SEQ ID NO: 56597 - DNA, 20 bp, Human papillomavirus
tgaagtgggaacaggacatc

SEQ ID NO: 56598 - DNA, 20 bp, Human papillomavirus
cgcgacaagctcttggaaga

SEQ ID NO: 56599 - DNA, 20 bp, Human papillomavirus
gaagagttcagcgacttcaa

SEQ ID NO: 56600 - DNA, 20 bp, Human papillomavirus
agcgacttcaagctgaggct

SEQ ID NO: 56601 - DNA, 20 bp, Human papillomavirus
aagctgaggcttgggatcca

SEQ ID NO: 56602 - DNA, 20 bp, Human papillomavirus
tggtgttggggcttcaagta

SEQ ID NO: 56603 - DNA, 20 bp, Human papillomavirus
gggcttcaagtataaaacca

SEQ ID NO: 56604 - DNA, 20 bp, Human papillomavirus
aagtataaaaccaattcctg

SEQ ID NO: 56605 - DNA, 20 bp, Human papillomavirus
ctgaagcacttcctataccg

SEQ ID NO: 56606 - DNA, 20 bp, Human papillomavirus
ctataccggaaggtgcacca

SEQ ID NO: 56607 - DNA, 20 bp, Human papillomavirus
gacctttgaaagagatttac

SEQ ID NO: 56608 - DNA, 20 bp, Human papillomavirus
acctttgaaagagatttaca

SEQ ID NO: 56609 - DNA, 20 bp, Human papillomavirus
gaaagagatttacaggaggt

SEQ ID NO: 56610 - DNA, 20 bp, Human papillomavirus
aaagagatttacaggaggta

SEQ ID NO: 56611 - DNA, 20 bp, Human papillomavirus
acaggaggtagcagctgcac

SEQ ID NO: 56612 - DNA, 20 bp, Human papillomavirus
ttaataaagtgcttgacaca

SEQ ID NO: 56613 - DNA, 20 bp, Human papillomavirus
taataaagtgcttgacacag

SEQ ID NO: 56614 - DNA, 20 bp, Human papillomavirus
aataaagtgcttgacacaga

SEQ ID NO: 56615 - DNA, 20 bp, Human papillomavirus
ataaagtgcttgacacagaa

SEQ ID NO: 56616 - DNA, 20 bp, Human papillomavirus
acacagaaaatcctaatgct

SEQ ID NO: 56617 - DNA, 20 bp, Human papillomavirus
ggtgcagccaattttagacg

SEQ ID NO: 56618 - DNA, 20 bp, Human papillomavirus
gtgcagccaattttagacga

SEQ ID NO: 56619 - DNA, 20 bp, Human papillomavirus
tagacgattacaacaggaca

SEQ ID NO: 56620 - DNA, 20 bp, Human papillomavirus
agacgattacaacaggacaa

SEQ ID NO: 56621 - DNA, 20 bp, Human papillomavirus
gacgattacaacaggacaaa

SEQ ID NO: 56622 - DNA, 20 bp, Human papillomavirus
ctggtaagaaacttggcgcc

SEQ ID NO: 56623 - DNA, 20 bp, Human papillomavirus
tggtaagaaacttggcgcca

SEQ ID NO: 56624 - DNA, 20 bp, Human papillomavirus
gcgccaacggctattgcata

SEQ ID NO: 56625 - DNA, 20 bp, Human papillomavirus
cataccggttctggtacagt

SEQ ID NO: 56626 - DNA, 20 bp, Human papillomavirus
tggtacagtaataaagattt

SEQ ID NO: 56627 - DNA, 20 bp, Influenza A virus
ggaggaagagaatggtccta

SEQ ID NO: 56628 - DNA, 20 bp, Influenza A virus
ccctgggaatgtagaaaacc

SEQ ID NO: 56629 - DNA, 20 bp, Influenza A virus
ctctaggttttctacattcc

SEQ ID NO: 56630 - DNA, 20 bp, Influenza A virus
tctacattcccagggtaaca

SEQ ID NO: 56631 - DNA, 20 bp, Influenza A virus
ctacattcccagggtaacac

SEQ ID NO: 56632 - DNA, 20 bp, Influenza A virus
aagacgcccaatacacaaat

SEQ ID NO: 56633 - DNA, 20 bp, Influenza A virus
ttttcgtgtggggcatacat

SEQ ID NO: 56634 - DNA, 20 bp, Influenza A virus
tcgtgtggggcatacatcac

SEQ ID NO: 56635 - DNA, 20 bp, Influenza A virus
cgtgtggggcatacatcacc

SEQ ID NO: 56636 - DNA, 20 bp, Influenza A virus
gtgtggggcatacatcaccc

SEQ ID NO: 56637 - DNA, 20 bp, Influenza A virus
ctccatggtatggacacgtt

SEQ ID NO: 56638 - DNA, 20 bp, Influenza A virus
tttcaggagggagccatgga

SEQ ID NO: 56639 - DNA, 20 bp, Influenza A virus
caggagggagccatggaaga

SEQ ID NO: 56640 - DNA, 20 bp, Influenza A virus
aggagggagccatggaagaa

SEQ ID NO: 56641 - DNA, 20 bp, Influenza A virus
taaatcagtcttcaggattc

SEQ ID NO: 56642 - DNA, 20 bp, Influenza A virus
atagaaggaggttggccagg

SEQ ID NO: 56643 - DNA, 20 bp, Influenza A virus
gccaggactagtcgctggct

SEQ ID NO: 56644 - DNA, 20 bp, Influenza A virus
ccagcattcaaatgatcaag

SEQ ID NO: 56645 - DNA, 20 bp, Influenza A virus
cagcattcaaatgatcaagg

SEQ ID NO: 56646 - DNA, 20 bp, Influenza A virus
aaatgatcaaggggttggta

SEQ ID NO: 56647 - DNA, 20 bp, Influenza A virus
ctagtactacttgaaaatca

SEQ ID NO: 56648 - DNA, 20 bp, Influenza A virus
aaaatcaaaaaacactcgat

SEQ ID NO: 56649 - DNA, 20 bp, Influenza A virus
catagcattggagcccagtg

SEQ ID NO: 56650 - DNA, 20 bp, Influenza A virus
gagcccagtgccctcttcac

SEQ ID NO: 56651 - DNA, 20 bp, Influenza A virus
accttgttatatagattgtt

SEQ ID NO: 56652 - DNA, 20 bp, Hepatitis C virus
ccgggatgaccgggtccttt

SEQ ID NO: 56653 - DNA, 20 bp, Hepatitis C virus
cttggataaacccgctcaat

SEQ ID NO: 56654 - DNA, 20 bp, Hepatitis C virus
ttggataaacccgctcaatg

SEQ ID NO: 56655 - DNA, 20 bp, Hepatitis C virus
gataaacccgctcaatgccc

SEQ ID NO: 56656 - DNA, 20 bp, Hepatitis C virus
agcgggtttatccaagaaag

SEQ ID NO: 56657 - DNA, 20 bp, Hepatitis C virus
ccgggcggtggtcagatcgt

SEQ ID NO: 56658 - DNA, 20 bp, Hepatitis C virus
gtggagtttacttgttgccg

SEQ ID NO: 56659 - DNA, 20 bp, Hepatitis C virus
acttgttgccgcgcaggggc

SEQ ID NO: 56660 - DNA, 20 bp, Hepatitis C virus
cttgttgccgcgcaggggcc

SEQ ID NO: 56661 - DNA, 20 bp, Hepatitis C virus
ttgccgcgcaggggccctaa

SEQ ID NO: 56662 - DNA, 20 bp, Hepatitis C virus
ggagcagtcacggcccttct

SEQ ID NO: 56663 - DNA, 20 bp, Hepatitis C virus
ttcggagagccgttgactac

SEQ ID NO: 56664 - DNA, 20 bp, Hepatitis C virus
ggagagccgttgactactta

SEQ ID NO: 56665 - DNA, 20 bp, Hepatitis C virus
ggacccagcacctactgaca

SEQ ID NO: 56666 - DNA, 20 bp, Hepatitis C virus
gacccagcacctactgacat

SEQ ID NO: 56667 - DNA, 20 bp, Hepatitis C virus
tttctgtttgcaggagttga

SEQ ID NO: 56668 - DNA, 20 bp, Hepatitis C virus
ctgtttgcaggagttgatgg

SEQ ID NO: 56669 - DNA, 20 bp, Hepatitis C virus
tgtttgcaggagttgatggc

SEQ ID NO: 56670 - DNA, 20 bp, Hepatitis C virus
gcaggagttgatggccgcac

SEQ ID NO: 56671 - DNA, 20 bp, Hepatitis C virus
caggagttgatggccgcacc

SEQ ID NO: 56672 - DNA, 20 bp, Hepatitis C virus
ccgcattcgaccaaggctgg

SEQ ID NO: 56673 - DNA, 20 bp, Hepatitis C virus
gaccaaggctggggaactat

SEQ ID NO: 56674 - DNA, 20 bp, Hepatitis C virus
ctggcactatcccccacgac

SEQ ID NO: 56675 - DNA, 20 bp, Hepatitis C virus
tcatcactggggcccgatat

SEQ ID NO: 56676 - DNA, 20 bp, Hepatitis C virus
cccagccttggtcgaatgcg

SEQ ID NO: 56677 - DNA, 20 bp, Hepatitis C virus
ggctgcacctggatgaactc

SEQ ID NO: 56678 - DNA, 20 bp, Hepatitis C virus
gtgaagaattgcggagctcc

SEQ ID NO: 56679 - DNA, 20 bp, Hepatitis C virus
tgaagaattgcggagctccg

SEQ ID NO: 56680 - DNA, 20 bp, Hepatitis C virus
cggagctccgccctgcaact

SEQ ID NO: 56681 - DNA, 20 bp, Hepatitis C virus
gggccaacaggcaacaacag

SEQ ID NO: 56682 - DNA, 20 bp, Hepatitis C virus
aagacagagatagggccgag

SEQ ID NO: 56683 - DNA, 20 bp, Hepatitis C virus
agcccgctcctgcacaccac

SEQ ID NO: 56684 - DNA, 20 bp, Hepatitis C virus
ccgtgctccttcacacctac

SEQ ID NO: 56685 - DNA, 20 bp, Hepatitis C virus
acacctacgcccgctcttag

SEQ ID NO: 56686 - DNA, 20 bp, Hepatitis C virus
gcactggtcttatacaccta

SEQ ID NO: 56687 - DNA, 20 bp, Hepatitis C virus
tcctaaacgcggctgcggcc

SEQ ID NO: 56688 - DNA, 20 bp, Hepatitis C virus
ttctggggcctgctcgttgt

SEQ ID NO: 56689 - DNA, 20 bp, Hepatitis C virus
tggggcctgctcgttgtgtg

SEQ ID NO: 56690 - DNA, 20 bp, Hepatitis C virus
tgtgcttggcttggcatgtc

SEQ ID NO: 56691 - DNA, 20 bp, Hepatitis C virus
gcttggcatgtcaagggcag

SEQ ID NO: 56692 - DNA, 20 bp, Hepatitis C virus
caggttaagggtggtcgtga

SEQ ID NO: 56693 - DNA, 20 bp, Hepatitis C virus
agggtggtcgtgacgctgtc

SEQ ID NO: 56694 - DNA, 20 bp, Hepatitis C virus
caccctgccttggggtttga

SEQ ID NO: 56695 - DNA, 20 bp, Hepatitis C virus
gggtttgagatcacaaaaat

SEQ ID NO: 56696 - DNA, 20 bp, Hepatitis C virus
ttgtgatctcaaaccccaag

SEQ ID NO: 56697 - DNA, 20 bp, Hepatitis C virus
acggtggccacagaacccat

SEQ ID NO: 56698 - DNA, 20 bp, Hepatitis C virus
tccgcgatggagacgaaggt

SEQ ID NO: 56699 - DNA, 20 bp, Hepatitis C virus
ccacacgcggccgtgtcagc

SEQ ID NO: 56700 - DNA, 20 bp, Hepatitis C virus
gtctccatcgcggagaatac

SEQ ID NO: 56701 - DNA, 20 bp, Hepatitis C virus
tgtggccaccgttaattcgc

SEQ ID NO: 56702 - DNA, 20 bp, Hepatitis C virus
cttggcatttgtatcaatgg

SEQ ID NO: 56703 - DNA, 20 bp, Hepatitis C virus
ttggcatttgtatcaatgga

SEQ ID NO: 56704 - DNA, 20 bp, Hepatitis C virus
gcatttgtatcaatggagtg

SEQ ID NO: 56705 - DNA, 20 bp, Hepatitis C virus
gtatcaatggagtgatgtgg

SEQ ID NO: 56706 - DNA, 20 bp, Hepatitis C virus
tatcaatggagtgatgtgga

SEQ ID NO: 56707 - DNA, 20 bp, Hepatitis C virus
cgggcatgtggtaggtgttt

SEQ ID NO: 56708 - DNA, 20 bp, Hepatitis C virus
tcagggccgccgtgtgcacg

SEQ ID NO: 56709 - DNA, 20 bp, Hepatitis C virus
cagggccgccgtgtgcacgc

SEQ ID NO: 56710 - DNA, 20 bp, Hepatitis C virus
agggccgccgtgtgcacgcg

SEQ ID NO: 56711 - DNA, 20 bp, Hepatitis C virus
cgaaggcgctcgagttcgtc

SEQ ID NO: 56712 - DNA, 20 bp, Hepatitis C virus
ggactgtcaccaccggagcc

SEQ ID NO: 56713 - DNA, 20 bp, Hepatitis C virus
ccataagtagagtatgttat

SEQ ID NO: 56714 - DNA, 20 bp, Hepatitis C virus
taccggctccggtggtgaca

SEQ ID NO: 56715 - DNA, 20 bp, Hepatitis C virus
gggtccacgccgtatgctct

SEQ ID NO: 56716 - DNA, 20 bp, Hepatitis C virus
tgccactctaagaaaaaatg

SEQ ID NO: 56717 - DNA, 20 bp, Hepatitis C virus
ccaaacaattgaccagtctg

SEQ ID NO: 56718 - DNA, 20 bp, Hepatitis C virus
accagtctgggcgtgaatgc

SEQ ID NO: 56719 - DNA, 20 bp, Hepatitis C virus
tagaggtctagacgtcgccg

SEQ ID NO: 56720 - DNA, 20 bp, Hepatitis C virus
acgcccagactggtcaattg

SEQ ID NO: 56721 - DNA, 20 bp, Hepatitis C virus
cgtctggggagagaccgtcc

SEQ ID NO: 56722 - DNA, 20 bp, Hepatitis C virus
gtctggggagagaccgtccg

SEQ ID NO: 56723 - DNA, 20 bp, Hepatitis C virus
aactggccccactcccctcc

SEQ ID NO: 56724 - DNA, 20 bp, Hepatitis C virus
actggccccactcccctcct

SEQ ID NO: 56725 - DNA, 20 bp, Hepatitis C virus
agaatgagatcacactgaca

SEQ ID NO: 56726 - DNA, 20 bp, Hepatitis C virus
gtgatggggtgtgtcagtgt

SEQ ID NO: 56727 - DNA, 20 bp, Hepatitis C virus
tgaacggcccccagcctgta

SEQ ID NO: 56728 - DNA, 20 bp, Hepatitis C virus
atgtctttcaccgccgcggt

SEQ ID NO: 56729 - DNA, 20 bp, Hepatitis C virus
caccgccgcggtgacctccc

SEQ ID NO: 56730 - DNA, 20 bp, Hepatitis C virus
accgccgcggtgacctcccc

SEQ ID NO: 56731 - DNA, 20 bp, Hepatitis C virus
caacacatcagaccctcctt

SEQ ID NO: 56732 - DNA, 20 bp, Hepatitis C virus
ttaatattctaggagggtgg

SEQ ID NO: 56733 - DNA, 20 bp, Hepatitis C virus
gtgtcatatgcgccgccgtt

SEQ ID NO: 56734 - DNA, 20 bp, Hepatitis C virus
tgcggcgccacattggccca

SEQ ID NO: 56735 - DNA, 20 bp, Hepatitis C virus
gcccaggcgagggggctgta

SEQ ID NO: 56736 - DNA, 20 bp, Hepatitis C virus
atccactgtacagccccctc

SEQ ID NO: 56737 - DNA, 20 bp, Hepatitis C virus
ttctcatgccagaaggggta

SEQ ID NO: 56738 - DNA, 20 bp, Hepatitis C virus
tcatgccagaaggggtacaa

SEQ ID NO: 56739 - DNA, 20 bp, Hepatitis C virus
gtggagttcactccatcccc

SEQ ID NO: 56740 - DNA, 20 bp, Hepatitis C virus
actccatccccgcgccatac

SEQ ID NO: 56741 - DNA, 20 bp, Hepatitis C virus
taccccttctggcatgagaa

SEQ ID NO: 56742 - DNA, 20 bp, Hepatitis C virus
ttcacggagctggatggcgt

SEQ ID NO: 56743 - DNA, 20 bp, Hepatitis C virus
acggagctggatggcgtgag

SEQ ID NO: 56744 - DNA, 20 bp, Hepatitis C virus
accgcttcgcgccaccctgt

SEQ ID NO: 56745 - DNA, 20 bp, Hepatitis C virus
gcgccaccctgtaaccccct

SEQ ID NO: 56746 - DNA, 20 bp, Hepatitis C virus
ggagggggttacagggtggc

SEQ ID NO: 56747 - DNA, 20 bp, Hepatitis C virus
gcctttatgaggtctgcatc

SEQ ID NO: 56748 - DNA, 20 bp, Hepatitis C virus
atgaggtctgcatctgggtg

SEQ ID NO: 56749 - DNA, 20 bp, Hepatitis C virus
tgaggtctgcatctgggtgg

SEQ ID NO: 56750 - DNA, 20 bp, Hepatitis C virus
tatagtgcaggtggccttga

SEQ ID NO: 56751 - DNA, 20 bp, Hepatitis C virus
agagagggggctgagagctg

SEQ ID NO: 56752 - DNA, 20 bp, Hepatitis C virus
tgacccccctcaggtgtggg

SEQ ID NO: 56753 - DNA, 20 bp, Hepatitis C virus
cgcggaggaaaaggaagcca

SEQ ID NO: 56754 - DNA, 20 bp, Hepatitis C virus
cattggcttccttttcctcc

SEQ ID NO: 56755 - DNA, 20 bp, Hepatitis C virus
gcttccttttcctccgcgga

SEQ ID NO: 56756 - DNA, 20 bp, Hepatitis C virus
cttttcctccgcggaagcgg

SEQ ID NO: 56757 - DNA, 20 bp, Hepatitis C virus
ctccatgtcatacacctgga

SEQ ID NO: 56758 - DNA, 20 bp, Hepatitis C virus
ctctgctgaagaggaaaaat

SEQ ID NO: 56759 - DNA, 20 bp, Hepatitis C virus
agggattgatgggtaatttt

SEQ ID NO: 56760 - DNA, 20 bp, Hepatitis C virus
atgggtaatttttcctcttc

SEQ ID NO: 56761 - DNA, 20 bp, Hepatitis C virus
ttcctcttcagcagagcaag

SEQ ID NO: 56762 - DNA, 20 bp, Hepatitis C virus
acaccaccccactccgcccg

SEQ ID NO: 56763 - DNA, 20 bp, Hepatitis C virus
caagtacggatacggcgcga

SEQ ID NO: 56764 - DNA, 20 bp, Hepatitis C virus
gctctctcgacaagaaagcc

SEQ ID NO: 56765 - DNA, 20 bp, Hepatitis C virus
agcacatagagggtgtgtgg

SEQ ID NO: 56766 - DNA, 20 bp, Hepatitis C virus
ccacacaccctctatgtgct

SEQ ID NO: 56767 - DNA, 20 bp, Hepatitis C virus
tggccatctgcgagagccag

SEQ ID NO: 56768 - DNA, 20 bp, Hepatitis C virus
atcttcgtgtgtcccctggc

SEQ ID NO: 56769 - DNA, 20 bp, Hepatitis C virus
gtgtgtcccctggctctcgc

SEQ ID NO: 56770 - DNA, 20 bp, Hepatitis C virus
tgggctcggatagtgctgat

SEQ ID NO: 56771 - DNA, 20 bp, Hepatitis C virus
ttcagcgttctacagagcca

SEQ ID NO: 56772 - DNA, 20 bp, Hepatitis C virus
tcagcgttctacagagccag

SEQ ID NO: 56773 - DNA, 20 bp, Hepatitis C virus
cagcgttctacagagccagg

SEQ ID NO: 56774 - DNA, 20 bp, Hepatitis C virus
agcgttctacagagccagga

SEQ ID NO: 56775 - DNA, 20 bp, Hepatitis C virus
aactgggcggtgaagacaaa

SEQ ID NO: 56776 - DNA, 20 bp, Hepatitis C virus
gcgttttgtcttcaccgccc

SEQ ID NO: 56777 - DNA, 20 bp, Hepatitis C virus
cgttttgtcttcaccgccca

SEQ ID NO: 56778 - DNA, 20 bp, Hepatitis C virus
tgtcttcaccgcccagttga

SEQ ID NO: 56779 - DNA, 20 bp, Hepatitis C virus
gtcttcaccgcccagttgaa

SEQ ID NO: 56780 - DNA, 20 bp, Coronavirus
aaaatctgtgtagctgtcgc

SEQ ID NO: 56781 - DNA, 20 bp, Coronavirus
aaatctgtgtagctgtcgct

SEQ ID NO: 56782 - DNA, 20 bp, Coronavirus
tactgtcgttgacaagaaac

SEQ ID NO: 56783 - DNA, 20 bp, Coronavirus
actgtcgttgacaagaaacg

SEQ ID NO: 56784 - DNA, 20 bp, Coronavirus
ctgtcgttgacaagaaacga

SEQ ID NO: 56785 - DNA, 20 bp, Coronavirus
ggggactctgtggaagaggc

SEQ ID NO: 56786 - DNA, 20 bp, Coronavirus
tggtctagtagagctggaaa

SEQ ID NO: 56787 - DNA, 20 bp, Coronavirus
aacagccctatgtgttcatt

SEQ ID NO: 56788 - DNA, 20 bp, Coronavirus
attaaacgttctgatgcctt

SEQ ID NO: 56789 - DNA, 20 bp, Coronavirus
aggcatcagaacgtttaatg

SEQ ID NO: 56790 - DNA, 20 bp, Coronavirus
caaaggggaatgcccaaagt

SEQ ID NO: 56791 - DNA, 20 bp, Coronavirus
aaaggggaatgcccaaagtt

SEQ ID NO: 56792 - DNA, 20 bp, Coronavirus
gtgtttcctcttaactcaaa

SEQ ID NO: 56793 - DNA, 20 bp, Coronavirus
tgtttcctcttaactcaaaa

SEQ ID NO: 56794 - DNA, 20 bp, Coronavirus
cctcttaactcaaaagtcaa

SEQ ID NO: 56795 - DNA, 20 bp, Coronavirus
tggaggctgtgtgtttgcct

SEQ ID NO: 56796 - DNA, 20 bp, Coronavirus
ggaggctgtgtgtttgccta

SEQ ID NO: 56797 - DNA, 20 bp, Coronavirus
gaggctgtgtgtttgcctat

SEQ ID NO: 56798 - DNA, 20 bp, Coronavirus
gcctatgttggctgctataa

SEQ ID NO: 56799 - DNA, 20 bp, Coronavirus
cctatgttggctgctataat

SEQ ID NO: 56800 - DNA, 20 bp, Coronavirus
ccaagggaaagcccgtaaaa

SEQ ID NO: 56801 - DNA, 20 bp, Coronavirus
gaacattggacaacagagat

SEQ ID NO: 56802 - DNA, 20 bp, Coronavirus
gacaacagagatcagtttta

SEQ ID NO: 56803 - DNA, 20 bp, Coronavirus
taacaccactgtgtggtttt

SEQ ID NO: 56804 - DNA, 20 bp, Coronavirus
aacaccactgtgtggttttc

SEQ ID NO: 56805 - DNA, 20 bp, Coronavirus
agacctgctcaccaacagtg

SEQ ID NO: 56806 - DNA, 20 bp, Coronavirus
ttatggcatatgtaactggt

SEQ ID NO: 56807 - DNA, 20 bp, Coronavirus
tggcatatgtaactggtggt

SEQ ID NO: 56808 - DNA, 20 bp, Coronavirus
tacaacagacttctcagtgg

SEQ ID NO: 56809 - DNA, 20 bp, Coronavirus
tcagtggttgtctaatcttt

SEQ ID NO: 56810 - DNA, 20 bp, Coronavirus
atcaagtcactatcgctggc

SEQ ID NO: 56811 - DNA, 20 bp, Coronavirus
cgatcactcaacttaggtga

SEQ ID NO: 56812 - DNA, 20 bp, Coronavirus
ggtgaagtcttcatcgctca

SEQ ID NO: 56813 - DNA, 20 bp, Coronavirus
atcgctcaaagcaagggact

SEQ ID NO: 56814 - DNA, 20 bp, Coronavirus
accgtcagtgtatacgtggc

SEQ ID NO: 56815 - DNA, 20 bp, Coronavirus
gagattaaggacaaagaaca

SEQ ID NO: 56816 - DNA, 20 bp, Coronavirus
aggacaaagaacaatactgc

SEQ ID NO: 56817 - DNA, 20 bp, Coronavirus
tctcctggtttactggctac

SEQ ID NO: 56818 - DNA, 20 bp, Coronavirus
actggctacaaacaatgtct

SEQ ID NO: 56819 - DNA, 20 bp, Coronavirus
ctggctacaaacaatgtctt

SEQ ID NO: 56820 - DNA, 20 bp, Coronavirus
cttttaccctccagatgagg

SEQ ID NO: 56821 - DNA, 20 bp, Coronavirus
taccctccagatgaggaaga

SEQ ID NO: 56822 - DNA, 20 bp, Coronavirus
accctccagatgaggaagaa

SEQ ID NO: 56823 - DNA, 20 bp, Coronavirus
ccctccagatgaggaagaag

SEQ ID NO: 56824 - DNA, 20 bp, Coronavirus
atgaaacctgtgaacatgag

SEQ ID NO: 56825 - DNA, 20 bp, Coronavirus
taaatgctgctaacatacac

SEQ ID NO: 56826 - DNA, 20 bp, Coronavirus
gttgccttgttgagtgcacc

SEQ ID NO: 56827 - DNA, 20 bp, Coronavirus
ccttgttgagtgcacctgct

SEQ ID NO: 56828 - DNA, 20 bp, Coronavirus
ttgagtgcacctgctacacc

SEQ ID NO: 56829 - DNA, 20 bp, Coronavirus
agtgcacctgctacaccacc

SEQ ID NO: 56830 - DNA, 20 bp, Coronavirus
caccattgttgtcagcaggc

SEQ ID NO: 56831 - DNA, 20 bp, Coronavirus
ttgtcagcaggcatatttgg

SEQ ID NO: 56832 - DNA, 20 bp, Coronavirus
tcagcaggcatatttggtgc

SEQ ID NO: 56833 - DNA, 20 bp, Coronavirus
ggtgctaaaccacttcagtc

SEQ ID NO: 56834 - DNA, 20 bp, Coronavirus
gtgctaaaccacttcagtct

SEQ ID NO: 56835 - DNA, 20 bp, Coronavirus
ccttgagaaggatgcacctt

SEQ ID NO: 56836 - DNA, 20 bp, Coronavirus
cttgagaaggatgcacctta

SEQ ID NO: 56837 - DNA, 20 bp, Coronavirus
agaaggatgcaccttacatg

SEQ ID NO: 56838 - DNA, 20 bp, Coronavirus
catggtaggtgatgttatca

SEQ ID NO: 56839 - DNA, 20 bp, Coronavirus
tcactagtggtgatatcact

SEQ ID NO: 56840 - DNA, 20 bp, Coronavirus
ctcatgctgaagagacaaga

SEQ ID NO: 56841 - DNA, 20 bp, Coronavirus
atgcctatatgcatggatgt

SEQ ID NO: 56842 - DNA, 20 bp, Coronavirus
gagccataatggcaaccatc

SEQ ID NO: 56843 - DNA, 20 bp, Coronavirus
aattttaattcctttatact

SEQ ID NO: 56844 - DNA, 20 bp, Coronavirus
taattcctttatacttacgt

SEQ ID NO: 56845 - DNA, 20 bp, Coronavirus
ctacatataatggatacctc

SEQ ID NO: 56846 - DNA, 20 bp, Coronavirus
gtcatcaaagacatctgagg

SEQ ID NO: 56847 - DNA, 20 bp, Coronavirus
gtagaaacagtttctttggc

SEQ ID NO: 56848 - DNA, 20 bp, Coronavirus
tagaaacagtttctttggct

SEQ ID NO: 56849 - DNA, 20 bp, Coronavirus
ctacaaagtgctcctcagat

SEQ ID NO: 56850 - DNA, 20 bp, Coronavirus
ctttgtactacctagtgatg

SEQ ID NO: 56851 - DNA, 20 bp, Coronavirus
tttgtactacctagtgatga

SEQ ID NO: 56852 - DNA, 20 bp, Coronavirus
gtactacctagtgatgacac

SEQ ID NO: 56853 - DNA, 20 bp, Coronavirus
tactacctagtgatgacaca

SEQ ID NO: 56854 - DNA, 20 bp, Coronavirus
cgagtactaccatactcttg

SEQ ID NO: 56855 - DNA, 20 bp, Coronavirus
ttaatgtggtgtgtaaacat

SEQ ID NO: 56856 - DNA, 20 bp, Coronavirus
atgtggtgtgtaaacattgt

SEQ ID NO: 56857 - DNA, 20 bp, Coronavirus
tggtcagaaaactactacct

SEQ ID NO: 56858 - DNA, 20 bp, Coronavirus
acgggtgtagaagctgtgat

SEQ ID NO: 56859 - DNA, 20 bp, Coronavirus
tgataatcttaagacaggtg

SEQ ID NO: 56860 - DNA, 20 bp, Coronavirus
acggagctcaccttacaaag

SEQ ID NO: 56861 - DNA, 20 bp, Coronavirus
caaagatgtcagagtacaaa

SEQ ID NO: 56862 - DNA, 20 bp, Coronavirus
tctacaaggaaacatcttac

SEQ ID NO: 56863 - DNA, 20 bp, Coronavirus
ctacaaggaaacatcttaca

SEQ ID NO: 56864 - DNA, 20 bp, Coronavirus
tacaaggaaacatcttacac

SEQ ID NO: 56865 - DNA, 20 bp, Coronavirus
ttcccagacttgaatggcga

SEQ ID NO: 56866 - DNA, 20 bp, Coronavirus
ccagacttgaatggcgatgt

SEQ ID NO: 56867 - DNA, 20 bp, Coronavirus
aatggcgatgtagtggctat

SEQ ID NO: 56868 - DNA, 20 bp, Coronavirus
actatagacactattcagcg

SEQ ID NO: 56869 - DNA, 20 bp, Coronavirus
agcgagtttcaagaaaggtg

SEQ ID NO: 56870 - DNA, 20 bp, Coronavirus
taggcaatgtcatacttaaa

SEQ ID NO: 56871 - DNA, 20 bp, Coronavirus
aaccatcagatgaaggtgtt

SEQ ID NO: 56872 - DNA, 20 bp, Coronavirus
aagtaacacaagagttaggt

SEQ ID NO: 56873 - DNA, 20 bp, Coronavirus
ggtcatgaggatcttatggc

SEQ ID NO: 56874 - DNA, 20 bp, Coronavirus
tggctgcttatgtggaaaac

SEQ ID NO: 56875 - DNA, 20 bp, Coronavirus
gagaattgtatcttaattcg

SEQ ID NO: 56876 - DNA, 20 bp, Coronavirus
tatcttaattcgtctaacgt

SEQ ID NO: 56877 - DNA, 20 bp, Coronavirus
attcgtctaacgttactact

SEQ ID NO: 56878 - DNA, 20 bp, Coronavirus
gtctaacgttactactatgg

SEQ ID NO: 56879 - DNA, 20 bp, Coronavirus
ctactatggatttctgtgaa

SEQ ID NO: 56880 - DNA, 20 bp, Coronavirus
atcattagtattgtacaaat

SEQ ID NO: 56881 - DNA, 20 bp, Coronavirus
tcattagtattgtacaaatg

SEQ ID NO: 56882 - DNA, 20 bp, Coronavirus
gtattgtacaaatggcaccc

SEQ ID NO: 56883 - DNA, 20 bp, Coronavirus
tacaaatggcacccgtttct

SEQ ID NO: 56884 - DNA, 20 bp, Coronavirus
ctgcaatggttaggatgtac

SEQ ID NO: 56885 - DNA, 20 bp, Coronavirus
gtcactccagtttaaaagac

SEQ ID NO: 56886 - DNA, 20 bp, Coronavirus
tcactccagtttaaaagacc

SEQ ID NO: 56887 - DNA, 20 bp, Coronavirus
aaaagaccaatcaaccctac

SEQ ID NO: 56888 - DNA, 20 bp, Coronavirus
aaagaccaatcaaccctact

SEQ ID NO: 56889 - DNA, 20 bp, Coronavirus
ttgatagtgttgctgtgaaa

SEQ ID NO: 56890 - DNA, 20 bp, Coronavirus
tgtcgacaccttttcagcaa

SEQ ID NO: 56891 - DNA, 20 bp, Coronavirus
tcagcaacttttagtgttcc

SEQ ID NO: 56892 - DNA, 20 bp, Coronavirus
cagcaacttttagtgttcct

SEQ ID NO: 56893 - DNA, 20 bp, Coronavirus
agcaacttttagtgttccta

SEQ ID NO: 56894 - DNA, 20 bp, Coronavirus
tagtgttcctatggaaaaac

SEQ ID NO: 56895 - DNA, 20 bp, Coronavirus
cactcatctggaatgtaaaa

SEQ ID NO: 56896 - DNA, 20 bp, Coronavirus
actcatctggaatgtaaaag

SEQ ID NO: 56897 - DNA, 20 bp, Coronavirus
atctgaacagctgcgtaaac

SEQ ID NO: 56898 - DNA, 20 bp, Coronavirus
tctgaacagctgcgtaaaca

SEQ ID NO: 56899 - DNA, 20 bp, Coronavirus
gtagtgctgccaagaagaac

SEQ ID NO: 56900 - DNA, 20 bp, Coronavirus
aggatggtgtcactcgtgac

SEQ ID NO: 56901 - DNA, 20 bp, Coronavirus
ctactgatgattgttttgca

SEQ ID NO: 56902 - DNA, 20 bp, Coronavirus
tactgatgattgttttgcaa

SEQ ID NO: 56903 - DNA, 20 bp, Coronavirus
ttttgcaaataaacatgctg

SEQ ID NO: 56904 - DNA, 20 bp, Coronavirus
tgcaaataaacatgctggtt

SEQ ID NO: 56905 - DNA, 20 bp, Coronavirus
ttatgacactaatttgctag

SEQ ID NO: 56906 - DNA, 20 bp, Coronavirus
tgacactaatttgctagagg

SEQ ID NO: 56907 - DNA, 20 bp, Coronavirus
gctagagggttctatttctt

SEQ ID NO: 56908 - DNA, 20 bp, Coronavirus
ctagagggttctatttctta

SEQ ID NO: 56909 - DNA, 20 bp, Coronavirus
tatttcttatagtgagcttc

SEQ ID NO: 56910 - DNA, 20 bp, Coronavirus
agatgtgtctgcttcagtag

SEQ ID NO: 56911 - DNA, 20 bp, Coronavirus
gatgtgtctgcttcagtagt

SEQ ID NO: 56912 - DNA, 20 bp, Coronavirus
agtagtggctggtggtatta

SEQ ID NO: 56913 - DNA, 20 bp, Coronavirus
ttgccatattggtgacttgt

SEQ ID NO: 56914 - DNA, 20 bp, Coronavirus
ccatattggtgacttgtgct

SEQ ID NO: 56915 - DNA, 20 bp, Coronavirus
gtgtacctttttgctcaaca

SEQ ID NO: 56916 - DNA, 20 bp, Coronavirus
tgtacctttttgctcaacaa

SEQ ID NO: 56917 - DNA, 20 bp, Coronavirus
ttgctcaacaaggaaatgta

SEQ ID NO: 56918 - DNA, 20 bp, Coronavirus
tgctcaacaaggaaatgtac

SEQ ID NO: 56919 - DNA, 20 bp, Coronavirus
gctcaacaaggaaatgtacc

SEQ ID NO: 56920 - DNA, 20 bp, Coronavirus
tgctgttctgcagagtggtt

SEQ ID NO: 56921 - DNA, 20 bp, Coronavirus
tgcagagtggttttaggaaa

SEQ ID NO: 56922 - DNA, 20 bp, Coronavirus
taggaaaatggcattcccgt

SEQ ID NO: 56923 - DNA, 20 bp, Coronavirus
aggaaaatggcattcccgtc

SEQ ID NO: 56924 - DNA, 20 bp, Coronavirus
ggaaaatggcattcccgtca

SEQ ID NO: 56925 - DNA, 20 bp, Coronavirus
aagttgatacttctaaccct

SEQ ID NO: 56926 - DNA, 20 bp, Coronavirus
atacttctaaccctaagaca

SEQ ID NO: 56927 - DNA, 20 bp, Coronavirus
taaccctaagacacccaagt

SEQ ID NO: 56928 - DNA, 20 bp, Coronavirus
gtccgtatccaacctggtca

SEQ ID NO: 56929 - DNA, 20 bp, Coronavirus
tccgtatccaacctggtcaa

SEQ ID NO: 56930 - DNA, 20 bp, Coronavirus
aaccttgtggcaatgaagta

SEQ ID NO: 56931 - DNA, 20 bp, Coronavirus
accttgtggcaatgaagtac

SEQ ID NO: 56932 - DNA, 20 bp, Coronavirus
tggcaatgaagtacaactat

SEQ ID NO: 56933 - DNA, 20 bp, Coronavirus
gacacaagatcatgttgaca

SEQ ID NO: 56934 - DNA, 20 bp, Coronavirus
acacaagatcatgttgacat

SEQ ID NO: 56935 - DNA, 20 bp, Coronavirus
cttgacatcactattgattc

SEQ ID NO: 56936 - DNA, 20 bp, Coronavirus
ttgacatcactattgattct

SEQ ID NO: 56937 - DNA, 20 bp, Coronavirus
acatcactattgattcttgt

SEQ ID NO: 56938 - DNA, 20 bp, Coronavirus
attcttgttcaaagtacaca

SEQ ID NO: 56939 - DNA, 20 bp, Coronavirus
ttgttcaaagtacacagtgg

SEQ ID NO: 56940 - DNA, 20 bp, Coronavirus
ccatgtgggccttagttatt

SEQ ID NO: 56941 - DNA, 20 bp, Coronavirus
catgtgggccttagttattt

SEQ ID NO: 56942 - DNA, 20 bp, Coronavirus
gttatttctgtaacctctaa

SEQ ID NO: 56943 - DNA, 20 bp, Coronavirus
tttctgtaacctctaactat

SEQ ID NO: 56944 - DNA, 20 bp, Coronavirus
ctgtaacctctaactattct

SEQ ID NO: 56945 - DNA, 20 bp, Coronavirus
tgcctcctaagagtagtatt

SEQ ID NO: 56946 - DNA, 20 bp, Coronavirus
gcctcctaagagtagtattg

SEQ ID NO: 56947 - DNA, 20 bp, Coronavirus
cctcctaagagtagtattga

SEQ ID NO: 56948 - DNA, 20 bp, Coronavirus
atgctttcaagcttaacatt

SEQ ID NO: 56949 - DNA, 20 bp, Coronavirus
caagcttaacattaagttgt

SEQ ID NO: 56950 - DNA, 20 bp, Coronavirus
tgctatccatgcagggtgct

SEQ ID NO: 56951 - DNA, 20 bp, Coronavirus
gctatccatgcagggtgctg

SEQ ID NO: 56952 - DNA, 20 bp, Coronavirus
ctatccatgcagggtgctgt

SEQ ID NO: 56953 - DNA, 20 bp, Coronavirus
ataggttgtgcgaggaaatg

SEQ ID NO: 56954 - DNA, 20 bp, Coronavirus
tgcgaggaaatgctcgataa

SEQ ID NO: 56955 - DNA, 20 bp, Coronavirus
actatgcttaggaagcttga

SEQ ID NO: 56956 - DNA, 20 bp, Coronavirus
ggaagcttgataatgatgca

SEQ ID NO: 56957 - DNA, 20 bp, Coronavirus
agtgcatcattatcaagctt

SEQ ID NO: 56958 - DNA, 20 bp, Coronavirus
tcaagcttcctaagcatagt

SEQ ID NO: 56959 - DNA, 20 bp, Coronavirus
ctaagcatagtgaagagcat

SEQ ID NO: 56960 - DNA, 20 bp, Coronavirus
aactacagaataatgaactg

SEQ ID NO: 56961 - DNA, 20 bp, Coronavirus
tcatcagtacaagctgtttg

SEQ ID NO: 56962 - DNA, 20 bp, Coronavirus
gtgtggtaccagccgcacag

SEQ ID NO: 56963 - DNA, 20 bp, Coronavirus
tgtggtaccagccgcacagg

SEQ ID NO: 56964 - DNA, 20 bp, Coronavirus
attattctgtagtttaacag

SEQ ID NO: 56965 - DNA, 20 bp, Coronavirus
agctgctacagtacgtcttc

SEQ ID NO: 56966 - DNA, 20 bp, Coronavirus
gctgctacagtacgtcttca

SEQ ID NO: 56967 - DNA, 20 bp, Coronavirus
aggctggaaatgctacagaa

SEQ ID NO: 56968 - DNA, 20 bp, Coronavirus
aactgtgctttccttctgtg

SEQ ID NO: 56969 - DNA, 20 bp, Coronavirus
ccttctgtgcttttgcagta

SEQ ID NO: 56970 - DNA, 20 bp, Coronavirus
tgctaatgacccagtgggtt

SEQ ID NO: 56971 - DNA, 20 bp, Coronavirus
tacacttagaaacacagtct

SEQ ID NO: 56972 - DNA, 20 bp, Coronavirus
acacttagaaacacagtctg

SEQ ID NO: 56973 - DNA, 20 bp, Coronavirus
cacttagaaacacagtctgt

SEQ ID NO: 56974 - DNA, 20 bp, Coronavirus
gaaacacagtctgtaccgtc

SEQ ID NO: 56975 - DNA, 20 bp, Coronavirus
ctgtccatgactttttcaag

SEQ ID NO: 56976 - DNA, 20 bp, Coronavirus
ttcaagtttagagtagatgg

SEQ ID NO: 56977 - DNA, 20 bp, Coronavirus
tcaagtttagagtagatggt

SEQ ID NO: 56978 - DNA, 20 bp, Coronavirus
caagtttagagtagatggtg

SEQ ID NO: 56979 - DNA, 20 bp, Coronavirus
aagtttagagtagatggtga

SEQ ID NO: 56980 - DNA, 20 bp, Coronavirus
tgcgatgctatgcgtgatgc

SEQ ID NO: 56981 - DNA, 20 bp, Coronavirus
taggcgtactgacattagat

SEQ ID NO: 56982 - DNA, 20 bp, Coronavirus
gataatcaggatcttaatgg

SEQ ID NO: 56983 - DNA, 20 bp, Coronavirus
atgggaactggtacgatttc

SEQ ID NO: 56984 - DNA, 20 bp, Coronavirus
cggtgatttcgtacaagtag

SEQ ID NO: 56985 - DNA, 20 bp, Coronavirus
ggaccagacataccatccca

SEQ ID NO: 56986 - DNA, 20 bp, Coronavirus
tattaactgtttggatgata

SEQ ID NO: 56987 - DNA, 20 bp, Coronavirus
actgtttggatgataggtgt

SEQ ID NO: 56988 - DNA, 20 bp, Coronavirus
ggatgataggtgtatccttc

SEQ ID NO: 56989 - DNA, 20 bp, Coronavirus
gatgataggtgtatccttca

SEQ ID NO: 56990 - DNA, 20 bp, Coronavirus
tcagtagctgcactaacaaa

SEQ ID NO: 56991 - DNA, 20 bp, Coronavirus
cagtagctgcactaacaaac

SEQ ID NO: 56992 - DNA, 20 bp, Coronavirus
agtagctgcactaacaaaca

SEQ ID NO: 56993 - DNA, 20 bp, Coronavirus
cttttcaaactgtcaaaccc

SEQ ID NO: 56994 - DNA, 20 bp, Coronavirus
tcaaactgtcaaacccggta

SEQ ID NO: 56995 - DNA, 20 bp, Coronavirus
gtgcaaagaatagagctcgc

SEQ ID NO: 56996 - DNA, 20 bp, Coronavirus
catcagaaattattgaagtc

SEQ ID NO: 56997 - DNA, 20 bp, Coronavirus
atcagaaattattgaagtca

SEQ ID NO: 56998 - DNA, 20 bp, Coronavirus
ttgaagtcaatagccgccac

SEQ ID NO: 56999 - DNA, 20 bp, Coronavirus
aagtcaatagccgccactag

SEQ ID NO: 57000 - DNA, 20 bp, Coronavirus
ctgtaacttatcacaccgtt

SEQ ID NO: 57001 - DNA, 20 bp, Coronavirus
tcacaccgtttctacaggtt

SEQ ID NO: 57002 - DNA, 20 bp, Coronavirus
ctacaggttagctaacgagt

SEQ ID NO: 57003 - DNA, 20 bp, Coronavirus
tacaggttagctaacgagtg

SEQ ID NO: 57004 - DNA, 20 bp, Coronavirus
gctaacgagtgtgcgcaagt

SEQ ID NO: 57005 - DNA, 20 bp, Coronavirus
tacgcttacctgcgtaaaca

SEQ ID NO: 57006 - DNA, 20 bp, Coronavirus
acgcttacctgcgtaaacat

SEQ ID NO: 57007 - DNA, 20 bp, Coronavirus
cgcttacctgcgtaaacatt

SEQ ID NO: 57008 - DNA, 20 bp, Coronavirus
cctgcgtaaacatttctcca

SEQ ID NO: 57009 - DNA, 20 bp, Coronavirus
ctccatgatgattctttctg

SEQ ID NO: 57010 - DNA, 20 bp, Coronavirus
atgcttacccacttacaaaa

SEQ ID NO: 57011 - DNA, 20 bp, Coronavirus
cccacttacaaaacatccta

SEQ ID NO: 57012 - DNA, 20 bp, Coronavirus
caaaacatcctaatcaggag

SEQ ID NO: 57013 - DNA, 20 bp, Coronavirus
cacttgtatttacaatacat

SEQ ID NO: 57014 - DNA, 20 bp, Coronavirus
acttgtatttacaatacatt

SEQ ID NO: 57015 - DNA, 20 bp, Coronavirus
caacatcacacaaattagtg

SEQ ID NO: 57016 - DNA, 20 bp, Coronavirus
aacatcacacaaattagtgt

SEQ ID NO: 57017 - DNA, 20 bp, Coronavirus
gtgttgtctgttaatcccta

SEQ ID NO: 57018 - DNA, 20 bp, Coronavirus
tctgttaatccctatgtttg

SEQ ID NO: 57019 - DNA, 20 bp, Coronavirus
atccctatgtttgcaatgcc

SEQ ID NO: 57020 - DNA, 20 bp, Coronavirus
tcgcagcagaaacgctcaaa

SEQ ID NO: 57021 - DNA, 20 bp, Coronavirus
cgcagcagaaacgctcaaag

SEQ ID NO: 57022 - DNA, 20 bp, Coronavirus
gcagcagaaacgctcaaagc

SEQ ID NO: 57023 - DNA, 20 bp, Coronavirus
aagctgtcatatggtattgc

SEQ ID NO: 57024 - DNA, 20 bp, Coronavirus
agctgtcatatggtattgcc

SEQ ID NO: 57025 - DNA, 20 bp, Coronavirus
ctggcttgtacccaacactc

SEQ ID NO: 57026 - DNA, 20 bp, Coronavirus
tacccaacactcaacatctc

SEQ ID NO: 57027 - DNA, 20 bp, Coronavirus
tctagcaatgttgcaaatta

SEQ ID NO: 57028 - DNA, 20 bp, Coronavirus
ctagcaatgttgcaaattat

SEQ ID NO: 57029 - DNA, 20 bp, Coronavirus
tagcaatgttgcaaattatc

SEQ ID NO: 57030 - DNA, 20 bp, Coronavirus
tagtctttgatgaaatctct

SEQ ID NO: 57031 - DNA, 20 bp, Coronavirus
gatgaaatctctatggctac

SEQ ID NO: 57032 - DNA, 20 bp, Coronavirus
atgaaatctctatggctact

SEQ ID NO: 57033 - DNA, 20 bp, Coronavirus
tgacttgagtgttgtcaatg

SEQ ID NO: 57034 - DNA, 20 bp, Coronavirus
agtgttgtcaatgctagact

SEQ ID NO: 57035 - DNA, 20 bp, Coronavirus
aaaatgttctacaaaggtgt

SEQ ID NO: 57036 - DNA, 20 bp, Coronavirus
tacaaaggtgttattacaca

SEQ ID NO: 57037 - DNA, 20 bp, Coronavirus
ttacacatgatgtttcatct

SEQ ID NO: 57038 - DNA, 20 bp, Coronavirus
cacatgatgtttcatctgca

SEQ ID NO: 57039 - DNA, 20 bp, Coronavirus
catctgcaatcaacagacct

SEQ ID NO: 57040 - DNA, 20 bp, Coronavirus
atgacaaactgcaatttaca

SEQ ID NO: 57041 - DNA, 20 bp, Coronavirus
tgacaaactgcaatttacaa

SEQ ID NO: 57042 - DNA, 20 bp, Coronavirus
acaagtctagaaataccacg

SEQ ID NO: 57043 - DNA, 20 bp, Coronavirus
caagtctagaaataccacgt

SEQ ID NO: 57044 - DNA, 20 bp, Coronavirus
caagcagaaaatgtaactgg

SEQ ID NO: 57045 - DNA, 20 bp, Coronavirus
gtcacgttcgtgcgtggatt

SEQ ID NO: 57046 - DNA, 20 bp, Coronavirus
gtgcgtggattggctttgat

SEQ ID NO: 57047 - DNA, 20 bp, Coronavirus
gctttgatgtagagggctgt

SEQ ID NO: 57048 - DNA, 20 bp, Coronavirus
gatgtagagggctgtcatgc

SEQ ID NO: 57049 - DNA, 20 bp, Coronavirus
atgtagagggctgtcatgca

SEQ ID NO: 57050 - DNA, 20 bp, Coronavirus
tcagacagagtcgtgttcgt

SEQ ID NO: 57051 - DNA, 20 bp, Coronavirus
gtcctttgggcgcatggctt

SEQ ID NO: 57052 - DNA, 20 bp, Coronavirus
gggcgcatggctttgagctt

SEQ ID NO: 57053 - DNA, 20 bp, Coronavirus
ggcgcatggctttgagctta

SEQ ID NO: 57054 - DNA, 20 bp, Coronavirus
gagcttacatcaatgaagta

SEQ ID NO: 57055 - DNA, 20 bp, Coronavirus
attctgcttgcagaaaagta

SEQ ID NO: 57056 - DNA, 20 bp, Coronavirus
tgcttgcagaaaagtacaac

SEQ ID NO: 57057 - DNA, 20 bp, Coronavirus
cagaaaagtacaacacatgg

SEQ ID NO: 57058 - DNA, 20 bp, Coronavirus
tgaagtctgcattgcttgct

SEQ ID NO: 57059 - DNA, 20 bp, Coronavirus
cttgctgataagtttccagt

SEQ ID NO: 57060 - DNA, 20 bp, Coronavirus
gacacaagagtcttgtcaaa

SEQ ID NO: 57061 - DNA, 20 bp, Coronavirus
acacaagagtcttgtcaaac

SEQ ID NO: 57062 - DNA, 20 bp, Coronavirus
tcaaacttgaacttaccagg

SEQ ID NO: 57063 - DNA, 20 bp, Coronavirus
aacttaccaggctgtgatgg

SEQ ID NO: 57064 - DNA, 20 bp, Coronavirus
ccaggctgtgatggtggtag

SEQ ID NO: 57065 - DNA, 20 bp, Coronavirus
acaaacaatttgatacttat

SEQ ID NO: 57066 - DNA, 20 bp, Coronavirus
caaacaatttgatacttata

SEQ ID NO: 57067 - DNA, 20 bp, Coronavirus
gatacttataacctgtggaa

SEQ ID NO: 57068 - DNA, 20 bp, Coronavirus
atacttataacctgtggaat

SEQ ID NO: 57069 - DNA, 20 bp, Coronavirus
taacctgtggaatacattta

SEQ ID NO: 57070 - DNA, 20 bp, Coronavirus
ccaagaaacctactgagagt

SEQ ID NO: 57071 - DNA, 20 bp, Coronavirus
ttcttcacttactgtcttgt

SEQ ID NO: 57072 - DNA, 20 bp, Coronavirus
ttcacttactgtcttgtttg

SEQ ID NO: 57073 - DNA, 20 bp, Coronavirus
acttactgtcttgtttgatg

SEQ ID NO: 57074 - DNA, 20 bp, Coronavirus
ctgtcttgtttgatggtaga

SEQ ID NO: 57075 - DNA, 20 bp, Coronavirus
ctcgagctcgctatggatga

SEQ ID NO: 57076 - DNA, 20 bp, Coronavirus
tcgagctcgctatggatgaa

SEQ ID NO: 57077 - DNA, 20 bp, Coronavirus
atacagcgatataagctcga

SEQ ID NO: 57078 - DNA, 20 bp, Coronavirus
gaacacatcgtttatggaga

SEQ ID NO: 57079 - DNA, 20 bp, Coronavirus
atggagatttcagtcatgga

SEQ ID NO: 57080 - DNA, 20 bp, Coronavirus
caaaagtggtcaaggttaca

SEQ ID NO: 57081 - DNA, 20 bp, Coronavirus
aaaagtggtcaaggttacaa

SEQ ID NO: 57082 - DNA, 20 bp, Coronavirus
caattgactatgctgaaatt

SEQ ID NO: 57083 - DNA, 20 bp, Coronavirus
actatgctgaaatttcattc

SEQ ID NO: 57084 - DNA, 20 bp, Coronavirus
cattcatgctttggtgtaag

SEQ ID NO: 57085 - DNA, 20 bp, Coronavirus
tcgattcagatcttaatgac

SEQ ID NO: 57086 - DNA, 20 bp, Coronavirus
agatcttaatgacttcgtct

SEQ ID NO: 57087 - DNA, 20 bp, Coronavirus
atgacttcgtctccgacgca

SEQ ID NO: 57088 - DNA, 20 bp, Coronavirus
gtctccgacgcagattctac

SEQ ID NO: 57089 - DNA, 20 bp, Coronavirus
tactttaattggagactgtg

SEQ ID NO: 57090 - DNA, 20 bp, Coronavirus
ttaattggggctaactatct

SEQ ID NO: 57091 - DNA, 20 bp, Coronavirus
taattggggctaactatctt

SEQ ID NO: 57092 - DNA, 20 bp, Coronavirus
aattggggctaactatcttg

SEQ ID NO: 57093 - DNA, 20 bp, Coronavirus
attggggctaactatcttgg

SEQ ID NO: 57094 - DNA, 20 bp, Coronavirus
gggctaactatcttggcaag

SEQ ID NO: 57095 - DNA, 20 bp, Coronavirus
ctttgctgtttctaaaccca

SEQ ID NO: 57096 - DNA, 20 bp, Coronavirus
tttgctgtttctaaacccat

SEQ ID NO: 57097 - DNA, 20 bp, Coronavirus
gctgtttctaaacccatggg

SEQ ID NO: 57098 - DNA, 20 bp, Coronavirus
ctgtttctaaacccatgggt

SEQ ID NO: 57099 - DNA, 20 bp, Coronavirus
ctaaacccatgggtacacag

SEQ ID NO: 57100 - DNA, 20 bp, Coronavirus
ggggcacgtcagctgcagcc

SEQ ID NO: 57101 - DNA, 20 bp, Coronavirus
gggcacgtcagctgcagcct

SEQ ID NO: 57102 - DNA, 20 bp, Coronavirus
tgttggctatttaaagccaa

SEQ ID NO: 57103 - DNA, 20 bp, Coronavirus
gttggctatttaaagccaac

SEQ ID NO: 57104 - DNA, 20 bp, Coronavirus
ttggctatttaaagccaact

SEQ ID NO: 57105 - DNA, 20 bp, Coronavirus
aagtgctatggcgtttctgc

SEQ ID NO: 57106 - DNA, 20 bp, Coronavirus
agtgctatggcgtttctgcc

SEQ ID NO: 57107 - DNA, 20 bp, Coronavirus
ctgccactaagttgaatgat

SEQ ID NO: 57108 - DNA, 20 bp, Coronavirus
tgccactaagttgaatgatc

SEQ ID NO: 57109 - DNA, 20 bp, Coronavirus
aatgatctttgcttctccaa

SEQ ID NO: 57110 - DNA, 20 bp, Coronavirus
ctcccctgatggcaaacctt

SEQ ID NO: 57111 - DNA, 20 bp, Coronavirus
tcccctgatggcaaaccttg

SEQ ID NO: 57112 - DNA, 20 bp, Coronavirus
caccccacctgctcttaatt

SEQ ID NO: 57113 - DNA, 20 bp, Coronavirus
attgttattggccattaaat

SEQ ID NO: 57114 - DNA, 20 bp, Coronavirus
ttattggccattaaatgatt

SEQ ID NO: 57115 - DNA, 20 bp, Coronavirus
cgcttttgggggtgtaagtg

SEQ ID NO: 57116 - DNA, 20 bp, Coronavirus
tgggggtgtaagtgtaatta

SEQ ID NO: 57117 - DNA, 20 bp, Coronavirus
gggggtgtaagtgtaattac

SEQ ID NO: 57118 - DNA, 20 bp, Coronavirus
ggggtgtaagtgtaattaca

SEQ ID NO: 57119 - DNA, 20 bp, Coronavirus
cacctggaacaaatgcttca

SEQ ID NO: 57120 - DNA, 20 bp, Coronavirus
tactatgtctttaggtgctg

SEQ ID NO: 57121 - DNA, 20 bp, Coronavirus
aggtgctgatagttcaattg

SEQ ID NO: 57122 - DNA, 20 bp, Coronavirus
ggtgctgatagttcaattgc

SEQ ID NO: 57123 - DNA, 20 bp, Coronavirus
aattgcttactctaataaca

SEQ ID NO: 57124 - DNA, 20 bp, Coronavirus
cttactctaataacaccatt

SEQ ID NO: 57125 - DNA, 20 bp, Coronavirus
ctctttaataaggtgacact

SEQ ID NO: 57126 - DNA, 20 bp, Coronavirus
aataaggtgacactcgctga

SEQ ID NO: 57127 - DNA, 20 bp, Coronavirus
ataaggtgacactcgctgat

SEQ ID NO: 57128 - DNA, 20 bp, Coronavirus
atgaagcaatatggcgaatg

SEQ ID NO: 57129 - DNA, 20 bp, Coronavirus
atgctagagatctcatttgt

SEQ ID NO: 57130 - DNA, 20 bp, Coronavirus
aacaaggcgattagtcaaat

SEQ ID NO: 57131 - DNA, 20 bp, Coronavirus
acaaggcgattagtcaaatt

SEQ ID NO: 57132 - DNA, 20 bp, Coronavirus
gtcaaattcaagaatcactt

SEQ ID NO: 57133 - DNA, 20 bp, Coronavirus
aagaatcacttacaacaaca

SEQ ID NO: 57134 - DNA, 20 bp, Coronavirus
caacaacatcaactgcattg

SEQ ID NO: 57135 - DNA, 20 bp, Coronavirus
acttttgtggaaagggctac

SEQ ID NO: 57136 - DNA, 20 bp, Coronavirus
tgtggaaagggctaccacct

SEQ ID NO: 57137 - DNA, 20 bp, Coronavirus
gtggaaagggctaccacctt

SEQ ID NO: 57138 - DNA, 20 bp, Coronavirus
tggaaagggctaccacctta

SEQ ID NO: 57139 - DNA, 20 bp, Coronavirus
tgtccttcccacaagcagcc

SEQ ID NO: 57140 - DNA, 20 bp, Coronavirus
atgatcctctgcaacctgag

SEQ ID NO: 57141 - DNA, 20 bp, Coronavirus
tgatcctctgcaacctgagc

SEQ ID NO: 57142 - DNA, 20 bp, Coronavirus
actcattcaaagaagagctg

SEQ ID NO: 57143 - DNA, 20 bp, Coronavirus
aaagaagagctggacaagta

SEQ ID NO: 57144 - DNA, 20 bp, Coronavirus
aaaaatcatacatcaccaga

SEQ ID NO: 57145 - DNA, 20 bp, Coronavirus
ctttgttgcatgactagttg

SEQ ID NO: 57146 - DNA, 20 bp, Coronavirus
gttgcatgactagttgttgc

SEQ ID NO: 57147 - DNA, 20 bp, Coronavirus
ttgcatgactagttgttgca

SEQ ID NO: 57148 - DNA, 20 bp, Coronavirus
catgactagttgttgcagtt

SEQ ID NO: 57149 - DNA, 20 bp, Coronavirus
ttgcagttgcctcaagggtg

SEQ ID NO: 57150 - DNA, 20 bp, Coronavirus
cgctcaataaaagatggcag

SEQ ID NO: 57151 - DNA, 20 bp, Coronavirus
ataagggcttccagttcatt

SEQ ID NO: 57152 - DNA, 20 bp, Coronavirus
taagggcttccagttcattt

SEQ ID NO: 57153 - DNA, 20 bp, Coronavirus
cagttcatttgcaatttact

SEQ ID NO: 57154 - DNA, 20 bp, Coronavirus
atttgcaatttactgctgct

SEQ ID NO: 57155 - DNA, 20 bp, Coronavirus
aagactatgtcgttgtacat

SEQ ID NO: 57156 - DNA, 20 bp, Coronavirus
tacatggctatttcaccgaa

SEQ ID NO: 57157 - DNA, 20 bp, Coronavirus
caccgaagtttactaccagc

SEQ ID NO: 57158 - DNA, 20 bp, Coronavirus
accgaagtttactaccagct

SEQ ID NO: 57159 - DNA, 20 bp, Coronavirus
actaccagcttgagtctaca

SEQ ID NO: 57160 - DNA, 20 bp, Coronavirus
atagttaatagcgtacttct

SEQ ID NO: 57161 - DNA, 20 bp, Coronavirus
atagcgtacttctttttctt

SEQ ID NO: 57162 - DNA, 20 bp, Coronavirus
tttttcttgctttcgtggta

SEQ ID NO: 57163 - DNA, 20 bp, Coronavirus
ttcttgctttcgtggtattc

SEQ ID NO: 57164 - DNA, 20 bp, Coronavirus
tcttgctttcgtggtattct

SEQ ID NO: 57165 - DNA, 20 bp, Coronavirus
cctattcctagcctggatta

SEQ ID NO: 57166 - DNA, 20 bp, Coronavirus
ctattcctagcctggattat

SEQ ID NO: 57167 - DNA, 20 bp, Coronavirus
ctagcctggattatgttact

SEQ ID NO: 57168 - DNA, 20 bp, Coronavirus
tgttactacaatttgcctat

SEQ ID NO: 57169 - DNA, 20 bp, Coronavirus
ctacaatttgcctattctaa

SEQ ID NO: 57170 - DNA, 20 bp, Coronavirus
gtggtcacttgcgaatggcc

SEQ ID NO: 57171 - DNA, 20 bp, Coronavirus
cgaatggccggacactccct

SEQ ID NO: 57172 - DNA, 20 bp, Coronavirus
aggacctgccaaaagagatc

SEQ ID NO: 57173 - DNA, 20 bp, Coronavirus
cttattacaaattaggagcg

SEQ ID NO: 57174 - DNA, 20 bp, Coronavirus
ttattacaaattaggagcgt

SEQ ID NO: 57175 - DNA, 20 bp, Coronavirus
attgtatttacatcttgcga

SEQ ID NO: 57176 - DNA, 20 bp, Coronavirus
tatttacatcttgcgagcta

SEQ ID NO: 57177 - DNA, 20 bp, Coronavirus
acatcttgcgagctatatca

SEQ ID NO: 57178 - DNA, 20 bp, Coronavirus
catcttgcgagctatatcac

SEQ ID NO: 57179 - DNA, 20 bp, Coronavirus
cgagctatatcactatcagg

SEQ ID NO: 57180 - DNA, 20 bp, Coronavirus
catatgcactgtagtacagc

SEQ ID NO: 57181 - DNA, 20 bp, Coronavirus
aagatccttgtaaggtacaa

SEQ ID NO: 57182 - DNA, 20 bp, Coronavirus
taaggtacaacactaggggt

SEQ ID NO: 57183 - DNA, 20 bp, Coronavirus
cccctagtgttgtaccttac

SEQ ID NO: 57184 - DNA, 20 bp, Coronavirus
taccttacaaggatcttcaa

SEQ ID NO: 57185 - DNA, 20 bp, Coronavirus
gtggacccacagattcaact

SEQ ID NO: 57186 - DNA, 20 bp, Coronavirus
aactgacaataaccagaatg

SEQ ID NO: 57187 - DNA, 20 bp, Coronavirus
acccaataatactgcgtctt

SEQ ID NO: 57188 - DNA, 20 bp, Coronavirus
cccaataatactgcgtcttg

SEQ ID NO: 57189 - DNA, 20 bp, Coronavirus
ttgggtaaaccttggggtcg

SEQ ID NO: 57190 - DNA, 20 bp, Coronavirus
caactgagggagccttgaat

SEQ ID NO: 57191 - DNA, 20 bp, Coronavirus
aatacacccaaagaccacat

SEQ ID NO: 57192 - DNA, 20 bp, Coronavirus
gcacccgcaatcctaataac

SEQ ID NO: 57193 - DNA, 20 bp, Coronavirus
ctcaaggaacaacattgcca

SEQ ID NO: 57194 - DNA, 20 bp, Coronavirus
gcaatgttgttccttgagga

SEQ ID NO: 57195 - DNA, 20 bp, Coronavirus
tgtggcagtacgtttttggc

SEQ ID NO: 57196 - DNA, 20 bp, Coronavirus
gtggcagtacgtttttggcg

SEQ ID NO: 57197 - DNA, 20 bp, Coronavirus
tggcagtacgtttttggcga

SEQ ID NO: 57198 - DNA, 20 bp, Coronavirus
ttggcgaggctttttagatg

SEQ ID NO: 57199 - DNA, 20 bp, Coronavirus
tggcgaggctttttagatgc

SEQ ID NO: 57200 - DNA, 20 bp, Coronavirus
gatgacaaagatccacaatt

SEQ ID NO: 57201 - DNA, 20 bp, Coronavirus
aaagacaacgtcatactgct

SEQ ID NO: 57202 - DNA, 20 bp, Coronavirus
acgcatacaaaacattccca

SEQ ID NO: 57203 - DNA, 20 bp, Coronavirus
ccaccaacagagcctaaaaa

SEQ ID NO: 57204 - DNA, 20 bp, Coronavirus
ttaggctctgttggtgggaa

SEQ ID NO: 57205 - DNA, 20 bp, Coronavirus
tgcagaatgaattctcgtaa

SEQ ID NO: 57206 - DNA, 20 bp, Coronavirus
tcgtaactaaacagcacaag

SEQ ID NO: 57207 - DNA, 20 bp, Coronavirus
agttaactttaatctcacat

SEQ ID NO: 57208 - DNA, 20 bp, Coronavirus
gttaactttaatctcacata

SEQ ID NO: 57209 - DNA, 20 bp, Coronavirus
actttaatctcacatagcaa

SEQ ID NO: 57210 - DNA, 20 bp, Human rhinovirus 89
ttacggtaactttgtacgcc

SEQ ID NO: 57211 - DNA, 20 bp, Human rhinovirus 89
cggtaactttgtacgccagt

SEQ ID NO: 57212 - DNA, 20 bp, Human rhinovirus 89
gtacgccagtttttcccacc

SEQ ID NO: 57213 - DNA, 20 bp, Human rhinovirus 89
tacgccagtttttcccaccc

SEQ ID NO: 57214 - DNA, 20 bp, Human rhinovirus 89
ttcccacccttccccataat

SEQ ID NO: 57215 - DNA, 20 bp, Human rhinovirus 89
cccactggcgacagtggtcc

SEQ ID NO: 57216 - DNA, 20 bp, Human rhinovirus 89
ttgggtgagaagcctaatta

SEQ ID NO: 57217 - DNA, 20 bp, Human rhinovirus 89
ggtgagaagcctaattattg

SEQ ID NO: 57218 - DNA, 20 bp, Human rhinovirus 89
ttgacaaggtgtgaagagcc

SEQ ID NO: 57219 - DNA, 20 bp, Human rhinovirus 89
acaaggtgtgaagagccgcg

SEQ ID NO: 57220 - DNA, 20 bp, Human rhinovirus 89
ttcttttgattgcattttat

SEQ ID NO: 57221 - DNA, 20 bp, Human rhinovirus 89
tcttttgattgcattttatg

SEQ ID NO: 57222 - DNA, 20 bp, Human rhinovirus 89
cttttgattgcattttatgg

SEQ ID NO: 57223 - DNA, 20 bp, Human rhinovirus 89
ttttgattgcattttatggt

SEQ ID NO: 57224 - DNA, 20 bp, Human rhinovirus 89
tgattgcattttatggtgac

SEQ ID NO: 57225 - DNA, 20 bp, Human rhinovirus 89
caacacttcaatcaccaaca

SEQ ID NO: 57226 - DNA, 20 bp, Human rhinovirus 89
aatcaccaacagttgaagct

SEQ ID NO: 57227 - DNA, 20 bp, Human rhinovirus 89
aagcttgtggttattcagac

SEQ ID NO: 57228 - DNA, 20 bp, Human rhinovirus 89
tggttattcagacagactaa

SEQ ID NO: 57229 - DNA, 20 bp, Human rhinovirus 89
ttcagacagactaatacaga

SEQ ID NO: 57230 - DNA, 20 bp, Human rhinovirus 89
cctgatgcccttaaaaacat

SEQ ID NO: 57231 - DNA, 20 bp, Human rhinovirus 89
aaaacatgggtatatttggt

SEQ ID NO: 57232 - DNA, 20 bp, Human rhinovirus 89
ggtgaaaatatgttttacca

SEQ ID NO: 57233 - DNA, 20 bp, Human rhinovirus 89
gtgaaaatatgttttaccat

SEQ ID NO: 57234 - DNA, 20 bp, Human rhinovirus 89
taccattttctagggagatc

SEQ ID NO: 57235 - DNA, 20 bp, Human rhinovirus 89
gttaaattttgatggaacat

SEQ ID NO: 57236 - DNA, 20 bp, Human rhinovirus 89
aattttgatggaacattact

SEQ ID NO: 57237 - DNA, 20 bp, Human rhinovirus 89
tgatggaacattacttggta

SEQ ID NO: 57238 - DNA, 20 bp, Human rhinovirus 89
gatggaacattacttggtaa

SEQ ID NO: 57239 - DNA, 20 bp, Human rhinovirus 89
atggaacattacttggtaac

SEQ ID NO: 57240 - DNA, 20 bp, Human rhinovirus 89
tcagggccaagaagtaaggt

SEQ ID NO: 57241 - DNA, 20 bp, Human rhinovirus 89
cagggccaagaagtaaggtt

SEQ ID NO: 57242 - DNA, 20 bp, Human rhinovirus 89
agggccaagaagtaaggttg

SEQ ID NO: 57243 - DNA, 20 bp, Human rhinovirus 89
tgtttagtaccactcagggt

SEQ ID NO: 57244 - DNA, 20 bp, Human rhinovirus 89
agtaccactcagggtttacc

SEQ ID NO: 57245 - DNA, 20 bp, Human rhinovirus 89
atttagctaaagaagtcttt

SEQ ID NO: 57246 - DNA, 20 bp, Human rhinovirus 89
agctaaagaagtcttttcta

SEQ ID NO: 57247 - DNA, 20 bp, Human rhinovirus 89
gctaaagaagtcttttctat

SEQ ID NO: 57248 - DNA, 20 bp, Human rhinovirus 89
tctataccagtagatattgc

SEQ ID NO: 57249 - DNA, 20 bp, Human rhinovirus 89
ctataccagtagatattgcc

SEQ ID NO: 57250 - DNA, 20 bp, Human rhinovirus 89
gtacacatttagtgtgggat

SEQ ID NO: 57251 - DNA, 20 bp, Human rhinovirus 89
agtgtgggatgtggggttgc

SEQ ID NO: 57252 - DNA, 20 bp, Human rhinovirus 89
gtgtgggatgtggggttgca

SEQ ID NO: 57253 - DNA, 20 bp, Human rhinovirus 89
cagtccaccgcctcactagt

SEQ ID NO: 57254 - DNA, 20 bp, Human rhinovirus 89
taccatgggttagtgctagc

SEQ ID NO: 57255 - DNA, 20 bp, Human rhinovirus 89
aaaattatatagatagtgta

SEQ ID NO: 57256 - DNA, 20 bp, Human rhinovirus 89
tatagatagtgtattaaatg

SEQ ID NO: 57257 - DNA, 20 bp, Human rhinovirus 89
aatgaagttcttgtggtgcc

SEQ ID NO: 57258 - DNA, 20 bp, Human rhinovirus 89
ttgtggtgccaaatatccaa

SEQ ID NO: 57259 - DNA, 20 bp, Human rhinovirus 89
tggtgccaaatatccaacct

SEQ ID NO: 57260 - DNA, 20 bp, Human rhinovirus 89
cacatggcaatcaggaacaa

SEQ ID NO: 57261 - DNA, 20 bp, Human rhinovirus 89
tggcaagaaggacaaccata

SEQ ID NO: 57262 - DNA, 20 bp, Human rhinovirus 89
tccttcttgccagaacacag

SEQ ID NO: 57263 - DNA, 20 bp, Human rhinovirus 89
ttgccagaacacagatgcat

SEQ ID NO: 57264 - DNA, 20 bp, Human rhinovirus 89
ccagaacacagatgcatttg

SEQ ID NO: 57265 - DNA, 20 bp, Human rhinovirus 89
accacaaggccaaacatata

SEQ ID NO: 57266 - DNA, 20 bp, Human rhinovirus 89
ccacaaggccaaacatataa

SEQ ID NO: 57267 - DNA, 20 bp, Human rhinovirus 89
cctatcaacacacacactca

SEQ ID NO: 57268 - DNA, 20 bp, Human rhinovirus 89
gatggtatgtaattggttga

SEQ ID NO: 57269 - DNA, 20 bp, Human rhinovirus 89
gttgagtgtgtgtgttgata

SEQ ID NO: 57270 - DNA, 20 bp, Human rhinovirus 89
tgattgcactgaatgtacat

SEQ ID NO: 57271 - DNA, 20 bp, Human rhinovirus 89
cactgaatgtacatattact

SEQ ID NO: 57272 - DNA, 20 bp, Human rhinovirus 89
ctgccaccacaaagataggt

SEQ ID NO: 57273 - DNA, 20 bp, Human rhinovirus 89
gtggtggcagtaatatgtac

SEQ ID NO: 57274 - DNA, 20 bp, Human rhinovirus 89
tggtggcagtaatatgtaca

SEQ ID NO: 57275 - DNA, 20 bp, Human rhinovirus 89
cttttattgacctgagaaaa

SEQ ID NO: 57276 - DNA, 20 bp, Human rhinovirus 89
tattgacctgagaaaattcc

SEQ ID NO: 57277 - DNA, 20 bp, Human rhinovirus 89
attgacctgagaaaattcca

SEQ ID NO: 57278 - DNA, 20 bp, Human rhinovirus 89
ttgacctgagaaaattccag

SEQ ID NO: 57279 - DNA, 20 bp, Human rhinovirus 89
acctgagaaaattccagtgt

SEQ ID NO: 57280 - DNA, 20 bp, Human rhinovirus 89
taggttgttcaggctcacca

SEQ ID NO: 57281 - DNA, 20 bp, Human rhinovirus 89
ttcaggctcaccatggaggt

SEQ ID NO: 57282 - DNA, 20 bp, Human rhinovirus 89
aggctcaccatggaggtttc

SEQ ID NO: 57283 - DNA, 20 bp, Human rhinovirus 89
cttaaagagaaactctgtgc

SEQ ID NO: 57284 - DNA, 20 bp, Human rhinovirus 89
ttaaagagaaactctgtgcg

SEQ ID NO: 57285 - DNA, 20 bp, Human rhinovirus 89
tgttcttgctcgaatgctaa

SEQ ID NO: 57286 - DNA, 20 bp, Human rhinovirus 89
ttgctcgaatgctaactgtt

SEQ ID NO: 57287 - DNA, 20 bp, Human rhinovirus 89
ctcgaatgctaactgttgag

SEQ ID NO: 57288 - DNA, 20 bp, Human rhinovirus 89
agactgatatatattctttg

SEQ ID NO: 57289 - DNA, 20 bp, Human rhinovirus 89
tttgcccccagatcctaaat

SEQ ID NO: 57290 - DNA, 20 bp, Human rhinovirus 89
tacttgcaagcactaatcac

SEQ ID NO: 57291 - DNA, 20 bp, Human rhinovirus 89
caagcactaatcacactcta

SEQ ID NO: 57292 - DNA, 20 bp, Human rhinovirus 89
attaccagcaatggcaagaa

SEQ ID NO: 57293 - DNA, 20 bp, Human rhinovirus 89
ccagcaatggcaagaaggtt

SEQ ID NO: 57294 - DNA, 20 bp, Human rhinovirus 89
tactttgatctagacattca

SEQ ID NO: 57295 - DNA, 20 bp, Human rhinovirus 89
tctatataatttataaattg

SEQ ID NO: 57296 - DNA, 20 bp, Human rhinovirus 89
ataaattgttctgtacactt

SEQ ID NO: 57297 - DNA, 20 bp, Human rhinovirus 89
taaattgttctgtacacttc

SEQ ID NO: 57298 - DNA, 20 bp, Human rhinovirus 89
ttctgtacacttcagggtcc

SEQ ID NO: 57299 - DNA, 20 bp, Human rhinovirus 89
tgtacacttcagggtccata

SEQ ID NO: 57300 - DNA, 20 bp, Human rhinovirus 89
tgacccaggctctgagatct

SEQ ID NO: 57301 - DNA, 20 bp, Human rhinovirus 89
gtagatggagtaaaagttaa

SEQ ID NO: 57302 - DNA, 20 bp, Human rhinovirus 89
aggtctctgattcctatgat

SEQ ID NO: 57303 - DNA, 20 bp, Human rhinovirus 89
ctatgatttgcataaccatg

SEQ ID NO: 57304 - DNA, 20 bp, Human rhinovirus 89
gcataaccatgagggtgtta

SEQ ID NO: 57305 - DNA, 20 bp, Human rhinovirus 89
cccgacaaaagctggatatt

SEQ ID NO: 57306 - DNA, 20 bp, Human rhinovirus 89
tgggggtgttttgtacaagg

SEQ ID NO: 57307 - DNA, 20 bp, Human rhinovirus 89
tgtacaaggttggctctatt

SEQ ID NO: 57308 - DNA, 20 bp, Human rhinovirus 89
gtacaaggttggctctattc

SEQ ID NO: 57309 - DNA, 20 bp, Human rhinovirus 89
tacaaggttggctctattct

SEQ ID NO: 57310 - DNA, 20 bp, Human rhinovirus 89
gaaatcttttctctgctttc

SEQ ID NO: 57311 - DNA, 20 bp, Human rhinovirus 89
tctctgctttccacaaaaac

SEQ ID NO: 57312 - DNA, 20 bp, Human rhinovirus 89
ctctgctttccacaaaaacc

SEQ ID NO: 57313 - DNA, 20 bp, Human rhinovirus 89
tctgctttccacaaaaaccc

SEQ ID NO: 57314 - DNA, 20 bp, Human rhinovirus 89
ccacaaaaacccaggtatag

SEQ ID NO: 57315 - DNA, 20 bp, Human rhinovirus 89
tccaagaattgacctataaa

SEQ ID NO: 57316 - DNA, 20 bp, Human rhinovirus 89
ccaagaattgacctataaaa

SEQ ID NO: 57317 - DNA, 20 bp, Human rhinovirus 89
caagaattgacctataaaaa

SEQ ID NO: 57318 - DNA, 20 bp, Human rhinovirus 89
acctataaaaatgtaacttt

SEQ ID NO: 57319 - DNA, 20 bp, Human rhinovirus 89
tcttaaaagaggattcagag

SEQ ID NO: 57320 - DNA, 20 bp, Human papillomavirus type 131
taggattgacagcaattgtt

SEQ ID NO: 57321 - DNA, 20 bp, Human papillomavirus type 131
acagcaattgttctaattgt

SEQ ID NO: 57322 - DNA, 20 bp, Human papillomavirus type 131
ttctaattgtcacacaaata

SEQ ID NO: 57323 - DNA, 20 bp, Human papillomavirus type 131
taattgtcacacaaatatta

SEQ ID NO: 57324 - DNA, 20 bp, Human papillomavirus type 131
tcacacaaatattagactgt

SEQ ID NO: 57325 - DNA, 20 bp, Human papillomavirus type 131
taatgtacaggtagcttgtg

SEQ ID NO: 57326 - DNA, 20 bp, Human papillomavirus type 131
tgaagattctgtagactctc

SEQ ID NO: 57327 - DNA, 20 bp, Human papillomavirus type 131
tgtagactctctaaattcaa

SEQ ID NO: 57328 - DNA, 20 bp, Human papillomavirus type 131
aaatgtggcgggaaatgaaa

SEQ ID NO: 57329 - DNA, 20 bp, Human papillomavirus type 131
ccgccattttcatttcccgc

SEQ ID NO: 57330 - DNA, 20 bp, Human papillomavirus type 131
ttggtcatatttagatgtgc

SEQ ID NO: 57331 - DNA, 20 bp, Human papillomavirus type 131
gtcatatttagatgtgcata

SEQ ID NO: 57332 - DNA, 20 bp, Human papillomavirus type 131
agatgtgcatatgagaaatg

SEQ ID NO: 57333 - DNA, 20 bp, Human papillomavirus type 131
gatgtgcatatgagaaatgc

SEQ ID NO: 57334 - DNA, 20 bp, Human papillomavirus type 131
gatggtaatatggtatgttt

SEQ ID NO: 57335 - DNA, 20 bp, Human papillomavirus type 131
agttgagtctaattgagaaa

SEQ ID NO: 57336 - DNA, 20 bp, Human papillomavirus type 131
agtctaattgagaaagaatc

SEQ ID NO: 57337 - DNA, 20 bp, Human papillomavirus type 131
agaaagaatctacagacctt

SEQ ID NO: 57338 - DNA, 20 bp, Human papillomavirus type 131
gagatcacatcacatactgg

SEQ ID NO: 57339 - DNA, 20 bp, Human papillomavirus type 131
gaaaagaaaatgttattgta

SEQ ID NO: 57340 - DNA, 20 bp, Human papillomavirus type 131
agtttaaaaacaaaactatt

SEQ ID NO: 57341 - DNA, 20 bp, Human papillomavirus type 131
aaaaacaaaactattcttgc

SEQ ID NO: 57342 - DNA, 20 bp, Human papillomavirus type 131
aaaacaaaactattcttgct

SEQ ID NO: 57343 - DNA, 20 bp, Human papillomavirus type 131
ttgctcctgtcactagctcc

SEQ ID NO: 57344 - DNA, 20 bp, Human papillomavirus type 131
ctcctgtcactagctcctca

SEQ ID NO: 57345 - DNA, 20 bp, Human papillomavirus type 131
cggtggttggggcatgactg

SEQ ID NO: 57346 - DNA, 20 bp, Human papillomavirus type 131
ggtggttggggcatgactgt

SEQ ID NO: 57347 - DNA, 20 bp, Human papillomavirus type 131
gggcatgactgtgaaaaaac

SEQ ID NO: 57348 - DNA, 20 bp, Human papillomavirus type 131
aaagaccttacacaaagaca

SEQ ID NO: 57349 - DNA, 20 bp, Human papillomavirus type 131
aagaccttacacaaagacaa

SEQ ID NO: 57350 - DNA, 20 bp, Human papillomavirus type 131
ttattgagcctattggacct

SEQ ID NO: 57351 - DNA, 20 bp, Human papillomavirus type 131
ttgagcctattggacctaca

SEQ ID NO: 57352 - DNA, 20 bp, Human papillomavirus type 131
agcctattggacctacacct

SEQ ID NO: 57353 - DNA, 20 bp, Human papillomavirus type 131
gacctacacctataattcca

SEQ ID NO: 57354 - DNA, 20 bp, Human papillomavirus type 131
cagtagaacctggagcatct

SEQ ID NO: 57355 - DNA, 20 bp, Human papillomavirus type 131
gggcgggcctttaacagagc

SEQ ID NO: 57356 - DNA, 20 bp, Human papillomavirus type 131
ggcgggcctttaacagagct

SEQ ID NO: 57357 - DNA, 20 bp, Human papillomavirus type 131
aacagagctagagatcttta

SEQ ID NO: 57358 - DNA, 20 bp, Human papillomavirus type 131
acagagctagagatctttat

SEQ ID NO: 57359 - DNA, 20 bp, Human papillomavirus type 131
atagtagatttatagagcag

SEQ ID NO: 57360 - DNA, 20 bp, Human papillomavirus type 131
taaaggtatttgtccccgat

SEQ ID NO: 57361 - DNA, 20 bp, Human papillomavirus type 131
aaaggtatttgtccccgatg

SEQ ID NO: 57362 - DNA, 20 bp, Human papillomavirus type 131
aaggtatttgtccccgatgt

SEQ ID NO: 57363 - DNA, 20 bp, Human papillomavirus type 131
gtccccgatgtaggtgatgg

SEQ ID NO: 57364 - DNA, 20 bp, Human papillomavirus type 131
tccccgatgtaggtgatgga

SEQ ID NO: 57365 - DNA, 20 bp, Human papillomavirus type 131
gctttaatagaaaagaattt

SEQ ID NO: 57366 - DNA, 20 bp, Human papillomavirus type 131
ctttaatagaaaagaattta

SEQ ID NO: 57367 - DNA, 20 bp, Human papillomavirus type 131
aatagaaaagaatttataca

SEQ ID NO: 57368 - DNA, 20 bp, Human papillomavirus type 131
atagaaaagaatttatacaa

SEQ ID NO: 57369 - DNA, 20 bp, Human papillomavirus type 131
atacaattcagacagggaac

SEQ ID NO: 57370 - DNA, 20 bp, Human papillomavirus type 131
tttgaaatgacaaaggatac

SEQ ID NO: 57371 - DNA, 20 bp, Human papillomavirus type 131
ttgaaatgacaaaggataca

SEQ ID NO: 57372 - DNA, 20 bp, Human papillomavirus type 131
tgaaatgacaaaggatacat

SEQ ID NO: 57373 - DNA, 20 bp, Human papillomavirus type 131
gaaatgacaaaggatacata

SEQ ID NO: 57374 - DNA, 20 bp, Human papillomavirus type 131
aaatgacaaaggatacatat

SEQ ID NO: 57375 - DNA, 20 bp, Human papillomavirus type 131
tagcacatctgcaagttatg

SEQ ID NO: 57376 - DNA, 20 bp, Human papillomavirus type 131
agcacatctgcaagttatga

SEQ ID NO: 57377 - DNA, 20 bp, Human papillomavirus type 131
gcacatctgcaagttatgaa

SEQ ID NO: 57378 - DNA, 20 bp, Human papillomavirus type 131
tgaatcccagaatattggaa

SEQ ID NO: 57379 - DNA, 20 bp, Human papillomavirus type 131
gaagaatggcagttggcttt

SEQ ID NO: 57380 - DNA, 20 bp, Human papillomavirus type 131
gttgcatgtgtgttttatct

SEQ ID NO: 57381 - DNA, 20 bp, Human papillomavirus type 131
ttgcatgtgtgttttatctg

SEQ ID NO: 57382 - DNA, 20 bp, Human papillomavirus type 131
catgtgtgttttatctgact

SEQ ID NO: 57383 - DNA, 20 bp, Human papillomavirus type 131
tatctgactcatggggtcac

SEQ ID NO: 57384 - DNA, 20 bp, Human papillomavirus type 131
atctgactcatggggtcact

SEQ ID NO: 57385 - DNA, 20 bp, Human papillomavirus type 135
ccacaattccagatgtttgt

SEQ ID NO: 57386 - DNA, 20 bp, Human papillomavirus type 135
cagatgtttgtttggaagag

SEQ ID NO: 57387 - DNA, 20 bp, Human papillomavirus type 135
gtttggaagagttggtgtta

SEQ ID NO: 57388 - DNA, 20 bp, Human papillomavirus type 135
tttggaagagttggtgttac

SEQ ID NO: 57389 - DNA, 20 bp, Human papillomavirus type 135
ggaagagttggtgttacctt

SEQ ID NO: 57390 - DNA, 20 bp, Human papillomavirus type 135
aattacaaactgcagattgg

SEQ ID NO: 57391 - DNA, 20 bp, Human papillomavirus type 135
caaactgcagattggtttat

SEQ ID NO: 57392 - DNA, 20 bp, Human papillomavirus type 135
gtttattgtggaagaagcag

SEQ ID NO: 57393 - DNA, 20 bp, Human papillomavirus type 135
attgtggaagaagcagattg

SEQ ID NO: 57394 - DNA, 20 bp, Human papillomavirus type 135
ttgtggaagaagcagattgt

SEQ ID NO: 57395 - DNA, 20 bp, Human papillomavirus type 135
tagatttgagtccgagactg

SEQ ID NO: 57396 - DNA, 20 bp, Human papillomavirus type 135
gagtccgagactggcagcag

SEQ ID NO: 57397 - DNA, 20 bp, Human papillomavirus type 135
agtccgagactggcagcagt

SEQ ID NO: 57398 - DNA, 20 bp, Human papillomavirus type 135
ctcctcagagacaaagcaag

SEQ ID NO: 57399 - DNA, 20 bp, Human papillomavirus type 135
tcctcagagacaaagcaaga

SEQ ID NO: 57400 - DNA, 20 bp, Human papillomavirus type 135
accgaccgtttcgatgtact

SEQ ID NO: 57401 - DNA, 20 bp, Human papillomavirus type 135
cgatgtactgcaggatcaac

SEQ ID NO: 57402 - DNA, 20 bp, Human papillomavirus type 135
gatgtactgcaggatcaact

SEQ ID NO: 57403 - DNA, 20 bp, Human papillomavirus type 135
atgaaaaaggagcaactgac

SEQ ID NO: 57404 - DNA, 20 bp, Human papillomavirus type 135
tgaaaaaggagcaactgacc

SEQ ID NO: 57405 - DNA, 20 bp, Human papillomavirus type 135
aattcaaatcaactactatt

SEQ ID NO: 57406 - DNA, 20 bp, Human papillomavirus type 135
aaatcaactactatttcctc

SEQ ID NO: 57407 - DNA, 20 bp, Human papillomavirus type 135
cctctgtcgttactagttcc

SEQ ID NO: 57408 - DNA, 20 bp, Human papillomavirus type 135
ctctgtcgttactagttcca

SEQ ID NO: 57409 - DNA, 20 bp, Human papillomavirus type 135
ctagttccaagaagtccttc

SEQ ID NO: 57410 - DNA, 20 bp, Human papillomavirus type 135
gtcaggagttggtgcagtgg

SEQ ID NO: 57411 - DNA, 20 bp, Human papillomavirus type 135
gtgcagtgggccccctggtc

SEQ ID NO: 57412 - DNA, 20 bp, Human papillomavirus type 135
gctcttggttctctggtggt

SEQ ID NO: 57413 - DNA, 20 bp, Human papillomavirus type 135
gttctctggtggttgattct

SEQ ID NO: 57414 - DNA, 20 bp, Human papillomavirus type 135
tctggtggttgattctcctt

SEQ ID NO: 57415 - DNA, 20 bp, Human papillomavirus type 135
gtggcgctgaagtaatacct

SEQ ID NO: 57416 - DNA, 20 bp, Human papillomavirus type 135
ggatgtgataaatccagagg

SEQ ID NO: 57417 - DNA, 20 bp, Human papillomavirus type 135
gatgtgataaatccagaggc

SEQ ID NO: 57418 - DNA, 20 bp, Human papillomavirus type 135
tgcctttgcaagaaggtgct

SEQ ID NO: 57419 - DNA, 20 bp, Human papillomavirus type 135
gcaagaaggtgctatcccca

SEQ ID NO: 57420 - DNA, 20 bp, Human papillomavirus type 135
tacaatcgttttgtacaaca

SEQ ID NO: 57421 - DNA, 20 bp, Human papillomavirus type 135
tgtacaacaggttcaaacca

SEQ ID NO: 57422 - DNA, 20 bp, Human papillomavirus type 135
gtacaacaggttcaaaccag

SEQ ID NO: 57423 - DNA, 20 bp, Human papillomavirus type 135
tacaacaggttcaaaccaga

SEQ ID NO: 57424 - DNA, 20 bp, Human papillomavirus type 135
aaaccagaaacccagacttc

SEQ ID NO: 57425 - DNA, 20 bp, Human papillomavirus type 135
gaacatatccttcaagggga

SEQ ID NO: 57426 - DNA, 20 bp, Human papillomavirus type 135
aaggggatagccaactggac

SEQ ID NO: 57427 - DNA, 20 bp, Human papillomavirus type 135
ttcaaccagttttggtacaa

SEQ ID NO: 57428 - DNA, 20 bp, Human papillomavirus type 135
tcaaccagttttggtacaat

SEQ ID NO: 57429 - DNA, 20 bp, Human papillomavirus type 135
caaccagttttggtacaatt

SEQ ID NO: 57430 - DNA, 20 bp, Influenza B virus
cctacctgctttcactaata

SEQ ID NO: 57431 - DNA, 20 bp, Influenza B virus
cactaatagaagatggagaa

SEQ ID NO: 57432 - DNA, 20 bp, Influenza B virus
actaatagaagatggagaag

SEQ ID NO: 57433 - DNA, 20 bp, Influenza B virus
cactgttggttcggtgggaa

SEQ ID NO: 57434 - DNA, 20 bp, Influenza B virus
gttcggtgggaaagaatttg

SEQ ID NO: 57435 - DNA, 20 bp, Influenza B virus
tagctgagagaaaaatgaga

SEQ ID NO: 57436 - DNA, 20 bp, Influenza B virus
catgaagcatttgaaatagc

SEQ ID NO: 57437 - DNA, 20 bp, Influenza B virus
atgaagcatttgaaatagca

SEQ ID NO: 57438 - DNA, 20 bp, Influenza B virus
gaaatagcagaaggccacga

SEQ ID NO: 57439 - DNA, 20 bp, Influenza B virus
aaatagcagaaggccacgaa

SEQ ID NO: 57440 - DNA, 20 bp, Influenza B virus
cagctatgaacacagcaaag

SEQ ID NO: 57441 - DNA, 20 bp, Influenza B virus
agctatgaacacagcaaaga

SEQ ID NO: 57442 - DNA, 20 bp, Influenza B virus
tgctagtttttggacgtctt

SEQ ID NO: 57443 - DNA, 20 bp, Influenza B virus
ttggacgtcttctccctttc

SEQ ID NO: 57444 - DNA, 20 bp, Influenza B virus
tggacgtcttctccctttcc

SEQ ID NO: 57445 - DNA, 20 bp, Influenza A virus
tgaacagatggaaactggtg

SEQ ID NO: 57446 - DNA, 20 bp, Influenza A virus
ttccaacagatgctctgatc

SEQ ID NO: 57447 - DNA, 20 bp, Influenza A virus
caacagatgctctgatctca

SEQ ID NO: 57448 - DNA, 20 bp, Influenza A virus
tggcgttctccaccagtttc

SEQ ID NO: 57449 - DNA, 20 bp, Influenza A virus
tccaccagtttccatctgtt

SEQ ID NO: 57450 - DNA, 20 bp, Influenza A virus
tgtatgacaaagaggagatc

SEQ ID NO: 57451 - DNA, 20 bp, Influenza A virus
ggcgtcaagcgaacaatgga

SEQ ID NO: 57452 - DNA, 20 bp, Influenza A virus
gcgtcaagcgaacaatggag

SEQ ID NO: 57453 - DNA, 20 bp, Influenza A virus
catcttctccattgttcgct

SEQ ID NO: 57454 - DNA, 20 bp, Influenza A virus
tccattgttcgcttgacgcc

SEQ ID NO: 57455 - DNA, 20 bp, Influenza A virus
aagatctcatatttctggca

SEQ ID NO: 57456 - DNA, 20 bp, Influenza A virus
ctggcacggtctgcactcat

SEQ ID NO: 57457 - DNA, 20 bp, Influenza A virus
tggcacggtctgcactcatc

SEQ ID NO: 57458 - DNA, 20 bp, Influenza A virus
cctgcttgtgtgtacgggct

SEQ ID NO: 57459 - DNA, 20 bp, Influenza A virus
tgggccactgatcctctcag

SEQ ID NO: 57460 - DNA, 20 bp, Influenza A virus
tgcagcatttgaagatctga

SEQ ID NO: 57461 - DNA, 20 bp, Influenza A virus
gaagatctgagagtctcaag

SEQ ID NO: 57462 - DNA, 20 bp, Influenza A virus
aagatctgagagtctcaagc

SEQ ID NO: 57463 - DNA, 20 bp, Influenza A virus
atcagagggacaagagtggc

SEQ ID NO: 57464 - DNA, 20 bp, Influenza A virus
gaagcaatttgaactcctct

SEQ ID NO: 57465 - DNA, 20 bp, Streptococcus pyogenes
aaggtcgataagcatattgc

SEQ ID NO: 57466 - DNA, 20 bp, Streptococcus pyogenes
caactatttacttagatcaa

SEQ ID NO: 57467 - DNA, 20 bp, Streptococcus pyogenes
acttagatcaaatgaaagag

SEQ ID NO: 57468 - DNA, 20 bp, Streptococcus pyogenes
cttagatcaaatgaaagagc

SEQ ID NO: 57469 - DNA, 20 bp, Streptococcus pyogenes
gatcaaatgaaagagctctt

SEQ ID NO: 57470 - DNA, 20 bp, Streptococcus pyogenes
gtttatttggggtggccctg

SEQ ID NO: 57471 - DNA, 20 bp, Streptococcus pyogenes
tttatttggggtggccctgg

SEQ ID NO: 57472 - DNA, 20 bp, Streptococcus pyogenes
atttggggtggccctgggct

SEQ ID NO: 57473 - DNA, 20 bp, Streptococcus pyogenes
tttggggtggccctgggctt

SEQ ID NO: 57474 - DNA, 20 bp, Streptococcus pyogenes
ggggtggccctgggcttgga

SEQ ID NO: 57475 - DNA, 20 bp, Streptococcus pyogenes
acattgctgccgaagctatt

SEQ ID NO: 57476 - DNA, 20 bp, Streptococcus pyogenes
ctgccgaagctattcgcgcc

SEQ ID NO: 57477 - DNA, 20 bp, Streptococcus pyogenes
gcgccagaaagcaagatgga

SEQ ID NO: 57478 - DNA, 20 bp, Streptococcus pyogenes
ttcccatcgaagaaattcaa

SEQ ID NO: 57479 - DNA, 20 bp, Streptococcus pyogenes
ccatcgaagaaattcaagcg

SEQ ID NO: 57480 - DNA, 20 bp, Streptococcus pyogenes
ttcagaagtgaacacatttc

SEQ ID NO: 57481 - DNA, 20 bp, Streptococcus pyogenes
agaagtgaacacatttcttt

SEQ ID NO: 57482 - DNA, 20 bp, Streptococcus pyogenes
ctttttatacacgcctctta

SEQ ID NO: 57483 - DNA, 20 bp, Streptococcus pyogenes
tttttatacacgcctcttag

SEQ ID NO: 57484 - DNA, 20 bp, Streptococcus pyogenes
ttatacacgcctcttagaag

SEQ ID NO: 57485 - DNA, 20 bp, Streptococcus pyogenes
tgtaattaaagaaactggta

SEQ ID NO: 57486 - DNA, 20 bp, Streptococcus pyogenes
aagaaactggtaaaaaggct

SEQ ID NO: 57487 - DNA, 20 bp, Streptococcus pyogenes
aaattcagtgtactaactgt

SEQ ID NO: 57488 - DNA, 20 bp, Streptococcus pyogenes
agtgtactaactgtcagcat

SEQ ID NO: 57489 - DNA, 20 bp, Streptococcus pyogenes
tgatgagtcgttatgatttt

SEQ ID NO: 57490 - DNA, 20 bp, Streptococcus pyogenes
caaaagcaggagcagaagct

SEQ ID NO: 57491 - DNA, 20 bp, Streptococcus pyogenes
tccttttgcgactattgatc

SEQ ID NO: 57492 - DNA, 20 bp, Streptococcus pyogenes
tgcgactattgatcccaatg

SEQ ID NO: 57493 - DNA, 20 bp, Streptococcus pyogenes
gcgactattgatcccaatgt

SEQ ID NO: 57494 - DNA, 20 bp, Streptococcus pyogenes
cgactattgatcccaatgtt

SEQ ID NO: 57495 - DNA, 20 bp, Streptococcus pyogenes
aaaaaatggcacgaactcaa

SEQ ID NO: 57496 - DNA, 20 bp, Streptococcus pyogenes
aatgttttgcaaaagattaa

SEQ ID NO: 57497 - DNA, 20 bp, Streptococcus pyogenes
atgttttgcaaaagattaaa

SEQ ID NO: 57498 - DNA, 20 bp, Streptococcus pyogenes
tgcaaaagattaaacctgtt

SEQ ID NO: 57499 - DNA, 20 bp, Streptococcus pyogenes
gcaaaagattaaacctgttt

SEQ ID NO: 57500 - DNA, 20 bp, Streptococcus pyogenes
acgatgaggataaagaagaa

SEQ ID NO: 57501 - DNA, 20 bp, Streptococcus pyogenes
ttggaagctatcggtcttac

SEQ ID NO: 57502 - DNA, 20 bp, Streptococcus pyogenes
tggaagctatcggtcttact

SEQ ID NO: 57503 - DNA, 20 bp, Streptococcus pyogenes
ggaagctatcggtcttactg

SEQ ID NO: 57504 - DNA, 20 bp, Streptococcus pyogenes
gaagctatcggtcttactga

SEQ ID NO: 57505 - DNA, 20 bp, Streptococcus pyogenes
gttttatggctattgacaat

SEQ ID NO: 57506 - DNA, 20 bp, Streptococcus pyogenes
tatggctattgacaatattg

SEQ ID NO: 57507 - DNA, 20 bp, Streptococcus pyogenes
atggctattgacaatattgt

SEQ ID NO: 57508 - DNA, 20 bp, Streptococcus pyogenes
tggctattgacaatattgtc

SEQ ID NO: 57509 - DNA, 20 bp, Streptococcus pyogenes
acaatattgtcaagaacctt

SEQ ID NO: 57510 - DNA, 20 bp, Streptococcus pyogenes
agtcaatcattgcccacatt

SEQ ID NO: 57511 - DNA, 20 bp, Streptococcus pyogenes
cccacattggaactcaggaa

SEQ ID NO: 57512 - DNA, 20 bp, Streptococcus pyogenes
gaactcaggaatttaaccga

SEQ ID NO: 57513 - DNA, 20 bp, Streptococcus pyogenes
aaccgaatcaaagttggtat

SEQ ID NO: 57514 - DNA, 20 bp, Streptococcus pyogenes
accgaatcaaagttggtatt

SEQ ID NO: 57515 - DNA, 20 bp, Streptococcus pyogenes
ttttaactttttatttttag

SEQ ID NO: 57516 - DNA, 20 bp, Streptococcus pyogenes
taactttttatttttaggct

SEQ ID NO: 57517 - DNA, 20 bp, Streptococcus pyogenes
aactttttatttttaggctt

SEQ ID NO: 57518 - DNA, 20 bp, Streptococcus pyogenes
actttttatttttaggctta

SEQ ID NO: 57519 - DNA, 20 bp, Streptococcus pyogenes
ttatttttaggcttaggctt

SEQ ID NO: 57520 - DNA, 20 bp, Streptococcus pyogenes
aagctccctatatcgtccct

SEQ ID NO: 57521 - DNA, 20 bp, Streptococcus pyogenes
gtaatgacttaggtaagatt

SEQ ID NO: 57522 - DNA, 20 bp, Streptococcus pyogenes
ggtaagattttgcaggctta

SEQ ID NO: 57523 - DNA, 20 bp, Streptococcus pyogenes
tgcaggcttatcaattagga

SEQ ID NO: 57524 - DNA, 20 bp, Streptococcus pyogenes
gcaggcttatcaattaggag

SEQ ID NO: 57525 - DNA, 20 bp, Streptococcus pyogenes
atgaaataatctaagatggt

SEQ ID NO: 57526 - DNA, 20 bp, Streptococcus pyogenes
atataatgttttaaatggct

SEQ ID NO: 57527 - DNA, 20 bp, Streptococcus pyogenes
taaatggcttgttttgttgt

SEQ ID NO: 57528 - DNA, 20 bp, Streptococcus pyogenes
aaatggcttgttttgttgtg

SEQ ID NO: 57529 - DNA, 20 bp, Streptococcus pyogenes
aatggcttgttttgttgtgc

SEQ ID NO: 57530 - DNA, 20 bp, Streptococcus pyogenes
gatagagatgttaggattac

SEQ ID NO: 57531 - DNA, 20 bp, Streptococcus pyogenes
atagagatgttaggattact

SEQ ID NO: 57532 - DNA, 20 bp, Streptococcus pyogenes
ggattactatcaaacgtctc

SEQ ID NO: 57533 - DNA, 20 bp, Streptococcus pyogenes
ctatcaaacgtctcttgaaa

SEQ ID NO: 57534 - DNA, 20 bp, Streptococcus pyogenes
aaaggttttgtgactcatat

SEQ ID NO: 57535 - DNA, 20 bp, Streptococcus pyogenes
gtattttttggattcactcc

SEQ ID NO: 57536 - DNA, 20 bp, Streptococcus pyogenes
tattttttggattcactccg

SEQ ID NO: 57537 - DNA, 20 bp, Streptococcus pyogenes
tttggattcactccgcaaat

SEQ ID NO: 57538 - DNA, 20 bp, Streptococcus pyogenes
ttggattcactccgcaaatc

SEQ ID NO: 57539 - DNA, 20 bp, Streptococcus pyogenes
tggattcactccgcaaatca

SEQ ID NO: 57540 - DNA, 20 bp, Streptococcus pyogenes
tcgtaccccgataggaaatt

SEQ ID NO: 57541 - DNA, 20 bp, Streptococcus pyogenes
tggaggagtctttaaatctt

SEQ ID NO: 57542 - DNA, 20 bp, Streptococcus pyogenes
ggaggagtctttaaatcttt

SEQ ID NO: 57543 - DNA, 20 bp, Streptococcus pyogenes
gaggagtctttaaatcttta

SEQ ID NO: 57544 - DNA, 20 bp, Streptococcus pyogenes
aaatctttatcagccgtaga

SEQ ID NO: 57545 - DNA, 20 bp, Streptococcus pyogenes
cgttttacaaggccaacgtt

SEQ ID NO: 57546 - DNA, 20 bp, Streptococcus pyogenes
tacaaggccaacgttgggga

SEQ ID NO: 57547 - DNA, 20 bp, Streptococcus pyogenes
acaaggccaacgttggggat

SEQ ID NO: 57548 - DNA, 20 bp, Streptococcus pyogenes
caaggccaacgttggggatc

SEQ ID NO: 57549 - DNA, 20 bp, Streptococcus pyogenes
gggatctcgtatgggagata

SEQ ID NO: 57550 - DNA, 20 bp, Streptococcus pyogenes
gaacgacagtggataagtta

SEQ ID NO: 57551 - DNA, 20 bp, Streptococcus pyogenes
gcaaagttacgccctgcttt

SEQ ID NO: 57552 - DNA, 20 bp, Streptococcus pyogenes
cgccctgcttttatcaaaga

SEQ ID NO: 57553 - DNA, 20 bp, Streptococcus pyogenes
tatcaaagatgaggggacag

SEQ ID NO: 57554 - DNA, 20 bp, Streptococcus pyogenes
atcaaagatgaggggacagt

SEQ ID NO: 57555 - DNA, 20 bp, Streptococcus pyogenes
agcggtttcacgagaccttg

SEQ ID NO: 57556 - DNA, 20 bp, Streptococcus pyogenes
gcggtttcacgagaccttgg

SEQ ID NO: 57557 - DNA, 20 bp, Streptococcus pyogenes
cacgagaccttggttttgac

SEQ ID NO: 57558 - DNA, 20 bp, Streptococcus pyogenes
acgagaccttggttttgaca

SEQ ID NO: 57559 - DNA, 20 bp, Streptococcus pyogenes
gttttgacaatgaaaaagtt

SEQ ID NO: 57560 - DNA, 20 bp, Streptococcus pyogenes
tatggctaatggaacaccag

SEQ ID NO: 57561 - DNA, 20 bp, Streptococcus pyogenes
atggctaatggaacaccaga

SEQ ID NO: 57562 - DNA, 20 bp, Streptococcus pyogenes
tggctaatggaacaccagaa

SEQ ID NO: 57563 - DNA, 20 bp, Streptococcus pyogenes
attgatgcactggttgacaa

SEQ ID NO: 57564 - DNA, 20 bp, Streptococcus pyogenes
atgcactggttgacaaaggc

SEQ ID NO: 57565 - DNA, 20 bp, Streptococcus pyogenes
gcatcaacgacaatagaaga

SEQ ID NO: 57566 - DNA, 20 bp, Streptococcus pyogenes
catcaacgacaatagaagat

SEQ ID NO: 57567 - DNA, 20 bp, Streptococcus pyogenes
tggtcgattaacctcactaa

SEQ ID NO: 57568 - DNA, 20 bp, Streptococcus pyogenes
ggtcgattaacctcactaac

SEQ ID NO: 57569 - DNA, 20 bp, Streptococcus pyogenes
gtcgattaacctcactaact

SEQ ID NO: 57570 - DNA, 20 bp, Streptococcus pyogenes
tccaataagatgtttatctt

SEQ ID NO: 57571 - DNA, 20 bp, Streptococcus pyogenes
atcttgaagggttgctctac

SEQ ID NO: 57572 - DNA, 20 bp, Streptococcus pyogenes
tcttgaagggttgctctacc

SEQ ID NO: 57573 - DNA, 20 bp, Streptococcus pyogenes
aagggttgctctacctaaga

SEQ ID NO: 57574 - DNA, 20 bp, Streptococcus pyogenes
ctctacctaagacttgtccc

SEQ ID NO: 57575 - DNA, 20 bp, Streptococcus pyogenes
gattttcgacactagtagct

SEQ ID NO: 57576 - DNA, 20 bp, Streptococcus pyogenes
attttcgacactagtagcta

SEQ ID NO: 57577 - DNA, 20 bp, Streptococcus pyogenes
tcgacactagtagctacaaa

SEQ ID NO: 57578 - DNA, 20 bp, Streptococcus pyogenes
cgacactagtagctacaaaa

SEQ ID NO: 57579 - DNA, 20 bp, Streptococcus pyogenes
gacactagtagctacaaaag

SEQ ID NO: 57580 - DNA, 20 bp, Streptococcus pyogenes
aattgacgacctttgcatcg

SEQ ID NO: 57581 - DNA, 20 bp, Streptococcus pyogenes
acgacctttgcatcggaaat

SEQ ID NO: 57582 - DNA, 20 bp, Streptococcus pyogenes
gcatcggaaatgccccattg

SEQ ID NO: 57583 - DNA, 20 bp, Streptococcus pyogenes
catcggaaatgccccattgt

SEQ ID NO: 57584 - DNA, 20 bp, Streptococcus pyogenes
tcttaattgttttttcattt

SEQ ID NO: 57585 - DNA, 20 bp, Streptococcus pyogenes
tttagcatctttttcgtata

SEQ ID NO: 57586 - DNA, 20 bp, Streptococcus pyogenes
agcatctttttcgtataaaa

SEQ ID NO: 57587 - DNA, 20 bp, Streptococcus pyogenes
gcatctttttcgtataaaac

SEQ ID NO: 57588 - DNA, 20 bp, Streptococcus pyogenes
ttcgtataaaactttgccac

SEQ ID NO: 57589 - DNA, 20 bp, Streptococcus pyogenes
tcgtataaaactttgccact

SEQ ID NO: 57590 - DNA, 20 bp, Streptococcus pyogenes
cgatcttgtcagtatccgct

SEQ ID NO: 57591 - DNA, 20 bp, Streptococcus pyogenes
tcagtatccgctttggcagc

SEQ ID NO: 57592 - DNA, 20 bp, Streptococcus pyogenes
ggcagcttgtggtaataaaa

SEQ ID NO: 57593 - DNA, 20 bp, Streptococcus pyogenes
gcagcttgtggtaataaaaa

SEQ ID NO: 57594 - DNA, 20 bp, Streptococcus pyogenes
tggtaataaaaatgcttcag

SEQ ID NO: 57595 - DNA, 20 bp, Streptococcus pyogenes
tgtgactggtttgaagcacg

SEQ ID NO: 57596 - DNA, 20 bp, Streptococcus pyogenes
gtgactggtttgaagcacgc

SEQ ID NO: 57597 - DNA, 20 bp, Streptococcus pyogenes
tgactggtttgaagcacgcg

SEQ ID NO: 57598 - DNA, 20 bp, Streptococcus pyogenes
gaagcacgcggttgacgata

SEQ ID NO: 57599 - DNA, 20 bp, Streptococcus pyogenes
aagcacgcggttgacgataa

SEQ ID NO: 57600 - DNA, 20 bp, Streptococcus pyogenes
acctcaaaatcatctatgga

SEQ ID NO: 57601 - DNA, 20 bp, Streptococcus pyogenes
cataaaaatgaaaactactg

SEQ ID NO: 57602 - DNA, 20 bp, Streptococcus pyogenes
ggatagaatctgttaaattg

SEQ ID NO: 57603 - DNA, 20 bp, Streptococcus pyogenes
aattgacttactcagatggt

SEQ ID NO: 57604 - DNA, 20 bp, Streptococcus pyogenes
acttactcagatggttcaga

SEQ ID NO: 57605 - DNA, 20 bp, Streptococcus pyogenes
acaacaaggattttcgtcaa

SEQ ID NO: 57606 - DNA, 20 bp, Streptococcus pyogenes
tcgtcaagctattcagtttg

SEQ ID NO: 57607 - DNA, 20 bp, Streptococcus pyogenes
cgtcaagctattcagtttgc

SEQ ID NO: 57608 - DNA, 20 bp, Streptococcus pyogenes
gtcaagctattcagtttgct

SEQ ID NO: 57609 - DNA, 20 bp, Streptococcus pyogenes
agtttgcttttgaccgagcg

SEQ ID NO: 57610 - DNA, 20 bp, Streptococcus pyogenes
aacagctgaaggtgtaacct

SEQ ID NO: 57611 - DNA, 20 bp, Streptococcus pyogenes
acagctgaaggtgtaacctt

SEQ ID NO: 57612 - DNA, 20 bp, Streptococcus pyogenes
ccagttcaattagattaccc

SEQ ID NO: 57613 - DNA, 20 bp, Streptococcus pyogenes
aattagattaccctgttgac

SEQ ID NO: 57614 - DNA, 20 bp, Streptococcus pyogenes
gattaccctgttgaccaagc

SEQ ID NO: 57615 - DNA, 20 bp, Streptococcus pyogenes
gtcatgagaaaatcatttta

SEQ ID NO: 57616 - DNA, 20 bp, Streptococcus pyogenes
tacagctggctgatgacaca

SEQ ID NO: 57617 - DNA, 20 bp, Streptococcus pyogenes
acagctggctgatgacacaa

SEQ ID NO: 57618 - DNA, 20 bp, Streptococcus pyogenes
cagctggctgatgacacaac

SEQ ID NO: 57619 - DNA, 20 bp, Streptococcus pyogenes
atttgatttagggttacgtt

SEQ ID NO: 57620 - DNA, 20 bp, Streptococcus pyogenes
gtcgttagtacctttggcga

SEQ ID NO: 57621 - DNA, 20 bp, Streptococcus pyogenes
tcgttagtacctttggcgac

SEQ ID NO: 57622 - DNA, 20 bp, Streptococcus pyogenes
gtacctttggcgacagcgca

SEQ ID NO: 57623 - DNA, 20 bp, Streptococcus pyogenes
ggcgacagcgcaggcacaag

SEQ ID NO: 57624 - DNA, 20 bp, Streptococcus pyogenes
gcgacagcgcaggcacaaga

SEQ ID NO: 57625 - DNA, 20 bp, Streptococcus pyogenes
gtcatgtacctagcagtgag

SEQ ID NO: 57626 - DNA, 20 bp, Streptococcus pyogenes
ccccaagcatctgccacctc

SEQ ID NO: 57627 - DNA, 20 bp, Streptococcus pyogenes
ctatggcaccacctgcgaca

SEQ ID NO: 57628 - DNA, 20 bp, Streptococcus pyogenes
agaggtggcagatgcttggg

SEQ ID NO: 57629 - DNA, 20 bp, Streptococcus pyogenes
gggtaatggctcactgctag

SEQ ID NO: 57630 - DNA, 20 bp, Streptococcus pyogenes
cttacgctccaaaccatgcc

SEQ ID NO: 57631 - DNA, 20 bp, Streptococcus pyogenes
ttacgctccaaaccatgcct

SEQ ID NO: 57632 - DNA, 20 bp, Streptococcus pyogenes
cgctccaaaccatgcctaca

SEQ ID NO: 57633 - DNA, 20 bp, Streptococcus pyogenes
aaccacaaacagcagccttc

SEQ ID NO: 57634 - DNA, 20 bp, Streptococcus pyogenes
aaagaagaagtggcttctgc

SEQ ID NO: 57635 - DNA, 20 bp, Streptococcus pyogenes
cagaaaaccattatgatcat

SEQ ID NO: 57636 - DNA, 20 bp, Streptococcus pyogenes
tgatcatgttcatgtctcct

SEQ ID NO: 57637 - DNA, 20 bp, Streptococcus pyogenes
atgtctcctttaatgcttaa

SEQ ID NO: 57638 - DNA, 20 bp, Streptococcus pyogenes
aatgcttaattcatgctatt

SEQ ID NO: 57639 - DNA, 20 bp, Streptococcus pyogenes
atgcttaattcatgctatta

SEQ ID NO: 57640 - DNA, 20 bp, Streptococcus pyogenes
cgaagcttttgcaacacctc

SEQ ID NO: 57641 - DNA, 20 bp, Streptococcus pyogenes
tgcaacacctcgaaaacctg

SEQ ID NO: 57642 - DNA, 20 bp, Streptococcus pyogenes
gcaacacctcgaaaacctga

SEQ ID NO: 57643 - DNA, 20 bp, Streptococcus pyogenes
caacacctcgaaaacctgaa

SEQ ID NO: 57644 - DNA, 20 bp, Streptococcus pyogenes
tattgttggtactggtttag

SEQ ID NO: 57645 - DNA, 20 bp, Streptococcus pyogenes
ccggtgcgtcttatttagat

SEQ ID NO: 57646 - DNA, 20 bp, Streptococcus pyogenes
tttagatgaattttattggt

SEQ ID NO: 57647 - DNA, 20 bp, Streptococcus pyogenes
agatgaattttattggttgg

SEQ ID NO: 57648 - DNA, 20 bp, Streptococcus pyogenes
gatgaattttattggttgga

SEQ ID NO: 57649 - DNA, 20 bp, Streptococcus pyogenes
tattggttggataaggatga

SEQ ID NO: 57650 - DNA, 20 bp, Streptococcus pyogenes
gccagatttcacctccctca

SEQ ID NO: 57651 - DNA, 20 bp, Streptococcus pyogenes
ccagatttcacctccctcaa

SEQ ID NO: 57652 - DNA, 20 bp, Streptococcus pyogenes
cacctccctcaagttcaaca

SEQ ID NO: 57653 - DNA, 20 bp, Streptococcus pyogenes
acctccctcaagttcaacaa

SEQ ID NO: 57654 - DNA, 20 bp, Streptococcus pyogenes
aacaaatataaccaatatga

SEQ ID NO: 57655 - DNA, 20 bp, Streptococcus pyogenes
ggtggttcttggaatttatg

SEQ ID NO: 57656 - DNA, 20 bp, Streptococcus pyogenes
ttggaatttatgggaaaatc

SEQ ID NO: 57657 - DNA, 20 bp, Streptococcus pyogenes
gaatttatgggaaaatctag

SEQ ID NO: 57658 - DNA, 20 bp, Streptococcus pyogenes
atgggaaaatctagctgctc

SEQ ID NO: 57659 - DNA, 20 bp, Streptococcus pyogenes
tgggaaaatctagctgctca

SEQ ID NO: 57660 - DNA, 20 bp, Streptococcus pyogenes
acggtctttattccaatagt

SEQ ID NO: 57661 - DNA, 20 bp, Streptococcus pyogenes
cggtctttattccaatagtg

SEQ ID NO: 57662 - DNA, 20 bp, Streptococcus pyogenes
attccaatagtgagggcaat

SEQ ID NO: 57663 - DNA, 20 bp, Streptococcus pyogenes
ttccaatagtgagggcaatt

SEQ ID NO: 57664 - DNA, 20 bp, Streptococcus pyogenes
caatagtgagggcaattacg

SEQ ID NO: 57665 - DNA, 20 bp, Streptococcus pyogenes
tgatcaatttatcattgcta

SEQ ID NO: 57666 - DNA, 20 bp, Streptococcus pyogenes
gatcaatttatcattgctaa

SEQ ID NO: 57667 - DNA, 20 bp, Streptococcus pyogenes
atcaatttatcattgctaaa

SEQ ID NO: 57668 - DNA, 20 bp, Streptococcus pyogenes
atcattgctaaaacaccagc

SEQ ID NO: 57669 - DNA, 20 bp, Streptococcus pyogenes
tcattgctaaaacaccagca

SEQ ID NO: 57670 - DNA, 20 bp, Streptococcus pyogenes
aactatggtatgtatggcac

SEQ ID NO: 57671 - DNA, 20 bp, Streptococcus pyogenes
actatggtatgtatggcaca

SEQ ID NO: 57672 - DNA, 20 bp, Streptococcus pyogenes
acctatgttcaaaatggact

SEQ ID NO: 57673 - DNA, 20 bp, Streptococcus pyogenes
aaaatggactcttagcttct

SEQ ID NO: 57674 - DNA, 20 bp, Streptococcus pyogenes
gcttctattttattgaccac

SEQ ID NO: 57675 - DNA, 20 bp, Streptococcus pyogenes
atatttgaacgcctctttgc

SEQ ID NO: 57676 - DNA, 20 bp, Streptococcus pyogenes
gaacgcctctttgcagaacc

SEQ ID NO: 57677 - DNA, 20 bp, Streptococcus pyogenes
aacgcctctttgcagaacca

SEQ ID NO: 57678 - DNA, 20 bp, Streptococcus pyogenes
gcagaaccaatgggtggtgg

SEQ ID NO: 57679 - DNA, 20 bp, Streptococcus pyogenes
cagaaccaatgggtggtggt

SEQ ID NO: 57680 - DNA, 20 bp, Streptococcus pyogenes
gtgaaccgctgattcgcgtt

SEQ ID NO: 57681 - DNA, 20 bp, Streptococcus pyogenes
gcgttagccccaatcagttt

SEQ ID NO: 57682 - DNA, 20 bp, Streptococcus pyogenes
gccccaatcagtttcagcct

SEQ ID NO: 57683 - DNA, 20 bp, Streptococcus pyogenes
cagcctttgaccaatgcctg

SEQ ID NO: 57684 - DNA, 20 bp, Streptococcus pyogenes
agcctttgaccaatgcctgc

SEQ ID NO: 57685 - DNA, 20 bp, Streptococcus pyogenes
ggccttagataaggatagtc

SEQ ID NO: 57686 - DNA, 20 bp, Streptococcus pyogenes
gataaggatagtcttgattt

SEQ ID NO: 57687 - DNA, 20 bp, Streptococcus pyogenes
atttagctgccatttttgaa

SEQ ID NO: 57688 - DNA, 20 bp, Streptococcus pyogenes
agctgccatttttgaaggca

SEQ ID NO: 57689 - DNA, 20 bp, Streptococcus pyogenes
gctgccatttttgaaggcat

SEQ ID NO: 57690 - DNA, 20 bp, Streptococcus pyogenes
atcagcgctatcagttacaa

SEQ ID NO: 57691 - DNA, 20 bp, Streptococcus pyogenes
tcagcgctatcagttacaag

SEQ ID NO: 57692 - DNA, 20 bp, Streptococcus pyogenes
caagctatttaccatacgga

SEQ ID NO: 57693 - DNA, 20 bp, Streptococcus pyogenes
accatacggagcgttcaaat

SEQ ID NO: 57694 - DNA, 20 bp, Streptococcus pyogenes
ccatacggagcgttcaaatg

SEQ ID NO: 57695 - DNA, 20 bp, Streptococcus pyogenes
accaaacttaaggctaatcg

SEQ ID NO: 57696 - DNA, 20 bp, Streptococcus pyogenes
aggctaatcggcttgtccta

SEQ ID NO: 57697 - DNA, 20 bp, Streptococcus pyogenes
tcctagttgtacgaggagag

SEQ ID NO: 57698 - DNA, 20 bp, Streptococcus pyogenes
tacgaggagagtctagtgag

SEQ ID NO: 57699 - DNA, 20 bp, Streptococcus pyogenes
ctcactagactctcctcgta

SEQ ID NO: 57700 - DNA, 20 bp, Streptococcus pyogenes
gatttgtcatcgttatagca

SEQ ID NO: 57701 - DNA, 20 bp, Streptococcus pyogenes
atttgtcatcgttatagcat

SEQ ID NO: 57702 - DNA, 20 bp, Streptococcus pyogenes
gtcatcgttatagcatacct

SEQ ID NO: 57703 - DNA, 20 bp, Streptococcus pyogenes
tcatcgttatagcatacctt

SEQ ID NO: 57704 - DNA, 20 bp, Streptococcus pyogenes
tagcataccttatttaccag

SEQ ID NO: 57705 - DNA, 20 bp, Streptococcus pyogenes
aggcaattacaactgactat

SEQ ID NO: 57706 - DNA, 20 bp, Streptococcus pyogenes
caactgactatgacgcttac

SEQ ID NO: 57707 - DNA, 20 bp, Streptococcus pyogenes
caaacaagcgcataagcctc

SEQ ID NO: 57708 - DNA, 20 bp, Streptococcus pyogenes
tcaaaaactgttgattacag

SEQ ID NO: 57709 - DNA, 20 bp, Streptococcus pyogenes
attacagaagtgaactcttg

SEQ ID NO: 57710 - DNA, 20 bp, Streptococcus pyogenes
atcagagtcaagctgatcac

SEQ ID NO: 57711 - DNA, 20 bp, Streptococcus pyogenes
aggacaactgtgtgtaaaaa

SEQ ID NO: 57712 - DNA, 20 bp, Streptococcus pyogenes
ggacaactgtgtgtaaaaat

SEQ ID NO: 57713 - DNA, 20 bp, Streptococcus pyogenes
ttttggatcgtgaagtaacg

SEQ ID NO: 57714 - DNA, 20 bp, Streptococcus pyogenes
tggatcgtgaagtaacgcaa

SEQ ID NO: 57715 - DNA, 20 bp, Streptococcus pyogenes
tgaatttaaagctttagtta

SEQ ID NO: 57716 - DNA, 20 bp, Streptococcus pyogenes
gaatttaaagctttagttaa

SEQ ID NO: 57717 - DNA, 20 bp, Streptococcus pyogenes
aatttaaagctttagttaat

SEQ ID NO: 57718 - DNA, 20 bp, Streptococcus pyogenes
aaagctttagttaatggaaa

SEQ ID NO: 57719 - DNA, 20 bp, Streptococcus pyogenes
aagctttagttaatggaaaa

SEQ ID NO: 57720 - DNA, 20 bp, Streptococcus pyogenes
agttaaaatacaattaccaa

SEQ ID NO: 57721 - DNA, 20 bp, Streptococcus pyogenes
gttaaaatacaattaccaaa

SEQ ID NO: 57722 - DNA, 20 bp, Streptococcus pyogenes
aaatacaattaccaaaggcc

SEQ ID NO: 57723 - DNA, 20 bp, Streptococcus pyogenes
ccaaaggccaatctgatttc

SEQ ID NO: 57724 - DNA, 20 bp, Streptococcus pyogenes
ctttgactgctatgggagaa

SEQ ID NO: 57725 - DNA, 20 bp, Streptococcus pyogenes
gtcgcttcaaacgttctgtt

SEQ ID NO: 57726 - DNA, 20 bp, Streptococcus pyogenes
aaacgttctgttactaaagc

SEQ ID NO: 57727 - DNA, 20 bp, Streptococcus pyogenes
tgttactaaagctggtactc

SEQ ID NO: 57728 - DNA, 20 bp, Streptococcus pyogenes
ctaaagctggtactcttcaa

SEQ ID NO: 57729 - DNA, 20 bp, Streptococcus pyogenes
aagaatcacgtaaacgtgaa

SEQ ID NO: 57730 - DNA, 20 bp, Streptococcus pyogenes
ctttttaggcatagcttttt

SEQ ID NO: 57731 - DNA, 20 bp, Streptococcus pyogenes
ttaggcatagctttttcagc

SEQ ID NO: 57732 - DNA, 20 bp, Streptococcus pyogenes
taggcatagctttttcagcg

SEQ ID NO: 57733 - DNA, 20 bp, Streptococcus pyogenes
aggcatagctttttcagcgg

SEQ ID NO: 57734 - DNA, 20 bp, Streptococcus pyogenes
ggcatagctttttcagcggc

SEQ ID NO: 57735 - DNA, 20 bp, Streptococcus pyogenes
ttatggggaggtgacgattt

SEQ ID NO: 57736 - DNA, 20 bp, Streptococcus pyogenes
tatggggaggtgacgatttg

SEQ ID NO: 57737 - DNA, 20 bp, Streptococcus pyogenes
atggggaggtgacgatttgg

SEQ ID NO: 57738 - DNA, 20 bp, Streptococcus pyogenes
tggggaggtgacgatttggc

SEQ ID NO: 57739 - DNA, 20 bp, Streptococcus pyogenes
ggcaattgacaaagaaatga

SEQ ID NO: 57740 - DNA, 20 bp, Streptococcus pyogenes
agattattgccgataagact

SEQ ID NO: 57741 - DNA, 20 bp, Streptococcus pyogenes
ttgccgataagactggtatg

SEQ ID NO: 57742 - DNA, 20 bp, Streptococcus pyogenes
ccgataagactggtatgtcg

SEQ ID NO: 57743 - DNA, 20 bp, Streptococcus pyogenes
atataccgccaagtcaggca

SEQ ID NO: 57744 - DNA, 20 bp, Streptococcus pyogenes
ctagccaacacaagcaccct

SEQ ID NO: 57745 - DNA, 20 bp, Streptococcus pyogenes
cttcaggattgtttcacttg

SEQ ID NO: 57746 - DNA, 20 bp, Streptococcus pyogenes
aggattgtttcacttgtccg

SEQ ID NO: 57747 - DNA, 20 bp, Streptococcus pyogenes
tttcacttgtccgatcaatc

SEQ ID NO: 57748 - DNA, 20 bp, Streptococcus pyogenes
cacttgtccgatcaatccaa

SEQ ID NO: 57749 - DNA, 20 bp, Streptococcus pyogenes
acttgtccgatcaatccaat

SEQ ID NO: 57750 - DNA, 20 bp, Streptococcus pyogenes
cttcaatggggacggcattg

SEQ ID NO: 57751 - DNA, 20 bp, Streptococcus pyogenes
aatggggacggcattgactc

SEQ ID NO: 57752 - DNA, 20 bp, Streptococcus pyogenes
actcaagaacatgtcaatca

SEQ ID NO: 57753 - DNA, 20 bp, Streptococcus pyogenes
agcaagtcactaaaaaagtt

SEQ ID NO: 57754 - DNA, 20 bp, Streptococcus pyogenes
ttttgatttatgatggtgac

SEQ ID NO: 57755 - DNA, 20 bp, Streptococcus pyogenes
ctcaatcaccatccatcaca

SEQ ID NO: 57756 - DNA, 20 bp, Streptococcus pyogenes
gtatattaacaagattgctg

SEQ ID NO: 57757 - DNA, 20 bp, Streptococcus pyogenes
acaagattgctgatttgttg

SEQ ID NO: 57758 - DNA, 20 bp, Streptococcus pyogenes
ctgatttgttgccaaacttt

SEQ ID NO: 57759 - DNA, 20 bp, Streptococcus pyogenes
gttgccaaactttgactatt

SEQ ID NO: 57760 - DNA, 20 bp, Streptococcus pyogenes
tagcagagcgcgatcttcac

SEQ ID NO: 57761 - DNA, 20 bp, Streptococcus pyogenes
agcagagcgcgatcttcaca

SEQ ID NO: 57762 - DNA, 20 bp, Streptococcus pyogenes
gcagagcgcgatcttcacaa

SEQ ID NO: 57763 - DNA, 20 bp, Streptococcus pyogenes
acaaacaagggaaaaaagtt

SEQ ID NO: 57764 - DNA, 20 bp, Streptococcus pyogenes
gagaatctagtaacaaaggc

SEQ ID NO: 57765 - DNA, 20 bp, Streptococcus pyogenes
gtggctgcttttaaatcaac

SEQ ID NO: 57766 - DNA, 20 bp, Streptococcus pyogenes
taaatcaaccctagaagaaa

SEQ ID NO: 57767 - DNA, 20 bp, Streptococcus pyogenes
aaatcaaccctagaagaaag

SEQ ID NO: 57768 - DNA, 20 bp, Streptococcus pyogenes
aatcaaccctagaagaaagc

SEQ ID NO: 57769 - DNA, 20 bp, Streptococcus pyogenes
gctgttacatgtgattgatg

SEQ ID NO: 57770 - DNA, 20 bp, Streptococcus pyogenes
gaatcgagttgctcttttag

SEQ ID NO: 57771 - DNA, 20 bp, Streptococcus pyogenes
aatcgagttgctcttttaga

SEQ ID NO: 57772 - DNA, 20 bp, Streptococcus pyogenes
ctcttttagaccactacacg

SEQ ID NO: 57773 - DNA, 20 bp, Streptococcus pyogenes
tagaccactacacgtttgac

SEQ ID NO: 57774 - DNA, 20 bp, Streptococcus pyogenes
agaccactacacgtttgacc

SEQ ID NO: 57775 - DNA, 20 bp, Streptococcus pyogenes
ttattttaatctttctaagg

SEQ ID NO: 57776 - DNA, 20 bp, Streptococcus pyogenes
ttttaatctttctaaggctt

SEQ ID NO: 57777 - DNA, 20 bp, Streptococcus pyogenes
taatctttctaaggctttgg

SEQ ID NO: 57778 - DNA, 20 bp, Streptococcus pyogenes
aatctttctaaggctttggg

SEQ ID NO: 57779 - DNA, 20 bp, Streptococcus pyogenes
atctttctaaggctttgggg

SEQ ID NO: 57780 - DNA, 20 bp, Streptococcus pyogenes
tcgaagatttaccgtctggc

SEQ ID NO: 57781 - DNA, 20 bp, Streptococcus pyogenes
accgtctggcaaacggtatc

SEQ ID NO: 57782 - DNA, 20 bp, Streptococcus pyogenes
ccgtctggcaaacggtatca

SEQ ID NO: 57783 - DNA, 20 bp, Streptococcus pyogenes
aggggtttaatgtagaggag

SEQ ID NO: 57784 - DNA, 20 bp, Streptococcus pyogenes
aatgtagaggagttatgggc

SEQ ID NO: 57785 - DNA, 20 bp, Streptococcus pyogenes
tagaaacgacgattaagcca

SEQ ID NO: 57786 - DNA, 20 bp, Streptococcus pyogenes
agaaacgacgattaagccac

SEQ ID NO: 57787 - DNA, 20 bp, Streptococcus pyogenes
gaaacgacgattaagccacg

SEQ ID NO: 57788 - DNA, 20 bp, Streptococcus pyogenes
agccacgaaaaataagaaag

SEQ ID NO: 57789 - DNA, 20 bp, Streptococcus pyogenes
tcattactcatttgcatgga

SEQ ID NO: 57790 - DNA, 20 bp, Streptococcus pyogenes
tttgcatgggttatcgagta

SEQ ID NO: 57791 - DNA, 20 bp, Streptococcus pyogenes
ttgcatgggttatcgagtag

SEQ ID NO: 57792 - DNA, 20 bp, Streptococcus pyogenes
tgcatgggttatcgagtagt

SEQ ID NO: 57793 - DNA, 20 bp, Streptococcus pyogenes
gcatgggttatcgagtagtt

SEQ ID NO: 57794 - DNA, 20 bp, Streptococcus pyogenes
catgggttatcgagtagttc

SEQ ID NO: 57795 - DNA, 20 bp, Streptococcus pyogenes
taccaacatgcaggcagcac

SEQ ID NO: 57796 - DNA, 20 bp, Streptococcus pyogenes
ctcaatcatgtatcagctcg

SEQ ID NO: 57797 - DNA, 20 bp, Streptococcus pyogenes
ttagggcgtgattgtcgcca

SEQ ID NO: 57798 - DNA, 20 bp, Streptococcus pyogenes
tagggcgtgattgtcgccag

SEQ ID NO: 57799 - DNA, 20 bp, Streptococcus pyogenes
agggcgtgattgtcgccaga

SEQ ID NO: 57800 - DNA, 20 bp, Streptococcus pyogenes
tcagcatattgacaacaaag

SEQ ID NO: 57801 - DNA, 20 bp, Streptococcus pyogenes
acaacaaagaatgcctcgag

SEQ ID NO: 57802 - DNA, 20 bp, Streptococcus pyogenes
gatattaccaatccagtagc

SEQ ID NO: 57803 - DNA, 20 bp, Streptococcus pyogenes
ccaatccagtagccattgag

SEQ ID NO: 57804 - DNA, 20 bp, Streptococcus pyogenes
agaaaatggtcgcccagatt

SEQ ID NO: 57805 - DNA, 20 bp, Streptococcus pyogenes
attcagccaccaagtttgcc

SEQ ID NO: 57806 - DNA, 20 bp, Streptococcus pyogenes
ttcagccaccaagtttgccc

SEQ ID NO: 57807 - DNA, 20 bp, Streptococcus pyogenes
agccaccaagtttgccctta

SEQ ID NO: 57808 - DNA, 20 bp, Streptococcus pyogenes
gcccttatcggattttccaa

SEQ ID NO: 57809 - DNA, 20 bp, Streptococcus pyogenes
cccttatcggattttccaat

SEQ ID NO: 57810 - DNA, 20 bp, Streptococcus pyogenes
gatgagtttttaacagcgga

SEQ ID NO: 57811 - DNA, 20 bp, Streptococcus pyogenes
ttaacagcggacttgtctca

SEQ ID NO: 57812 - DNA, 20 bp, Streptococcus pyogenes
taacagcggacttgtctcaa

SEQ ID NO: 57813 - DNA, 20 bp, Streptococcus pyogenes
aacagcggacttgtctcaac

SEQ ID NO: 57814 - DNA, 20 bp, Streptococcus pyogenes
acagcggacttgtctcaact

SEQ ID NO: 57815 - DNA, 20 bp, Streptococcus pyogenes
ttgacacgcctaaacgggtt

SEQ ID NO: 57816 - DNA, 20 bp, Streptococcus pyogenes
acacgcctaaacgggttgct

SEQ ID NO: 57817 - DNA, 20 bp, Streptococcus pyogenes
ctaaaatgtatgcggagatg

SEQ ID NO: 57818 - DNA, 20 bp, Streptococcus pyogenes
ttgggactgggaaaagatcc

SEQ ID NO: 57819 - DNA, 20 bp, Streptococcus pyogenes
tgggactgggaaaagatcct

SEQ ID NO: 57820 - DNA, 20 bp, Streptococcus pyogenes
gacctctcaaatagcggatg

SEQ ID NO: 57821 - DNA, 20 bp, Streptococcus pyogenes
acctctcaaatagcggatgc

SEQ ID NO: 57822 - DNA, 20 bp, Streptococcus pyogenes
agttgaagccctcaatccta

SEQ ID NO: 57823 - DNA, 20 bp, Streptococcus pyogenes
gttgaagccctcaatcctaa

SEQ ID NO: 57824 - DNA, 20 bp, Streptococcus pyogenes
aagccctcaatcctaaaggg

SEQ ID NO: 57825 - DNA, 20 bp, Streptococcus pyogenes
cactactgtgcaaaaagcat

SEQ ID NO: 57826 - DNA, 20 bp, Streptococcus pyogenes
gatcacgttgagcaaatgat

SEQ ID NO: 57827 - DNA, 20 bp, Streptococcus pyogenes
agcaaatgattgctgatggg

SEQ ID NO: 57828 - DNA, 20 bp, Streptococcus pyogenes
ctgatggggctaaaatcatc

SEQ ID NO: 57829 - DNA, 20 bp, Streptococcus pyogenes
gtggagaatcaacacgtcca

SEQ ID NO: 57830 - DNA, 20 bp, Streptococcus pyogenes
atgcataaccaagacgaaga

SEQ ID NO: 57831 - DNA, 20 bp, Streptococcus pyogenes
atcaagaggtaacacaagac

SEQ ID NO: 57832 - DNA, 20 bp, Streptococcus pyogenes
tcaagaggtaacacaagacg

SEQ ID NO: 57833 - DNA, 20 bp, Streptococcus pyogenes
gtgattttctaggcaataga

SEQ ID NO: 57834 - DNA, 20 bp, Streptococcus pyogenes
tgattttctaggcaatagag

SEQ ID NO: 57835 - DNA, 20 bp, Streptococcus pyogenes
tgcccttggaaaaggctgtc

SEQ ID NO: 57836 - DNA, 20 bp, Streptococcus pyogenes
gaaaaggctgtcagattgta

SEQ ID NO: 57837 - DNA, 20 bp, Streptococcus pyogenes
tacgcgtacacgatgtcaag

SEQ ID NO: 57838 - DNA, 20 bp, Streptococcus pyogenes
tggctgtgttgagccagttg

SEQ ID NO: 57839 - DNA, 20 bp, Streptococcus pyogenes
agccagttgatgtgaggact

SEQ ID NO: 57840 - DNA, 20 bp, Streptococcus pyogenes
attttgattgaacgtttagc

SEQ ID NO: 57841 - DNA, 20 bp, Streptococcus pyogenes
ttttgattgaacgtttagca

SEQ ID NO: 57842 - DNA, 20 bp, Streptococcus pyogenes
tgattgaacgtttagcaggt

SEQ ID NO: 57843 - DNA, 20 bp, Streptococcus pyogenes
gattgaacgtttagcaggtg

SEQ ID NO: 57844 - DNA, 20 bp, Streptococcus pyogenes
attgaacgtttagcaggtgc

SEQ ID NO: 57845 - DNA, 20 bp, Streptococcus pyogenes
accgcggctgatttcttaaa

SEQ ID NO: 57846 - DNA, 20 bp, Streptococcus pyogenes
cttaaaagaaacacaagcta

SEQ ID NO: 57847 - DNA, 20 bp, Streptococcus pyogenes
ttaaaagaaacacaagctat

SEQ ID NO: 57848 - DNA, 20 bp, Streptococcus pyogenes
aaagaaacacaagctattga

SEQ ID NO: 57849 - DNA, 20 bp, Streptococcus pyogenes
agcaatctcttggtcgtgtg

SEQ ID NO: 57850 - DNA, 20 bp, Streptococcus pyogenes
cactaaggtaggtggcccag

SEQ ID NO: 57851 - DNA, 20 bp, Streptococcus pyogenes
cttggcttttcctagaaatc

SEQ ID NO: 57852 - DNA, 20 bp, Streptococcus pyogenes
ttggcttttcctagaaatca

SEQ ID NO: 57853 - DNA, 20 bp, Streptococcus pyogenes
gcttttcctagaaatcacta

SEQ ID NO: 57854 - DNA, 20 bp, Streptococcus pyogenes
tcctagaaatcactacgagc

SEQ ID NO: 57855 - DNA, 20 bp, Streptococcus pyogenes
ctggaagcattgggggtgct

SEQ ID NO: 57856 - DNA, 20 bp, Streptococcus pyogenes
ggggtgctgtttttatgaat

SEQ ID NO: 57857 - DNA, 20 bp, Streptococcus pyogenes
ttatgaatgcgggtgcttat

SEQ ID NO: 57858 - DNA, 20 bp, Streptococcus pyogenes
tatgaatgcgggtgcttatg

SEQ ID NO: 57859 - DNA, 20 bp, Streptococcus pyogenes
atgaatgcgggtgcttatgg

SEQ ID NO: 57860 - DNA, 20 bp, Streptococcus pyogenes
gcaggtcaattaatcatgga

SEQ ID NO: 57861 - DNA, 20 bp, Streptococcus pyogenes
caggtcaattaatcatggaa

SEQ ID NO: 57862 - DNA, 20 bp, Streptococcus pyogenes
atcatggaagcaaatcttaa

SEQ ID NO: 57863 - DNA, 20 bp, Streptococcus pyogenes
aagggcatcggattggtggt

SEQ ID NO: 57864 - DNA, 20 bp, Streptococcus pyogenes
gtggtgtggaagtttccgaa

SEQ ID NO: 57865 - DNA, 20 bp, Streptococcus pyogenes
aaactgcacaacgaaaatca

SEQ ID NO: 57866 - DNA, 20 bp, Streptococcus pyogenes
agattctgtcttccctacca

SEQ ID NO: 57867 - DNA, 20 bp, Streptococcus pyogenes
tgtcttccctaccatctgtg

SEQ ID NO: 57868 - DNA, 20 bp, Streptococcus pyogenes
cctaccatctgtggttgtgg

SEQ ID NO: 57869 - DNA, 20 bp, Streptococcus pyogenes
tggggctctttggttacttg

SEQ ID NO: 57870 - DNA, 20 bp, Streptococcus pyogenes
tttagcgttcataatttctc

SEQ ID NO: 57871 - DNA, 20 bp, Streptococcus pyogenes
ttagcgttcataatttctct

SEQ ID NO: 57872 - DNA, 20 bp, Streptococcus pyogenes
tagcgttcataatttctctt

SEQ ID NO: 57873 - DNA, 20 bp, Streptococcus pyogenes
agcgttcataatttctcttt

SEQ ID NO: 57874 - DNA, 20 bp, Streptococcus pyogenes
gcgttcataatttctctttc

SEQ ID NO: 57875 - DNA, 20 bp, Streptococcus pyogenes
aggacaacacgccaaatggt

SEQ ID NO: 57876 - DNA, 20 bp, Streptococcus pyogenes
gccaacgtgttgctcccata

SEQ ID NO: 57877 - DNA, 20 bp, Streptococcus pyogenes
ccaacgtgttgctcccatag

SEQ ID NO: 57878 - DNA, 20 bp, Streptococcus pyogenes
ctcccatagccatagacgct

SEQ ID NO: 57879 - DNA, 20 bp, Streptococcus pyogenes
gcggtaatgacgaggcaccg

SEQ ID NO: 57880 - DNA, 20 bp, Streptococcus pyogenes
aggtgagatttcagtcataa

SEQ ID NO: 57881 - DNA, 20 bp, Streptococcus pyogenes
ggtgagatttcagtcataaa

SEQ ID NO: 57882 - DNA, 20 bp, Streptococcus pyogenes
cagtcataaaaacggctgcg

SEQ ID NO: 57883 - DNA, 20 bp, Streptococcus pyogenes
agtcataaaaacggctgcgc

SEQ ID NO: 57884 - DNA, 20 bp, Streptococcus pyogenes
gcagagcaccaagataagga

SEQ ID NO: 57885 - DNA, 20 bp, Streptococcus pyogenes
aattctttgatggtgaggct

SEQ ID NO: 57886 - DNA, 20 bp, Streptococcus pyogenes
tttgatggtgaggctaattt

SEQ ID NO: 57887 - DNA, 20 bp, Streptococcus pyogenes
gatggtgaggctaatttttt

SEQ ID NO: 57888 - DNA, 20 bp, Streptococcus pyogenes
atggtgaggctaatttttta

SEQ ID NO: 57889 - DNA, 20 bp, Streptococcus pyogenes
tttagccaattcctgatttt

SEQ ID NO: 57890 - DNA, 20 bp, Streptococcus pyogenes
caaagatttaacagatgaat

SEQ ID NO: 57891 - DNA, 20 bp, Streptococcus pyogenes
aacagatgaatcaacgtagg

SEQ ID NO: 57892 - DNA, 20 bp, Streptococcus pyogenes
acagatgaatcaacgtaggc

SEQ ID NO: 57893 - DNA, 20 bp, Streptococcus pyogenes
gtgaaacaatcgatttaacc

SEQ ID NO: 57894 - DNA, 20 bp, Streptococcus pyogenes
tgaaacaatcgatttaacca

SEQ ID NO: 57895 - DNA, 20 bp, Streptococcus pyogenes
atgatcaactaatttagaag

SEQ ID NO: 57896 - DNA, 20 bp, Streptococcus pyogenes
agaagcatcaataccatctt

SEQ ID NO: 57897 - DNA, 20 bp, Streptococcus pyogenes
gaagcatcaataccatcttt

SEQ ID NO: 57898 - DNA, 20 bp, Streptococcus pyogenes
ttcttccgcaaagacatcac

SEQ ID NO: 57899 - DNA, 20 bp, Streptococcus pyogenes
tcttccgcaaagacatcact

SEQ ID NO: 57900 - DNA, 20 bp, Streptococcus pyogenes
gcaaatcctagaccattgcc

SEQ ID NO: 57901 - DNA, 20 bp, Streptococcus pyogenes
ccattaatgagtaattggta

SEQ ID NO: 57902 - DNA, 20 bp, Streptococcus pyogenes
atgagtaattggtaccagcc

SEQ ID NO: 57903 - DNA, 20 bp, Streptococcus pyogenes
gtaccagcctgttggataag

SEQ ID NO: 57904 - DNA, 20 bp, Streptococcus pyogenes
gataagattggggcaaagta

SEQ ID NO: 57905 - DNA, 20 bp, Streptococcus pyogenes
ctgatagggtaaggtttaga

SEQ ID NO: 57906 - DNA, 20 bp, Streptococcus pyogenes
agatggtctttttcaaacat

SEQ ID NO: 57907 - DNA, 20 bp, Streptococcus pyogenes
gatggtctttttcaaacatt

SEQ ID NO: 57908 - DNA, 20 bp, Streptococcus pyogenes
ttcaaacattttccaaagac

SEQ ID NO: 57909 - DNA, 20 bp, Streptococcus pyogenes
tcaaacattttccaaagacg

SEQ ID NO: 57910 - DNA, 20 bp, Streptococcus pyogenes
taacatggctaaggcgtctt

SEQ ID NO: 57911 - DNA, 20 bp, Streptococcus pyogenes
aacatggctaaggcgtcttc

SEQ ID NO: 57912 - DNA, 20 bp, Streptococcus pyogenes
acatggctaaggcgtcttct

SEQ ID NO: 57913 - DNA, 20 bp, Streptococcus pyogenes
taaaatagatttttgcaact

SEQ ID NO: 57914 - DNA, 20 bp, Streptococcus pyogenes
ttgcaacttggcacattctg

SEQ ID NO: 57915 - DNA, 20 bp, Streptococcus pyogenes
gtcaacacggaaaacttttg

SEQ ID NO: 57916 - DNA, 20 bp, Streptococcus pyogenes
tgggcgtgtagtcactaaga

SEQ ID NO: 57917 - DNA, 20 bp, Streptococcus pyogenes
gggcgtgtagtcactaagac

SEQ ID NO: 57918 - DNA, 20 bp, Streptococcus pyogenes
ggcgtgtagtcactaagacc

SEQ ID NO: 57919 - DNA, 20 bp, Streptococcus pyogenes
ctccagagtaatgacctcgg

SEQ ID NO: 57920 - DNA, 20 bp, Streptococcus pyogenes
tgtcatcccaatcgtgcttt

SEQ ID NO: 57921 - DNA, 20 bp, Streptococcus pyogenes
cgactgtcacgtcactgatt

SEQ ID NO: 57922 - DNA, 20 bp, Streptococcus pyogenes
gactgtcacgtcactgattc

SEQ ID NO: 57923 - DNA, 20 bp, Streptococcus pyogenes
cagcaattttatagaggctg

SEQ ID NO: 57924 - DNA, 20 bp, Streptococcus pyogenes
tatagaggctgtcctgaact

SEQ ID NO: 57925 - DNA, 20 bp, Streptococcus pyogenes
agttactctccattatacca

SEQ ID NO: 57926 - DNA, 20 bp, Streptococcus pyogenes
gttactctccattataccat

SEQ ID NO: 57927 - DNA, 20 bp, Streptococcus pyogenes
ctctccattataccatatct

SEQ ID NO: 57928 - DNA, 20 bp, Streptococcus pyogenes
taccatatcttagcgcagac

SEQ ID NO: 57929 - DNA, 20 bp, Streptococcus pyogenes
gcgcagacctaatttggcta

SEQ ID NO: 57930 - DNA, 20 bp, Streptococcus pyogenes
ctgccggacggttcgtccga

SEQ ID NO: 57931 - DNA, 20 bp, Streptococcus pyogenes
gtccgaaatctccttcgtca

SEQ ID NO: 57932 - DNA, 20 bp, Streptococcus pyogenes
gtcatctttacggaaacgag

SEQ ID NO: 57933 - DNA, 20 bp, Streptococcus pyogenes
acggaaacgagcatagttga

SEQ ID NO: 57934 - DNA, 20 bp, Streptococcus pyogenes
cggaaacgagcatagttgag

SEQ ID NO: 57935 - DNA, 20 bp, Streptococcus pyogenes
ttgctctccaagattaaatg

SEQ ID NO: 57936 - DNA, 20 bp, Streptococcus pyogenes
ctctccaagattaaatgcac

SEQ ID NO: 57937 - DNA, 20 bp, Streptococcus pyogenes
aatgcactatttaatttaag

SEQ ID NO: 57938 - DNA, 20 bp, Streptococcus pyogenes
aatttaagatcatacgaatt

SEQ ID NO: 57939 - DNA, 20 bp, Streptococcus pyogenes
atttaagatcatacgaatta

SEQ ID NO: 57940 - DNA, 20 bp, Streptococcus pyogenes
catacatccttttttcttat

SEQ ID NO: 57941 - DNA, 20 bp, Streptococcus pyogenes
atacatccttttttcttatg

SEQ ID NO: 57942 - DNA, 20 bp, Streptococcus pyogenes
tttcttatgcttcctttttt

SEQ ID NO: 57943 - DNA, 20 bp, Streptococcus pyogenes
ttcttatgcttccttttttg

SEQ ID NO: 57944 - DNA, 20 bp, Streptococcus pyogenes
tcttatgcttccttttttga

SEQ ID NO: 57945 - DNA, 20 bp, Streptococcus pyogenes
tcgattttcttgtaaaacca

SEQ ID NO: 57946 - DNA, 20 bp, Streptococcus pyogenes
tcttgtaaaaccactacacc

SEQ ID NO: 57947 - DNA, 20 bp, Streptococcus pyogenes
cttgtaaaaccactacaccg

SEQ ID NO: 57948 - DNA, 20 bp, Streptococcus pyogenes
ttgtaaaaccactacaccgc

SEQ ID NO: 57949 - DNA, 20 bp, Streptococcus pyogenes
taaaaccactacaccgccac

SEQ ID NO: 57950 - DNA, 20 bp, Streptococcus pyogenes
ttctttatccaaatggacct

SEQ ID NO: 57951 - DNA, 20 bp, Streptococcus pyogenes
tttatccaaatggacctgtc

SEQ ID NO: 57952 - DNA, 20 bp, Streptococcus pyogenes
atccaaatggacctgtcctt

SEQ ID NO: 57953 - DNA, 20 bp, Streptococcus pyogenes
tccaaatggacctgtccttg

SEQ ID NO: 57954 - DNA, 20 bp, Streptococcus pyogenes
tttaacaagcaaggctgcaa

SEQ ID NO: 57955 - DNA, 20 bp, Streptococcus pyogenes
atcaatcaatcgagggataa

SEQ ID NO: 57956 - DNA, 20 bp, Streptococcus pyogenes
ctttcatgttagaatatacc

SEQ ID NO: 57957 - DNA, 20 bp, Streptococcus pyogenes
catgttagaatataccactc

SEQ ID NO: 57958 - DNA, 20 bp, Streptococcus pyogenes
atgttagaatataccactcg

SEQ ID NO: 57959 - DNA, 20 bp, Streptococcus pyogenes
gaatataccactcgaatact

SEQ ID NO: 57960 - DNA, 20 bp, Streptococcus pyogenes
accatcaactatcaatcgtc

SEQ ID NO: 57961 - DNA, 20 bp, Streptococcus pyogenes
ccatcaactatcaatcgtcc

SEQ ID NO: 57962 - DNA, 20 bp, Streptococcus pyogenes
ttgaatcatttcttctgtat

SEQ ID NO: 57963 - DNA, 20 bp, Streptococcus pyogenes
aatcatttcttctgtatggt

SEQ ID NO: 57964 - DNA, 20 bp, Streptococcus pyogenes
cttctgtatggtttcgagta

SEQ ID NO: 57965 - DNA, 20 bp, Streptococcus pyogenes
caatgatttaccgataatct

SEQ ID NO: 57966 - DNA, 20 bp, Streptococcus pyogenes
accgataatcttagcatttc

SEQ ID NO: 57967 - DNA, 20 bp, Streptococcus pyogenes
ccgataatcttagcatttcg

SEQ ID NO: 57968 - DNA, 20 bp, Streptococcus pyogenes
gcatttcgcgcttcttccaa

SEQ ID NO: 57969 - DNA, 20 bp, Streptococcus pyogenes
cgcgcttcttccaaagcttt

SEQ ID NO: 57970 - DNA, 20 bp, Streptococcus pyogenes
gcagcttcaatatagacaac

SEQ ID NO: 57971 - DNA, 20 bp, Streptococcus pyogenes
aatatagacaacgtctttag

SEQ ID NO: 57972 - DNA, 20 bp, Streptococcus pyogenes
agcaaaatcaagatagaagg

SEQ ID NO: 57973 - DNA, 20 bp, Streptococcus pyogenes
gcaaaatcaagatagaaggc

SEQ ID NO: 57974 - DNA, 20 bp, Streptococcus pyogenes
accactgctttgtaaatagc

SEQ ID NO: 57975 - DNA, 20 bp, Streptococcus pyogenes
tcggtatccacagaagctac

SEQ ID NO: 57976 - DNA, 20 bp, Streptococcus pyogenes
tttagccacatcattaggag

SEQ ID NO: 57977 - DNA, 20 bp, Streptococcus pyogenes
agccacatcattaggagaaa

SEQ ID NO: 57978 - DNA, 20 bp, Streptococcus pyogenes
gccacatcattaggagaaat

SEQ ID NO: 57979 - DNA, 20 bp, Streptococcus pyogenes
ggagaaatgatattgccttt

SEQ ID NO: 57980 - DNA, 20 bp, Streptococcus pyogenes
cttttgtaaactcgccattt

SEQ ID NO: 57981 - DNA, 20 bp, Streptococcus pyogenes
ttttgtaaactcgccatttg

SEQ ID NO: 57982 - DNA, 20 bp, Streptococcus pyogenes
tgtaaactcgccatttggtg

SEQ ID NO: 57983 - DNA, 20 bp, Streptococcus pyogenes
gtaaactcgccatttggtga

SEQ ID NO: 57984 - DNA, 20 bp, Streptococcus pyogenes
taaactcgccatttggtgac

SEQ ID NO: 57985 - DNA, 20 bp, Streptococcus pyogenes
ttttttcaatttcatccaaa

SEQ ID NO: 57986 - DNA, 20 bp, Streptococcus pyogenes
tttcaatttcatccaaaata

SEQ ID NO: 57987 - DNA, 20 bp, Streptococcus pyogenes
ttcaatttcatccaaaatat

SEQ ID NO: 57988 - DNA, 20 bp, Streptococcus pyogenes
tcaatttcatccaaaatatc

SEQ ID NO: 57989 - DNA, 20 bp, Streptococcus pyogenes
caatttcatccaaaatatct

SEQ ID NO: 57990 - DNA, 20 bp, Streptococcus pyogenes
ttctacgtcagtatcccatg

SEQ ID NO: 57991 - DNA, 20 bp, Streptococcus pyogenes
tacgtcagtatcccatgggt

SEQ ID NO: 57992 - DNA, 20 bp, Streptococcus pyogenes
gttatccttggtgaccatgt

SEQ ID NO: 57993 - DNA, 20 bp, Streptococcus pyogenes
tccttggtgaccatgttacc

SEQ ID NO: 57994 - DNA, 20 bp, Streptococcus pyogenes
gtgaccatgttacccttgag

SEQ ID NO: 57995 - DNA, 20 bp, Streptococcus pyogenes
accatctttaactttattgg

SEQ ID NO: 57996 - DNA, 20 bp, Streptococcus pyogenes
ccatctttaactttattggc

SEQ ID NO: 57997 - DNA, 20 bp, Streptococcus pyogenes
aactttattggcgtagtata

SEQ ID NO: 57998 - DNA, 20 bp, Streptococcus pyogenes
actttattggcgtagtataa

SEQ ID NO: 57999 - DNA, 20 bp, Streptococcus pyogenes
attggcgtagtataaagagg

SEQ ID NO: 58000 - DNA, 20 bp, Streptococcus pyogenes
acgacacatctcaaggtatt

SEQ ID NO: 58001 - DNA, 20 bp, Streptococcus pyogenes
tgctaaatccatctccttac

SEQ ID NO: 58002 - DNA, 20 bp, Streptococcus pyogenes
cgtttgattccttgcttagc

SEQ ID NO: 58003 - DNA, 20 bp, Streptococcus pyogenes
gattccttgcttagccaaga

SEQ ID NO: 58004 - DNA, 20 bp, Streptococcus pyogenes
attccttgcttagccaagac

SEQ ID NO: 58005 - DNA, 20 bp, Streptococcus pyogenes
ccattgtggctctttattag

SEQ ID NO: 58006 - DNA, 20 bp, Streptococcus pyogenes
tggctctttattaggaagac

SEQ ID NO: 58007 - DNA, 20 bp, Streptococcus pyogenes
attaggaagacctgcgcgca

SEQ ID NO: 58008 - DNA, 20 bp, Streptococcus pyogenes
ttaggaagacctgcgcgcat

SEQ ID NO: 58009 - DNA, 20 bp, Streptococcus pyogenes
ggaagacctgcgcgcattgg

SEQ ID NO: 58010 - DNA, 20 bp, Streptococcus pyogenes
tttttctttatttagatatt

SEQ ID NO: 58011 - DNA, 20 bp, Streptococcus pyogenes
ttctttatttagatatttaa

SEQ ID NO: 58012 - DNA, 20 bp, Streptococcus pyogenes
tctttatttagatatttaat

SEQ ID NO: 58013 - DNA, 20 bp, Streptococcus pyogenes
ctttatttagatatttaatt

SEQ ID NO: 58014 - DNA, 20 bp, Streptococcus pyogenes
tttatttagatatttaattt

SEQ ID NO: 58015 - DNA, 20 bp, Streptococcus pyogenes
aggttttttcgcagataatg

SEQ ID NO: 58016 - DNA, 20 bp, Streptococcus pyogenes
tttcgcagataatggctacg

SEQ ID NO: 58017 - DNA, 20 bp, Streptococcus pyogenes
ttcgcagataatggctacgc

SEQ ID NO: 58018 - DNA, 20 bp, Streptococcus pyogenes
tcgcagataatggctacgct

SEQ ID NO: 58019 - DNA, 20 bp, Streptococcus pyogenes
cgcagataatggctacgctt

SEQ ID NO: 58020 - DNA, 20 bp, Streptococcus pyogenes
gaacccgtgttaccgccgtg

SEQ ID NO: 58021 - DNA, 20 bp, Streptococcus pyogenes
ccgccgtgaaaaggcggtgt

SEQ ID NO: 58022 - DNA, 20 bp, Streptococcus pyogenes
accccttgaccaacggacca

SEQ ID NO: 58023 - DNA, 20 bp, Streptococcus pyogenes
accaacggaccataataata

SEQ ID NO: 58024 - DNA, 20 bp, Streptococcus pyogenes
tagataatgggcacgagtgg

SEQ ID NO: 58025 - DNA, 20 bp, Streptococcus pyogenes
agtgtgtcattaagctaagc

SEQ ID NO: 58026 - DNA, 20 bp, Streptococcus pyogenes
agctaagcgactaccttatc

SEQ ID NO: 58027 - DNA, 20 bp, Streptococcus pyogenes
tctcacagggggcaaccccc

SEQ ID NO: 58028 - DNA, 20 bp, Streptococcus pyogenes
tagggcttaactgctgtgtt

SEQ ID NO: 58029 - DNA, 20 bp, Streptococcus pyogenes
actgctgtgttcggcatggg

SEQ ID NO: 58030 - DNA, 20 bp, Streptococcus pyogenes
cctacatagctacccagcga

SEQ ID NO: 58031 - DNA, 20 bp, Streptococcus pyogenes
ggcaagacaactggtacacc

SEQ ID NO: 58032 - DNA, 20 bp, Streptococcus pyogenes
gcaagacaactggtacacca

SEQ ID NO: 58033 - DNA, 20 bp, Streptococcus pyogenes
cctacgcccgcgacggatag

SEQ ID NO: 58034 - DNA, 20 bp, Streptococcus pyogenes
ctacgcccgcgacggatagg

SEQ ID NO: 58035 - DNA, 20 bp, Streptococcus pyogenes
tatccgttgagcgatggccc

SEQ ID NO: 58036 - DNA, 20 bp, Streptococcus pyogenes
atccgttgagcgatggccct

SEQ ID NO: 58037 - DNA, 20 bp, Streptococcus pyogenes
tccgttgagcgatggccctt

SEQ ID NO: 58038 - DNA, 20 bp, Streptococcus pyogenes
agcgatggcccttccattcg

SEQ ID NO: 58039 - DNA, 20 bp, Streptococcus pyogenes
cattcggtaccaccggatca

SEQ ID NO: 58040 - DNA, 20 bp, Streptococcus pyogenes
cgatttagcagagagctgtg

SEQ ID NO: 58041 - DNA, 20 bp, Streptococcus pyogenes
agcagagagctgtgtttttg

SEQ ID NO: 58042 - DNA, 20 bp, Streptococcus pyogenes
gcagagagctgtgtttttga

SEQ ID NO: 58043 - DNA, 20 bp, Streptococcus pyogenes
ttgataaacagttgcttggg

SEQ ID NO: 58044 - DNA, 20 bp, Streptococcus pyogenes
tgataaacagttgcttgggc

SEQ ID NO: 58045 - DNA, 20 bp, Streptococcus pyogenes
gactcatcttacacctcact

SEQ ID NO: 58046 - DNA, 20 bp, Streptococcus pyogenes
actcatcttacacctcactg

SEQ ID NO: 58047 - DNA, 20 bp, Streptococcus pyogenes
cacctcactgcttagccgga

SEQ ID NO: 58048 - DNA, 20 bp, Streptococcus pyogenes
gccggactcttccaatcgtc

SEQ ID NO: 58049 - DNA, 20 bp, Streptococcus pyogenes
caatcgtccggtttagttag

SEQ ID NO: 58050 - DNA, 20 bp, Streptococcus pyogenes
tgtgtcatccacagcttcgg

SEQ ID NO: 58051 - DNA, 20 bp, Streptococcus pyogenes
gtgtcatccacagcttcggt

SEQ ID NO: 58052 - DNA, 20 bp, Streptococcus pyogenes
tgtcatccacagcttcggta

SEQ ID NO: 58053 - DNA, 20 bp, Streptococcus pyogenes
ggtaaactgttttagccccg

SEQ ID NO: 58054 - DNA, 20 bp, Streptococcus pyogenes
tagccccggtacattttcgg

SEQ ID NO: 58055 - DNA, 20 bp, Streptococcus pyogenes
attctacaaaaggcacgctc

SEQ ID NO: 58056 - DNA, 20 bp, Streptococcus pyogenes
tacaaaaggcacgctctcac

SEQ ID NO: 58057 - DNA, 20 bp, Streptococcus pyogenes
acgggctcgaacttgttgta

SEQ ID NO: 58058 - DNA, 20 bp, Streptococcus pyogenes
ttgtaggcacacggtttcag

SEQ ID NO: 58059 - DNA, 20 bp, Streptococcus pyogenes
taggcacacggtttcaggtt

SEQ ID NO: 58060 - DNA, 20 bp, Streptococcus pyogenes
catttccttagaaaggaggt

SEQ ID NO: 58061 - DNA, 20 bp, Streptococcus pyogenes
ccttagaaaggaggtgatcc

SEQ ID NO: 58062 - DNA, 20 bp, Streptococcus pyogenes
cttagaaaggaggtgatcca

SEQ ID NO: 58063 - DNA, 20 bp, Streptococcus pyogenes
gaaaggaggtgatccagccg

SEQ ID NO: 58064 - DNA, 20 bp, Streptococcus pyogenes
cgatacggctaccttgttac

SEQ ID NO: 58065 - DNA, 20 bp, Streptococcus pyogenes
gtcaacttcgtttttaaggt

SEQ ID NO: 58066 - DNA, 20 bp, Streptococcus pyogenes
gtttttaaggtcaacttctt

SEQ ID NO: 58067 - DNA, 20 bp, Streptococcus pyogenes
ttaaggtcaacttcttcttt

SEQ ID NO: 58068 - DNA, 20 bp, Streptococcus pyogenes
taaggtcaacttcttcttta

SEQ ID NO: 58069 - DNA, 20 bp, Streptococcus pyogenes
aaggtcaacttcttctttac

SEQ ID NO: 58070 - DNA, 20 bp, Streptococcus pyogenes
ggcgttcaccttgaagaaca

SEQ ID NO: 58071 - DNA, 20 bp, Streptococcus pyogenes
accttgaagaacatggatat

SEQ ID NO: 58072 - DNA, 20 bp, Streptococcus pyogenes
aagaacatggatatcaacag

SEQ ID NO: 58073 - DNA, 20 bp, Streptococcus pyogenes
gttgtctgctgctgttgaga

SEQ ID NO: 58074 - DNA, 20 bp, Streptococcus pyogenes
tctgctgctgttgagaagac

SEQ ID NO: 58075 - DNA, 20 bp, Streptococcus pyogenes
atcaatttctgacaatgaca

SEQ ID NO: 58076 - DNA, 20 bp, Streptococcus pyogenes
ctgacaatgacaatcctgca

SEQ ID NO: 58077 - DNA, 20 bp, Streptococcus pyogenes
tgacaatgacaatcctgcat

SEQ ID NO: 58078 - DNA, 20 bp, Streptococcus pyogenes
acgaactggagttttcgtac

SEQ ID NO: 58079 - DNA, 20 bp, Streptococcus pyogenes
tcgtacgttctacaaggtcg

SEQ ID NO: 58080 - DNA, 20 bp, Streptococcus pyogenes
caagaacgtcgaagacacca

SEQ ID NO: 58081 - DNA, 20 bp, Streptococcus pyogenes
aaggattgatacgtcaaatg

SEQ ID NO: 58082 - DNA, 20 bp, Streptococcus pyogenes
atacgtcaaatgtaccacca

SEQ ID NO: 58083 - DNA, 20 bp, Streptococcus pyogenes
gtttttgaccttggtggtgg

SEQ ID NO: 58084 - DNA, 20 bp, Streptococcus pyogenes
ttgaccttggtggtggtaca

SEQ ID NO: 58085 - DNA, 20 bp, Streptococcus pyogenes
cagcatcacccacgataatt

SEQ ID NO: 58086 - DNA, 20 bp, Streptococcus pyogenes
caccatttttgaatgatact

SEQ ID NO: 58087 - DNA, 20 bp, Streptococcus pyogenes
accatttttgaatgatacta

SEQ ID NO: 58088 - DNA, 20 bp, Streptococcus pyogenes
ttgaatgatactactgaagg

SEQ ID NO: 58089 - DNA, 20 bp, Streptococcus pyogenes
tgaatgatactactgaagga

SEQ ID NO: 58090 - DNA, 20 bp, Streptococcus pyogenes
ctgtcattacggacaaaaac

SEQ ID NO: 58091 - DNA, 20 bp, Streptococcus pyogenes
cggacaaaaacgaaaactca

SEQ ID NO: 58092 - DNA, 20 bp, Streptococcus pyogenes
accttagttataaacaacta

SEQ ID NO: 58093 - DNA, 20 bp, Streptococcus pyogenes
ccttagttataaacaactac

SEQ ID NO: 58094 - DNA, 20 bp, Streptococcus pyogenes
gttataaacaactaccatcg

SEQ ID NO: 58095 - DNA, 20 bp, Streptococcus pyogenes
tcaagcgatggtaagattgc

SEQ ID NO: 58096 - DNA, 20 bp, Streptococcus pyogenes
cttttgccagatcctgagaa

SEQ ID NO: 58097 - DNA, 20 bp, Streptococcus pyogenes
tgccagatcctgagaacgat

SEQ ID NO: 58098 - DNA, 20 bp, Streptococcus pyogenes
gccagatcctgagaacgata

SEQ ID NO: 58099 - DNA, 20 bp, Streptococcus pyogenes
ccagatcctgagaacgatag

SEQ ID NO: 58100 - DNA, 20 bp, Streptococcus pyogenes
ccaataatgtttaccaaact

SEQ ID NO: 58101 - DNA, 20 bp, Streptococcus pyogenes
caataatgtttaccaaacta

SEQ ID NO: 58102 - DNA, 20 bp, Streptococcus pyogenes
accaaactaacagacctacg

SEQ ID NO: 58103 - DNA, 20 bp, Streptococcus pyogenes
ccaaactaacagacctacga

SEQ ID NO: 58104 - DNA, 20 bp, Streptococcus pyogenes
ttgattccttaccgtgggtt

SEQ ID NO: 58105 - DNA, 20 bp, Streptococcus pyogenes
aaatgctatcaagtcacgtg

SEQ ID NO: 58106 - DNA, 20 bp, Streptococcus pyogenes
aatgctatcaagtcacgtgt

SEQ ID NO: 58107 - DNA, 20 bp, Streptococcus pyogenes
cttggaatagcaaactgcac

SEQ ID NO: 58108 - DNA, 20 bp, Streptococcus pyogenes
ttggaatagcaaactgcact

SEQ ID NO: 58109 - DNA, 20 bp, Streptococcus pyogenes
gaatagcaaactgcactgtc

SEQ ID NO: 58110 - DNA, 20 bp, Streptococcus pyogenes
ttccaacaatcccaacttct

SEQ ID NO: 58111 - DNA, 20 bp, Streptococcus pyogenes
tccaacaatcccaacttctc

SEQ ID NO: 58112 - DNA, 20 bp, Streptococcus pyogenes
ccaacaatcccaacttctct

SEQ ID NO: 58113 - DNA, 20 bp, Streptococcus pyogenes
caacaatcccaacttctcta

SEQ ID NO: 58114 - DNA, 20 bp, Streptococcus pyogenes
tctagttttgccatatcatt

SEQ ID NO: 58115 - DNA, 20 bp, Streptococcus pyogenes
atgagattgccaatcaagtt

SEQ ID NO: 58116 - DNA, 20 bp, Streptococcus pyogenes
tgagattgccaatcaagttg

SEQ ID NO: 58117 - DNA, 20 bp, Streptococcus pyogenes
ccaatcaagttgctttctct

SEQ ID NO: 58118 - DNA, 20 bp, Streptococcus pyogenes
ctttctctggttctcgtgat

SEQ ID NO: 58119 - DNA, 20 bp, Streptococcus pyogenes
ctctggttctcgtgatagac

SEQ ID NO: 58120 - DNA, 20 bp, Streptococcus pyogenes
gccaaagaagtcctatctat

SEQ ID NO: 58121 - DNA, 20 bp, Streptococcus pyogenes
ccaaagaagtcctatctatc

SEQ ID NO: 58122 - DNA, 20 bp, Streptococcus pyogenes
ctctgtcattgatgatgata

SEQ ID NO: 58123 - DNA, 20 bp, Streptococcus pyogenes
atgatgataaaaaagcacta

SEQ ID NO: 58124 - DNA, 20 bp, Streptococcus pyogenes
tccttcgtccttatcagatt

SEQ ID NO: 58125 - DNA, 20 bp, Streptococcus pyogenes
gatgtcgatgagacagaaga

SEQ ID NO: 58126 - DNA, 20 bp, Streptococcus pyogenes
atgtcgatgagacagaagat

SEQ ID NO: 58127 - DNA, 20 bp, Streptococcus pyogenes
agaatccagcgatcgtcgtg

SEQ ID NO: 58128 - DNA, 20 bp, Streptococcus pyogenes
gaatccagcgatcgtcgtgt

SEQ ID NO: 58129 - DNA, 20 bp, Streptococcus pyogenes
tggtcaccaccattcaaaaa

SEQ ID NO: 58130 - DNA, 20 bp, Streptococcus pyogenes
ggtgatttagcccaaacaac

SEQ ID NO: 58131 - DNA, 20 bp, Streptococcus pyogenes
agcccaaacaacggaacagc

SEQ ID NO: 58132 - DNA, 20 bp, Streptococcus pyogenes
gcccaaacaacggaacagca

SEQ ID NO: 58133 - DNA, 20 bp, Streptococcus pyogenes
aagaagccattcatgataaa

SEQ ID NO: 58134 - DNA, 20 bp, Streptococcus pyogenes
atcatgaatggcttctttaa

SEQ ID NO: 58135 - DNA, 20 bp, Streptococcus pyogenes
aggctggtgaaacggattta

SEQ ID NO: 58136 - DNA, 20 bp, Streptococcus pyogenes
agtcatttctaagaaggtca

SEQ ID NO: 58137 - DNA, 20 bp, Streptococcus pyogenes
gtcatttctaagaaggtcaa

SEQ ID NO: 58138 - DNA, 20 bp, Streptococcus pyogenes
ctaagaaggtcaaagaaaaa

SEQ ID NO: 58139 - DNA, 20 bp, Streptococcus pyogenes
taagaaggtcaaagaaaaac

SEQ ID NO: 58140 - DNA, 20 bp, Streptococcus pyogenes
acaggttttgatgcgccttg

SEQ ID NO: 58141 - DNA, 20 bp, Streptococcus pyogenes
tgatgcgccttgtttatcaa

SEQ ID NO: 58142 - DNA, 20 bp, Streptococcus pyogenes
gatgcgccttgtttatcaac

SEQ ID NO: 58143 - DNA, 20 bp, Streptococcus pyogenes
atgcgccttgtttatcaacg

SEQ ID NO: 58144 - DNA, 20 bp, Streptococcus pyogenes
tttatcaacgatctttattg

SEQ ID NO: 58145 - DNA, 20 bp, Streptococcus pyogenes
tctcaaacaatacgccaaag

SEQ ID NO: 58146 - DNA, 20 bp, Streptococcus pyogenes
ctcaaacaatacgccaaagc

SEQ ID NO: 58147 - DNA, 20 bp, Streptococcus pyogenes
tcaaacaatacgccaaagcc

SEQ ID NO: 58148 - DNA, 20 bp, Streptococcus pyogenes
caagcgtttgataaactctt

SEQ ID NO: 58149 - DNA, 20 bp, Streptococcus pyogenes
aagcgtttgataaactcttt

SEQ ID NO: 58150 - DNA, 20 bp, Streptococcus pyogenes
aagaaaggctcaatgacaat

SEQ ID NO: 58151 - DNA, 20 bp, Streptococcus pyogenes
ggcaaaatcaaaccctgcta

SEQ ID NO: 58152 - DNA, 20 bp, Streptococcus pyogenes
gcaaaatcaaaccctgctat

SEQ ID NO: 58153 - DNA, 20 bp, Streptococcus pyogenes
tggcaagatatccaaaaaga

SEQ ID NO: 58154 - DNA, 20 bp, Streptococcus pyogenes
ttggatatcttgccataact

SEQ ID NO: 58155 - DNA, 20 bp, Streptococcus pyogenes
tgccatgaataaactcaaat

SEQ ID NO: 58156 - DNA, 20 bp, Streptococcus pyogenes
gaacgggagttagttcaatt

SEQ ID NO: 58157 - DNA, 20 bp, Streptococcus pyogenes
aacgggagttagttcaattc

SEQ ID NO: 58158 - DNA, 20 bp, Streptococcus pyogenes
gttcaattcattagagatca

SEQ ID NO: 58159 - DNA, 20 bp, Streptococcus pyogenes
aattcattagagatcaaatc

SEQ ID NO: 58160 - DNA, 20 bp, Streptococcus pyogenes
aaattccctccctccctgaa

SEQ ID NO: 58161 - DNA, 20 bp, Streptococcus pyogenes
cctccctccctgaacaagaa

SEQ ID NO: 58162 - DNA, 20 bp, Streptococcus pyogenes
gcgaacttttccaaatggtt

SEQ ID NO: 58163 - DNA, 20 bp, Streptococcus pyogenes
tccaaatggttgatcaattg

SEQ ID NO: 58164 - DNA, 20 bp, Streptococcus pyogenes
ccaaatggttgatcaattga

SEQ ID NO: 58165 - DNA, 20 bp, Streptococcus pyogenes
ctcagcagcatctgccatgt

SEQ ID NO: 58166 - DNA, 20 bp, Streptococcus pyogenes
tgagcgcatcatgtccttgc

SEQ ID NO: 58167 - DNA, 20 bp, Streptococcus pyogenes
cccataaagccaagatcttt

SEQ ID NO: 58168 - DNA, 20 bp, Streptococcus pyogenes
gttgaaaccgtctgttccaa

SEQ ID NO: 58169 - DNA, 20 bp, Streptococcus pyogenes
ttgaaaccgtctgttccaac

SEQ ID NO: 58170 - DNA, 20 bp, Streptococcus pyogenes
agccagattcaatcataatg

SEQ ID NO: 58171 - DNA, 20 bp, Streptococcus pyogenes
aatcataatggtatcgttgt

SEQ ID NO: 58172 - DNA, 20 bp, Streptococcus pyogenes
tcttgtaccaattcagctgc

SEQ ID NO: 58173 - DNA, 20 bp, Streptococcus pyogenes
taccaattcagctgcttttt

SEQ ID NO: 58174 - DNA, 20 bp, Streptococcus pyogenes
agctgctttttctgcaatcc

SEQ ID NO: 58175 - DNA, 20 bp, Streptococcus pyogenes
ttttcaacatccaacatttt

SEQ ID NO: 58176 - DNA, 20 bp, Streptococcus pyogenes
tcaacatccaacattttagt

SEQ ID NO: 58177 - DNA, 20 bp, Streptococcus pyogenes
caacatccaacattttagta

SEQ ID NO: 58178 - DNA, 20 bp, Streptococcus pyogenes
aacatccaacattttagtat

SEQ ID NO: 58179 - DNA, 20 bp, Streptococcus pyogenes
tagtattcatgacggtcctg

SEQ ID NO: 58180 - DNA, 20 bp, Streptococcus pyogenes
gccctgttaaaagcagccaa

SEQ ID NO: 58181 - DNA, 20 bp, Streptococcus pyogenes
aaagcagccaaagcagcagg

SEQ ID NO: 58182 - DNA, 20 bp, Streptococcus pyogenes
acaccgcaattgaaaccacc

SEQ ID NO: 58183 - DNA, 20 bp, Streptococcus pyogenes
aaaccaccgcctttgccaaa

SEQ ID NO: 58184 - DNA, 20 bp, Streptococcus pyogenes
gccaaacacgagcaatttgt

SEQ ID NO: 58185 - DNA, 20 bp, Streptococcus pyogenes
cctttccatcaatttggaga

SEQ ID NO: 58186 - DNA, 20 bp, Streptococcus pyogenes
ccatcaatttggagaaaaca

SEQ ID NO: 58187 - DNA, 20 bp, Streptococcus pyogenes
catcaatttggagaaaacaa

SEQ ID NO: 58188 - DNA, 20 bp, Streptococcus pyogenes
ggagaaaacaagtacaaact

SEQ ID NO: 58189 - DNA, 20 bp, Streptococcus pyogenes
gagaaaacaagtacaaactt

SEQ ID NO: 58190 - DNA, 20 bp, Streptococcus pyogenes
ccaacgttgtttacgatttg

SEQ ID NO: 58191 - DNA, 20 bp, Streptococcus pyogenes
caacgttgtttacgatttgg

SEQ ID NO: 58192 - DNA, 20 bp, Streptococcus pyogenes
tttacgatttggccatgttg

SEQ ID NO: 58193 - DNA, 20 bp, Streptococcus pyogenes
acgatttggccatgttgtgt

SEQ ID NO: 58194 - DNA, 20 bp, Streptococcus pyogenes
cgatttggccatgttgtgtc

SEQ ID NO: 58195 - DNA, 20 bp, Streptococcus pyogenes
tgatagtgattgcgaagctt

SEQ ID NO: 58196 - DNA, 20 bp, Streptococcus pyogenes
gatagtgattgcgaagcttc

SEQ ID NO: 58197 - DNA, 20 bp, Streptococcus pyogenes
atagtgattgcgaagcttct

SEQ ID NO: 58198 - DNA, 20 bp, Streptococcus pyogenes
cgaagcttcttgtgctgatt

SEQ ID NO: 58199 - DNA, 20 bp, Streptococcus pyogenes
ttgtgctgattttcttaaac

SEQ ID NO: 58200 - DNA, 20 bp, Streptococcus pyogenes
actaataacaacatctggcg

SEQ ID NO: 58201 - DNA, 20 bp, Streptococcus pyogenes
aagttggtttctgtcgtccc

SEQ ID NO: 58202 - DNA, 20 bp, Streptococcus pyogenes
gtttctgtcgtccctgtttt

SEQ ID NO: 58203 - DNA, 20 bp, Streptococcus pyogenes
ctgtcgtccctgttttacca

SEQ ID NO: 58204 - DNA, 20 bp, Streptococcus pyogenes
tgtcgtccctgttttaccag

SEQ ID NO: 58205 - DNA, 20 bp, Streptococcus pyogenes
gttgtcacgctgccacctaa

SEQ ID NO: 58206 - DNA, 20 bp, Streptococcus pyogenes
tcacgctgccacctaaagct

SEQ ID NO: 58207 - DNA, 20 bp, Streptococcus pyogenes
tttggcagagctcatatcta

SEQ ID NO: 58208 - DNA, 20 bp, Streptococcus pyogenes
ttggcagagctcatatctaa

SEQ ID NO: 58209 - DNA, 20 bp, Streptococcus pyogenes
gatatgagctctgccaaaaa

SEQ ID NO: 58210 - DNA, 20 bp, Streptococcus pyogenes
ttgatgcgggactacgtttt

SEQ ID NO: 58211 - DNA, 20 bp, Streptococcus pyogenes
atgcgggactacgttttgct

SEQ ID NO: 58212 - DNA, 20 bp, Streptococcus pyogenes
tgcttgagtcgcatagttaa

SEQ ID NO: 58213 - DNA, 20 bp, Streptococcus pyogenes
gcttgagtcgcatagttaaa

SEQ ID NO: 58214 - DNA, 20 bp, Streptococcus pyogenes
cttgagtcgcatagttaaaa

SEQ ID NO: 58215 - DNA, 20 bp, Hepatitis E virus
atactgctagagaggcccag

SEQ ID NO: 58216 - DNA, 20 bp, Hepatitis E virus
gctaatgctcaggtggtacg

SEQ ID NO: 58217 - DNA, 20 bp, Hepatitis E virus
ctaatgctcaggtggtacgc

SEQ ID NO: 58218 - DNA, 20 bp, Hepatitis E virus
agagtgcgacaggtaggggc

SEQ ID NO: 58219 - DNA, 20 bp, Hepatitis E virus
gcaaaggcggtagccgccgc

SEQ ID NO: 58220 - DNA, 20 bp, Hepatitis E virus
cccgcggcgcgggccggcca

SEQ ID NO: 58221 - DNA, 20 bp, Hepatitis E virus
cattcttgcagggcgccctg

SEQ ID NO: 58222 - DNA, 20 bp, Hepatitis E virus
ttgcagggcgccctgctact

SEQ ID NO: 58223 - DNA, 20 bp, Hepatitis E virus
cagggcgccctgctactgat

SEQ ID NO: 58224 - DNA, 20 bp, Hepatitis E virus
ccttttgcacgcgtgggttc

SEQ ID NO: 58225 - DNA, 20 bp, Hepatitis E virus
gctgtgatgcatctgcccgc

SEQ ID NO: 58226 - DNA, 20 bp, Hepatitis E virus
ctgtgatgcatctgcccgct

SEQ ID NO: 58227 - DNA, 20 bp, Hepatitis E virus
ttgccggacggggtttatac

SEQ ID NO: 58228 - DNA, 20 bp, Hepatitis E virus
ccggacggggtttataccac

SEQ ID NO: 58229 - DNA, 20 bp, Hepatitis E virus
ataccacccgcgcttataca

SEQ ID NO: 58230 - DNA, 20 bp, Hepatitis E virus
tgtgctgcggttgaccaccg

SEQ ID NO: 58231 - DNA, 20 bp, Hepatitis E virus
gtgctgcggttgaccaccgt

SEQ ID NO: 58232 - DNA, 20 bp, Hepatitis E virus
tgctgcggttgaccaccgtg

SEQ ID NO: 58233 - DNA, 20 bp, Hepatitis E virus
accaccgtggcaaatccttg

SEQ ID NO: 58234 - DNA, 20 bp, Hepatitis E virus
ccccatgccctacacccctt

SEQ ID NO: 58235 - DNA, 20 bp, Hepatitis E virus
ccaatgagggttggaccacc

SEQ ID NO: 58236 - DNA, 20 bp, Hepatitis E virus
gaccaccgatgagtacgccc

SEQ ID NO: 58237 - DNA, 20 bp, Hepatitis E virus
tggcctcctatttgacaata

SEQ ID NO: 58238 - DNA, 20 bp, Hepatitis E virus
gacaatatgccaccaacgct

SEQ ID NO: 58239 - DNA, 20 bp, Hepatitis E virus
acaatatgccaccaacgctg

SEQ ID NO: 58240 - DNA, 20 bp, Hepatitis E virus
tatagacagtgtcgggattg

SEQ ID NO: 58241 - DNA, 20 bp, Hepatitis E virus
ggtgtcagcaggtttttatg

SEQ ID NO: 58242 - DNA, 20 bp, Hepatitis E virus
ttatgtggatcttagagagc

SEQ ID NO: 58243 - DNA, 20 bp, Hepatitis E virus
tatgtggatcttagagagct

SEQ ID NO: 58244 - DNA, 20 bp, Hepatitis E virus
atgtggatcttagagagctt

SEQ ID NO: 58245 - DNA, 20 bp, Hepatitis E virus
acgagcccaccggcttggat

SEQ ID NO: 58246 - DNA, 20 bp, Hepatitis E virus
cgagcccaccggcttggata

SEQ ID NO: 58247 - DNA, 20 bp, Hepatitis E virus
gataattggaccatccgcgc

SEQ ID NO: 58248 - DNA, 20 bp, Hepatitis E virus
gaccatccgcgctctcacgg

SEQ ID NO: 58249 - DNA, 20 bp, Hepatitis E virus
catcaggcctctctgcgcgc

SEQ ID NO: 58250 - DNA, 20 bp, Hepatitis E virus
gacaccggggccgatttccc

SEQ ID NO: 58251 - DNA, 20 bp, Hepatitis E virus
ccccgaggtacgttctccct

SEQ ID NO: 58252 - DNA, 20 bp, Hepatitis E virus
cccgaggtacgttctcccta

SEQ ID NO: 58253 - DNA, 20 bp, Hepatitis E virus
tccctacacctgttacgtac

SEQ ID NO: 58254 - DNA, 20 bp, Hepatitis E virus
cgtaccgcgggcaccccccc

SEQ ID NO: 58255 - DNA, 20 bp, Hepatitis E virus
ctggaattgctcccggatgg

SEQ ID NO: 58256 - DNA, 20 bp, Hepatitis E virus
ctcccggatggggcggcagt

SEQ ID NO: 58257 - DNA, 20 bp, Hepatitis E virus
atgagggggatctttttaat

SEQ ID NO: 58258 - DNA, 20 bp, Hepatitis E virus
tgagggggatctttttaatt

SEQ ID NO: 58259 - DNA, 20 bp, Hepatitis E virus
ttaattcggattgcttctgg

SEQ ID NO: 58260 - DNA, 20 bp, Hepatitis E virus
caggtggcctatcaggagtg

SEQ ID NO: 58261 - DNA, 20 bp, Hepatitis E virus
ttgcctactcggcagtggaa

SEQ ID NO: 58262 - DNA, 20 bp, Hepatitis E virus
cctactcggcagtggaatat

SEQ ID NO: 58263 - DNA, 20 bp, Hepatitis E virus
cactgccgagtaggcaataa

SEQ ID NO: 58264 - DNA, 20 bp, Hepatitis E virus
ttccaacaaaccaacttaag

SEQ ID NO: 58265 - DNA, 20 bp, Hepatitis E virus
caacaaaccaacttaaggcg

SEQ ID NO: 58266 - DNA, 20 bp, Hepatitis E virus
aggcgcaatggagggctcga

SEQ ID NO: 58267 - DNA, 20 bp, Hepatitis E virus
ccctgttatgaccccgcatg

SEQ ID NO: 58268 - DNA, 20 bp, Hepatitis E virus
cctgttatgaccccgcatgt

SEQ ID NO: 58269 - DNA, 20 bp, Hepatitis E virus
atctggagccaacagaatgg

SEQ ID NO: 58270 - DNA, 20 bp, Hepatitis E virus
gttggcggccgattaccccg

SEQ ID NO: 58271 - DNA, 20 bp, Hepatitis E virus
ttggcggccgattaccccgg

SEQ ID NO: 58272 - DNA, 20 bp, Hepatitis E virus
tgttggctccagattaagct

SEQ ID NO: 58273 - DNA, 20 bp, Hepatitis E virus
gctccagattaagctgcata

SEQ ID NO: 58274 - DNA, 20 bp, Hepatitis E virus
acatcagatggccgaagcat

SEQ ID NO: 58275 - DNA, 20 bp, Hepatitis E virus
catcagatggccgaagcatt

SEQ ID NO: 58276 - DNA, 20 bp, Hepatitis E virus
ggccacaggccactcgaggt

SEQ ID NO: 58277 - DNA, 20 bp, Hepatitis E virus
ggccatctgatgtaaagcca

SEQ ID NO: 58278 - DNA, 20 bp, Hepatitis E virus
tggcatgatgacgtggaagt

SEQ ID NO: 58279 - DNA, 20 bp, Hepatitis E virus
attccttcgttgcaaggtgt

SEQ ID NO: 58280 - DNA, 20 bp, Hepatitis E virus
cttcgttgcaaggtgtcaga

SEQ ID NO: 58281 - DNA, 20 bp, Hepatitis E virus
gttgcaaggtgtcagagttt

SEQ ID NO: 58282 - DNA, 20 bp, Hepatitis E virus
caaggtgtcagagtttcatc

SEQ ID NO: 58283 - DNA, 20 bp, Hepatitis E virus
taccacctgctccgttcggg

SEQ ID NO: 58284 - DNA, 20 bp, Hepatitis E virus
ggggtgggtgttgcaggctc

SEQ ID NO: 58285 - DNA, 20 bp, Hepatitis E virus
caggctccccaagagagctt

SEQ ID NO: 58286 - DNA, 20 bp, Hepatitis E virus
cggggtcgatggaagaagca

SEQ ID NO: 58287 - DNA, 20 bp, Hepatitis E virus
ttccatcgaccccgcaagct

SEQ ID NO: 58288 - DNA, 20 bp, Hepatitis E virus
aaggttaactttagtgatgt

SEQ ID NO: 58289 - DNA, 20 bp, Hepatitis E virus
actttagtgatgttggctcg

SEQ ID NO: 58290 - DNA, 20 bp, Hepatitis E virus
agtgatgttggctcgtacgc

SEQ ID NO: 58291 - DNA, 20 bp, Hepatitis E virus
gtgatgttggctcgtacgca

SEQ ID NO: 58292 - DNA, 20 bp, Hepatitis E virus
gctcgtacgcaggcttgcta

SEQ ID NO: 58293 - DNA, 20 bp, Hepatitis E virus
tacaagctggagcctggtct

SEQ ID NO: 58294 - DNA, 20 bp, Hepatitis E virus
gaaagcgatcgctgagggcc

SEQ ID NO: 58295 - DNA, 20 bp, Hepatitis E virus
aaagcgatcgctgagggccg

SEQ ID NO: 58296 - DNA, 20 bp, Hepatitis E virus
caaacctgcgaccgcattga

SEQ ID NO: 58297 - DNA, 20 bp, Hepatitis E virus
aaacctgcgaccgcattgag

SEQ ID NO: 58298 - DNA, 20 bp, Hepatitis E virus
gctatccccaaccaatccct

SEQ ID NO: 58299 - DNA, 20 bp, Hepatitis E virus
gctgccgaactctccaccat

SEQ ID NO: 58300 - DNA, 20 bp, Hepatitis E virus
ctgccgaactctccaccatg

SEQ ID NO: 58301 - DNA, 20 bp, Hepatitis E virus
gcaccgcctgggtcgatcgg

SEQ ID NO: 58302 - DNA, 20 bp, Hepatitis E virus
cggggcctgccgcggcgccg

SEQ ID NO: 58303 - DNA, 20 bp, Hepatitis E virus
tggccccaatccacaacagt

SEQ ID NO: 58304 - DNA, 20 bp, Hepatitis E virus
catcacttccaccgacgtgc

SEQ ID NO: 58305 - DNA, 20 bp, Hepatitis E virus
caccgacgtgcgcattgtgg

SEQ ID NO: 58306 - DNA, 20 bp, Hepatitis E virus
tggcgcagcctggcctggcc

SEQ ID NO: 58307 - DNA, 20 bp, Hepatitis E virus
atatccaccgacgtggggac

SEQ ID NO: 58308 - DNA, 20 bp, Hepatitis E virus
ggtttacttgacatcgccct

SEQ ID NO: 58309 - DNA, 20 bp, Hepatitis E virus
acttgacatcgccctccagg

SEQ ID NO: 58310 - DNA, 20 bp, Hepatitis E virus
cttgacatcgccctccaggt

SEQ ID NO: 58311 - DNA, 20 bp, Hepatitis E virus
acatcgccctccaggttgaa

SEQ ID NO: 58312 - DNA, 20 bp, Hepatitis E virus
aatatcgcaatttgacccct

SEQ ID NO: 58313 - DNA, 20 bp, Hepatitis E virus
tgtgggtgaccttgccctct

SEQ ID NO: 58314 - DNA, 20 bp, Hepatitis E virus
ccctctgcagagtatgccca

SEQ ID NO: 58315 - DNA, 20 bp, Hepatitis E virus
ccacccggcatactggtctg

SEQ ID NO: 58316 - DNA, 20 bp, Hepatitis E virus
gcagcagggcacaaccaagg

SEQ ID NO: 58317 - DNA, 20 bp, Hepatitis E virus
caacaccactgactctgata

SEQ ID NO: 58318 - DNA, 20 bp, Hepatitis E virus
agaggtcccatcccaccaga

SEQ ID NO: 58319 - DNA, 20 bp, Hepatitis E virus
gaggtcccatcccaccagac

SEQ ID NO: 58320 - DNA, 20 bp, Hepatitis E virus
taattatatgtgtagccggc

SEQ ID NO: 58321 - DNA, 20 bp, Human coronavirus
gttatggcagtcctagtgta

SEQ ID NO: 58322 - DNA, 20 bp, Human coronavirus
ttatggcagtcctagtgtaa

SEQ ID NO: 58323 - DNA, 20 bp, Human coronavirus
tggcagtcctagtgtaattg

SEQ ID NO: 58324 - DNA, 20 bp, Human coronavirus
aaatttcgtcaagtttgtaa

SEQ ID NO: 58325 - DNA, 20 bp, Human coronavirus
cgtcaagtttgtaaactggt

SEQ ID NO: 58326 - DNA, 20 bp, Human coronavirus
tcaggcatgccgttttgttg

SEQ ID NO: 58327 - DNA, 20 bp, Human coronavirus
caggcatgccgttttgttgc

SEQ ID NO: 58328 - DNA, 20 bp, Human coronavirus
aggcatgccgttttgttgct

SEQ ID NO: 58329 - DNA, 20 bp, Human coronavirus
tgttgcttttggcttacagg

SEQ ID NO: 58330 - DNA, 20 bp, Human coronavirus
gttgcttttggcttacagga

SEQ ID NO: 58331 - DNA, 20 bp, Human coronavirus
ttaaaccagttttctttaat

SEQ ID NO: 58332 - DNA, 20 bp, Human coronavirus
aaccagttttctttaatgct

SEQ ID NO: 58333 - DNA, 20 bp, Human coronavirus
tctttaatgcttttgttaaa

SEQ ID NO: 58334 - DNA, 20 bp, Human coronavirus
ctttaatgcttttgttaaat

SEQ ID NO: 58335 - DNA, 20 bp, Human coronavirus
tttaatgcttttgttaaatg

SEQ ID NO: 58336 - DNA, 20 bp, Human coronavirus
tcttggtgcttctgttacag

SEQ ID NO: 58337 - DNA, 20 bp, Human coronavirus
cttggtgcttctgttacaga

SEQ ID NO: 58338 - DNA, 20 bp, Human coronavirus
ttggtgcttctgttacagaa

SEQ ID NO: 58339 - DNA, 20 bp, Human coronavirus
gtgcttctgttacagaagat

SEQ ID NO: 58340 - DNA, 20 bp, Human coronavirus
tgttacagaagatgttaaat

SEQ ID NO: 58341 - DNA, 20 bp, Human coronavirus
gcgtcttgttgattgtgcac

SEQ ID NO: 58342 - DNA, 20 bp, Human coronavirus
cgtcttgttgattgtgcacc

SEQ ID NO: 58343 - DNA, 20 bp, Human coronavirus
ttgattgtgcacctgtagtt

SEQ ID NO: 58344 - DNA, 20 bp, Human coronavirus
attgtgcacctgtagtttgc

SEQ ID NO: 58345 - DNA, 20 bp, Human coronavirus
tgcacctgtagtttgcccta

SEQ ID NO: 58346 - DNA, 20 bp, Human coronavirus
ttagacgtgatgctacattc

SEQ ID NO: 58347 - DNA, 20 bp, Human coronavirus
gacgtgatgctacattcgct

SEQ ID NO: 58348 - DNA, 20 bp, Human coronavirus
gctacacatgtgtgttttaa

SEQ ID NO: 58349 - DNA, 20 bp, Human coronavirus
taaggactgttataatgttt

SEQ ID NO: 58350 - DNA, 20 bp, Human coronavirus
aaggactgttataatgtttg

SEQ ID NO: 58351 - DNA, 20 bp, Human coronavirus
tgccaaacgttttagacgtg

SEQ ID NO: 58352 - DNA, 20 bp, Human coronavirus
tagacgtgttttggtaaaat

SEQ ID NO: 58353 - DNA, 20 bp, Human coronavirus
agacgtgttttggtaaaatt

SEQ ID NO: 58354 - DNA, 20 bp, Human coronavirus
gacgtgttttggtaaaattg

SEQ ID NO: 58355 - DNA, 20 bp, Human coronavirus
tggtaaaattgcttgatgtc

SEQ ID NO: 58356 - DNA, 20 bp, Human coronavirus
ggaaggtctacatgaagttc

SEQ ID NO: 58357 - DNA, 20 bp, Human coronavirus
ttacatctgcaatgaatgtc

SEQ ID NO: 58358 - DNA, 20 bp, Human coronavirus
catctgcaatgaatgtcatt

SEQ ID NO: 58359 - DNA, 20 bp, Human coronavirus
ggcaacatattaagttgcca

SEQ ID NO: 58360 - DNA, 20 bp, Human coronavirus
agttgccacaattttatatt

SEQ ID NO: 58361 - DNA, 20 bp, Human coronavirus
gttgtttgttttggattatg

SEQ ID NO: 58362 - DNA, 20 bp, Human coronavirus
tttgttttggattatgcctt

SEQ ID NO: 58363 - DNA, 20 bp, Human coronavirus
gttttggattatgccttaca

SEQ ID NO: 58364 - DNA, 20 bp, Human coronavirus
ttttggattatgccttacac

SEQ ID NO: 58365 - DNA, 20 bp, Human coronavirus
tggattatgccttacacaaa

SEQ ID NO: 58366 - DNA, 20 bp, Human coronavirus
tgctgtatataaaaatgtta

SEQ ID NO: 58367 - DNA, 20 bp, Human coronavirus
gctgtatataaaaatgttaa

SEQ ID NO: 58368 - DNA, 20 bp, Human coronavirus
ctgtatataaaaatgttaaa

SEQ ID NO: 58369 - DNA, 20 bp, Human coronavirus
aattttatttaggtgatatt

SEQ ID NO: 58370 - DNA, 20 bp, Human coronavirus
tatttaggtgatatttcaca

SEQ ID NO: 58371 - DNA, 20 bp, Human coronavirus
atatgtgtgttgtaccatcg

SEQ ID NO: 58372 - DNA, 20 bp, Human coronavirus
tatgtgtgttgtaccatcga

SEQ ID NO: 58373 - DNA, 20 bp, Human coronavirus
taccatcgataaatgatctt

SEQ ID NO: 58374 - DNA, 20 bp, Human coronavirus
cttttgataaaaatcttggt

SEQ ID NO: 58375 - DNA, 20 bp, Human coronavirus
ttttgataaaaatcttggtc

SEQ ID NO: 58376 - DNA, 20 bp, Human coronavirus
actcttttgaaggtgtttta

SEQ ID NO: 58377 - DNA, 20 bp, Human coronavirus
tgaaggtgttttacctatta

SEQ ID NO: 58378 - DNA, 20 bp, Human coronavirus
gaaggtgttttacctattaa

SEQ ID NO: 58379 - DNA, 20 bp, Human coronavirus
aaggtgttttacctattaat

SEQ ID NO: 58380 - DNA, 20 bp, Human coronavirus
tacctattaatactgatact

SEQ ID NO: 58381 - DNA, 20 bp, Human coronavirus
aaagtgctattgtctgtgct

SEQ ID NO: 58382 - DNA, 20 bp, Human coronavirus
tctgtgctagtgtgcttaaa

SEQ ID NO: 58383 - DNA, 20 bp, Human coronavirus
aagatggttgtgatgttggt

SEQ ID NO: 58384 - DNA, 20 bp, Human coronavirus
tgatgttggtttttgtccac

SEQ ID NO: 58385 - DNA, 20 bp, Human coronavirus
gtttttgtccacacagacat

SEQ ID NO: 58386 - DNA, 20 bp, Human coronavirus
gtaatgtttttgataatttt

SEQ ID NO: 58387 - DNA, 20 bp, Human coronavirus
ttgataattttaatcaatgg

SEQ ID NO: 58388 - DNA, 20 bp, Human coronavirus
tgataattttaatcaatggc

SEQ ID NO: 58389 - DNA, 20 bp, Human coronavirus
gataattttaatcaatggca

SEQ ID NO: 58390 - DNA, 20 bp, Human coronavirus
ataattttaatcaatggcat

SEQ ID NO: 58391 - DNA, 20 bp, Human coronavirus
gttttggttttgataaatgg

SEQ ID NO: 58392 - DNA, 20 bp, Human coronavirus
ttttggttttgataaatggt

SEQ ID NO: 58393 - DNA, 20 bp, Human coronavirus
tggttttgataaatggtatg

SEQ ID NO: 58394 - DNA, 20 bp, Human coronavirus
ggttttgataaatggtatgt

SEQ ID NO: 58395 - DNA, 20 bp, Human coronavirus
gttttgataaatggtatgtt

SEQ ID NO: 58396 - DNA, 20 bp, Human coronavirus
tcgttgtgcttgttatgctc

SEQ ID NO: 58397 - DNA, 20 bp, Human coronavirus
tgcttgttatgctcatttag

SEQ ID NO: 58398 - DNA, 20 bp, Human coronavirus
ttatgctcatttagccaagg

SEQ ID NO: 58399 - DNA, 20 bp, Human coronavirus
tgctcatttagccaaggcta

SEQ ID NO: 58400 - DNA, 20 bp, Human coronavirus
agccaaggctatgttagatt

SEQ ID NO: 58401 - DNA, 20 bp, Human coronavirus
gcataatttttcagtgtctc

SEQ ID NO: 58402 - DNA, 20 bp, Human coronavirus
cataatttttcagtgtctca

SEQ ID NO: 58403 - DNA, 20 bp, Human coronavirus
ttcagtgtctcataatggtg

SEQ ID NO: 58404 - DNA, 20 bp, Human coronavirus
tcagtgtctcataatggtgt

SEQ ID NO: 58405 - DNA, 20 bp, Human coronavirus
cagtgtctcataatggtgtc

SEQ ID NO: 58406 - DNA, 20 bp, Human coronavirus
gttctgattttactggtagt

SEQ ID NO: 58407 - DNA, 20 bp, Human coronavirus
tgattttactggtagtgttt

SEQ ID NO: 58408 - DNA, 20 bp, Human coronavirus
tactggtagtgtttatggta

SEQ ID NO: 58409 - DNA, 20 bp, Human coronavirus
actggtagtgtttatggtaa

SEQ ID NO: 58410 - DNA, 20 bp, Human coronavirus
ctggtagtgtttatggtaat

SEQ ID NO: 58411 - DNA, 20 bp, Human coronavirus
atgattttaaggtgagtgct

SEQ ID NO: 58412 - DNA, 20 bp, Human coronavirus
tgattttaaggtgagtgctg

SEQ ID NO: 58413 - DNA, 20 bp, Human coronavirus
taaggtgagtgctgctgaat

SEQ ID NO: 58414 - DNA, 20 bp, Human coronavirus
aaggtgagtgctgctgaatt

SEQ ID NO: 58415 - DNA, 20 bp, Human coronavirus
aggtgagtgctgctgaattt

SEQ ID NO: 58416 - DNA, 20 bp, Human coronavirus
tgaggatgctattgctaatg

SEQ ID NO: 58417 - DNA, 20 bp, Human coronavirus
ctaatggatcttcttctcaa

SEQ ID NO: 58418 - DNA, 20 bp, Human coronavirus
ttctcaacttattaaacaat

SEQ ID NO: 58419 - DNA, 20 bp, Human coronavirus
tcaacttattaaacaattga

SEQ ID NO: 58420 - DNA, 20 bp, Human coronavirus
ttaaacaattgaagcgtgcc

SEQ ID NO: 58421 - DNA, 20 bp, Human coronavirus
tttggacacttaatgatgtt

SEQ ID NO: 58422 - DNA, 20 bp, Human coronavirus
ggacacttaatgatgttaaa

SEQ ID NO: 58423 - DNA, 20 bp, Human coronavirus
gacacttaatgatgttaaag

SEQ ID NO: 58424 - DNA, 20 bp, Human coronavirus
atgatgttaaagacaatgat

SEQ ID NO: 58425 - DNA, 20 bp, Human coronavirus
aagacaatgatggtagacct

SEQ ID NO: 58426 - DNA, 20 bp, Human coronavirus
gtctacaagctggtaaacaa

SEQ ID NO: 58427 - DNA, 20 bp, Human coronavirus
gctgttaattctggactttt

SEQ ID NO: 58428 - DNA, 20 bp, Human coronavirus
attctggacttttaactgct

SEQ ID NO: 58429 - DNA, 20 bp, Human coronavirus
tggacttttaactgcttgtg

SEQ ID NO: 58430 - DNA, 20 bp, Human coronavirus
taactgcttgtgctttttct

SEQ ID NO: 58431 - DNA, 20 bp, Human coronavirus
ctattggttgtttggatcct

SEQ ID NO: 58432 - DNA, 20 bp, Human coronavirus
gttgtttggatcctattagg

SEQ ID NO: 58433 - DNA, 20 bp, Human coronavirus
tttggatcctattaggtttt

SEQ ID NO: 58434 - DNA, 20 bp, Human coronavirus
ggatcctattaggttttgtt

SEQ ID NO: 58435 - DNA, 20 bp, Human coronavirus
gatcctattaggttttgttt

SEQ ID NO: 58436 - DNA, 20 bp, Human coronavirus
tggaacacgagcaatccatg

SEQ ID NO: 58437 - DNA, 20 bp, Human coronavirus
acttttctggtgctttggct

SEQ ID NO: 58438 - DNA, 20 bp, Human coronavirus
tctggtgctttggctgagca

SEQ ID NO: 58439 - DNA, 20 bp, Human coronavirus
ctggtgctttggctgagcat

SEQ ID NO: 58440 - DNA, 20 bp, Human coronavirus
tggtgctttggctgagcatg

SEQ ID NO: 58441 - DNA, 20 bp, Human coronavirus
atgcatctcttggcaaaatt

SEQ ID NO: 58442 - DNA, 20 bp, Human coronavirus
tgcatctcttggcaaaattg

SEQ ID NO: 58443 - DNA, 20 bp, Human coronavirus
gcaaaattgtagctagagct

SEQ ID NO: 58444 - DNA, 20 bp, Human coronavirus
tagctagagctatgcttaaa

SEQ ID NO: 58445 - DNA, 20 bp, Human coronavirus
aatgcgttgctctatgcgat

SEQ ID NO: 58446 - DNA, 20 bp, Human coronavirus
tcattttaagcaattaggtt

SEQ ID NO: 58447 - DNA, 20 bp, Human coronavirus
taagcaattaggtttggttt

SEQ ID NO: 58448 - DNA, 20 bp, Human coronavirus
aagcaattaggtttggtttg

SEQ ID NO: 58449 - DNA, 20 bp, Human coronavirus
agcaattaggtttggtttgg

SEQ ID NO: 58450 - DNA, 20 bp, Human coronavirus
ggtttggtttggaataaaga

SEQ ID NO: 58451 - DNA, 20 bp, Human coronavirus
agtatgctattagtggtaaa

SEQ ID NO: 58452 - DNA, 20 bp, Human coronavirus
gtggtaaagaacgtgctaga

SEQ ID NO: 58453 - DNA, 20 bp, Human coronavirus
gtggtgtttctctgttgtct

SEQ ID NO: 58454 - DNA, 20 bp, Human coronavirus
ctctgttgtctacaatgacc

SEQ ID NO: 58455 - DNA, 20 bp, Human coronavirus
tctgttgtctacaatgacca

SEQ ID NO: 58456 - DNA, 20 bp, Human coronavirus
cagccatggtgttgggctct

SEQ ID NO: 58457 - DNA, 20 bp, Human coronavirus
agccatggtgttgggctcta

SEQ ID NO: 58458 - DNA, 20 bp, Human coronavirus
ggctctaagcatgttaattg

SEQ ID NO: 58459 - DNA, 20 bp, Human coronavirus
attgttgtactgcaacagat

SEQ ID NO: 58460 - DNA, 20 bp, Human coronavirus
ttgtactgcaacagataggt

SEQ ID NO: 58461 - DNA, 20 bp, Human coronavirus
tgttcccagcatactatgca

SEQ ID NO: 58462 - DNA, 20 bp, Human coronavirus
gttcccagcatactatgcaa

SEQ ID NO: 58463 - DNA, 20 bp, Human coronavirus
ttcccagcatactatgcaaa

SEQ ID NO: 58464 - DNA, 20 bp, Human coronavirus
ccagcatactatgcaaatag

SEQ ID NO: 58465 - DNA, 20 bp, Human coronavirus
acaaagatggtacctattat

SEQ ID NO: 58466 - DNA, 20 bp, Human coronavirus
ttatgctagtatgtatgaaa

SEQ ID NO: 58467 - DNA, 20 bp, Human coronavirus
tatgctagtatgtatgaaaa

SEQ ID NO: 58468 - DNA, 20 bp, Human coronavirus
atgctagtatgtatgaaaat

SEQ ID NO: 58469 - DNA, 20 bp, Human coronavirus
tgctagtatgtatgaaaatt

SEQ ID NO: 58470 - DNA, 20 bp, Human coronavirus
tacaatattgcaagctgctg

SEQ ID NO: 58471 - DNA, 20 bp, Human coronavirus
acgtgcaccaactattgcaa

SEQ ID NO: 58472 - DNA, 20 bp, Human coronavirus
cgtgcaccaactattgcaaa

SEQ ID NO: 58473 - DNA, 20 bp, Human coronavirus
caaaccaagagaagtattct

SEQ ID NO: 58474 - DNA, 20 bp, Human coronavirus
tagcatttataaattgcacc

SEQ ID NO: 58475 - DNA, 20 bp, Human coronavirus
ataaattgcaccctgctttt

SEQ ID NO: 58476 - DNA, 20 bp, Human coronavirus
gttgggtatggatgttgaaa

SEQ ID NO: 58477 - DNA, 20 bp, Human coronavirus
ggtatggatgttgaaagtgc

SEQ ID NO: 58478 - DNA, 20 bp, Human coronavirus
aaagtgctcatgtttgtggc

SEQ ID NO: 58479 - DNA, 20 bp, Human coronavirus
gtggcgataacataggtact

SEQ ID NO: 58480 - DNA, 20 bp, Human coronavirus
tggcgataacataggtacta

SEQ ID NO: 58481 - DNA, 20 bp, Human coronavirus
tgatatacaacagtggggtt

SEQ ID NO: 58482 - DNA, 20 bp, Human coronavirus
gatatacaacagtggggtta

SEQ ID NO: 58483 - DNA, 20 bp, Human coronavirus
atatacaacagtggggttat

SEQ ID NO: 58484 - DNA, 20 bp, Human coronavirus
tgttggttccttgagccaaa

SEQ ID NO: 58485 - DNA, 20 bp, Human coronavirus
gttccttgagccaaaaccac

SEQ ID NO: 58486 - DNA, 20 bp, Human coronavirus
tgacaagcaacctgttaata

SEQ ID NO: 58487 - DNA, 20 bp, Human coronavirus
atagtaatgtcaagttgttg

SEQ ID NO: 58488 - DNA, 20 bp, Human coronavirus
ttggattatgattatgcaac

SEQ ID NO: 58489 - DNA, 20 bp, Human coronavirus
gattatgattatgcaaccca

SEQ ID NO: 58490 - DNA, 20 bp, Human coronavirus
tgattatgcaacccatggtc

SEQ ID NO: 58491 - DNA, 20 bp, Human coronavirus
acaacttggtttttacaaat

SEQ ID NO: 58492 - DNA, 20 bp, Human coronavirus
gtttttacaaataaaacaac

SEQ ID NO: 58493 - DNA, 20 bp, Human coronavirus
ttacaaataaaacaacattg

SEQ ID NO: 58494 - DNA, 20 bp, Human coronavirus
tacaaataaaacaacattgc

SEQ ID NO: 58495 - DNA, 20 bp, Human coronavirus
acaaataaaacaacattgcc

SEQ ID NO: 58496 - DNA, 20 bp, Human coronavirus
atgaagttattatagataat

SEQ ID NO: 58497 - DNA, 20 bp, Human coronavirus
ttatagataataaaccttat

SEQ ID NO: 58498 - DNA, 20 bp, Human coronavirus
tagataataaaccttatagg

SEQ ID NO: 58499 - DNA, 20 bp, Human coronavirus
taggtggatgttgtggtgta

SEQ ID NO: 58500 - DNA, 20 bp, Human coronavirus
tggtgtaaagataaccactt

SEQ ID NO: 58501 - DNA, 20 bp, Human coronavirus
tgcactatggtgctggttct

SEQ ID NO: 58502 - DNA, 20 bp, Human coronavirus
gcactatggtgctggttctg

SEQ ID NO: 58503 - DNA, 20 bp, Human coronavirus
cactatggtgctggttctga

SEQ ID NO: 58504 - DNA, 20 bp, Human coronavirus
tgacaaaggtgtggcacctg

SEQ ID NO: 58505 - DNA, 20 bp, Human coronavirus
taaaacgttggctaccaccc

SEQ ID NO: 58506 - DNA, 20 bp, Human coronavirus
caattaggtgttcctgacaa

SEQ ID NO: 58507 - DNA, 20 bp, Human coronavirus
ggtgttcctgacaattcttc

SEQ ID NO: 58508 - DNA, 20 bp, Human coronavirus
ctgacaattcttcaactatt

SEQ ID NO: 58509 - DNA, 20 bp, Human coronavirus
ttcaactattgttacgggtt

SEQ ID NO: 58510 - DNA, 20 bp, Human coronavirus
aactattgttacgggtttat

SEQ ID NO: 58511 - DNA, 20 bp, Human coronavirus
atataatgtaactcgtactt

SEQ ID NO: 58512 - DNA, 20 bp, Human coronavirus
tataatgtaactcgtacttt

SEQ ID NO: 58513 - DNA, 20 bp, Human coronavirus
ttatgtgccagcagcttata

SEQ ID NO: 58514 - DNA, 20 bp, Human coronavirus
tatgtgccagcagcttataa

SEQ ID NO: 58515 - DNA, 20 bp, Human coronavirus
atgtgccagcagcttataaa

SEQ ID NO: 58516 - DNA, 20 bp, Human coronavirus
cccttttaataattggtttt

SEQ ID NO: 58517 - DNA, 20 bp, Human coronavirus
ccttttaataattggttttt

SEQ ID NO: 58518 - DNA, 20 bp, Human coronavirus
taataattggtttttgttaa

SEQ ID NO: 58519 - DNA, 20 bp, Human coronavirus
aataattggtttttgttaac

SEQ ID NO: 58520 - DNA, 20 bp, Human coronavirus
ataattggtttttgttaact

SEQ ID NO: 58521 - DNA, 20 bp, Human coronavirus
tggcccgtcctctcaacctt

SEQ ID NO: 58522 - DNA, 20 bp, Human coronavirus
ggcccgtcctctcaacctta

SEQ ID NO: 58523 - DNA, 20 bp, Human coronavirus
gcccgtcctctcaaccttat

SEQ ID NO: 58524 - DNA, 20 bp, Human coronavirus
ttactgttttataaacagca

SEQ ID NO: 58525 - DNA, 20 bp, Human coronavirus
ctgttttataaacagcacta

SEQ ID NO: 58526 - DNA, 20 bp, Human coronavirus
ggattgcaggatggttttta

SEQ ID NO: 58527 - DNA, 20 bp, Human coronavirus
gattgcaggatggtttttat

SEQ ID NO: 58528 - DNA, 20 bp, Human coronavirus
caggatggtttttattctgc

SEQ ID NO: 58529 - DNA, 20 bp, Human coronavirus
ttattctgcaaattttcttg

SEQ ID NO: 58530 - DNA, 20 bp, Human coronavirus
tattctgcaaattttcttga

SEQ ID NO: 58531 - DNA, 20 bp, Human coronavirus
ttattgtgacaccatgtaac

SEQ ID NO: 58532 - DNA, 20 bp, Human coronavirus
tattgtgacaccatgtaacc

SEQ ID NO: 58533 - DNA, 20 bp, Human coronavirus
attgtgacaccatgtaacca

SEQ ID NO: 58534 - DNA, 20 bp, Human coronavirus
ttgtgacaccatgtaaccaa

SEQ ID NO: 58535 - DNA, 20 bp, Human coronavirus
tgacaccatgtaaccaacca

SEQ ID NO: 58536 - DNA, 20 bp, Human coronavirus
aagccgtatagcaggacgta

SEQ ID NO: 58537 - DNA, 20 bp, Human coronavirus
ggaagatttgttgtttagca

SEQ ID NO: 58538 - DNA, 20 bp, Human coronavirus
gaagatttgttgtttagcaa

SEQ ID NO: 58539 - DNA, 20 bp, Human coronavirus
gttgtttagcaaagttgtta

SEQ ID NO: 58540 - DNA, 20 bp, Human coronavirus
ttgtttagcaaagttgttac

SEQ ID NO: 58541 - DNA, 20 bp, Human coronavirus
accatctcacttcacaattg

SEQ ID NO: 58542 - DNA, 20 bp, Human coronavirus
acaattgagacataattttc

SEQ ID NO: 58543 - DNA, 20 bp, Human coronavirus
agacataattttcaggccat

SEQ ID NO: 58544 - DNA, 20 bp, Human coronavirus
tcaggccatttctaattcaa

SEQ ID NO: 58545 - DNA, 20 bp, Human coronavirus
caggccatttctaattcaat

SEQ ID NO: 58546 - DNA, 20 bp, Human coronavirus
atggcatttatggctatgtt

SEQ ID NO: 58547 - DNA, 20 bp, Human coronavirus
atggctatgttctgcgtcaa

SEQ ID NO: 58548 - DNA, 20 bp, Human coronavirus
tggctatgttctgcgtcaac

SEQ ID NO: 58549 - DNA, 20 bp, Human coronavirus
tgcgtcaacctaacttggtt

SEQ ID NO: 58550 - DNA, 20 bp, Human coronavirus
gttctttattctgataatgg

SEQ ID NO: 58551 - DNA, 20 bp, Human coronavirus
gtgggtttggctcattattt

SEQ ID NO: 58552 - DNA, 20 bp, Human coronavirus
ggctcattatttctgttgtt

SEQ ID NO: 58553 - DNA, 20 bp, Human coronavirus
gctcattatttctgttgttt

SEQ ID NO: 58554 - DNA, 20 bp, Human coronavirus
tttctgttgtttttgttgta

SEQ ID NO: 58555 - DNA, 20 bp, Human coronavirus
ctgttgtttttgttgtattg

SEQ ID NO: 58556 - DNA, 20 bp, Human coronavirus
cagctgaagtactaaatgtc

SEQ ID NO: 58557 - DNA, 20 bp, Human coronavirus
tagaggtttatgtccattta

SEQ ID NO: 58558 - DNA, 20 bp, Human coronavirus
agaggtttatgtccatttac

SEQ ID NO: 58559 - DNA, 20 bp, Human coronavirus
gaggtttatgtccatttacg

SEQ ID NO: 58560 - DNA, 20 bp, Human coronavirus
atgtccatttacgtaactgg

SEQ ID NO: 58561 - DNA, 20 bp, Human coronavirus
acggacataattattactta

SEQ ID NO: 58562 - DNA, 20 bp, Human coronavirus
cggacataattattacttac

SEQ ID NO: 58563 - DNA, 20 bp, Human coronavirus
ttacttaccggtgatggctg

SEQ ID NO: 58564 - DNA, 20 bp, Human coronavirus
cttaccggtgatggctgcac

SEQ ID NO: 58565 - DNA, 20 bp, Human coronavirus
ccggtgatggctgcacctac

SEQ ID NO: 58566 - DNA, 20 bp, Human coronavirus
ggccgatgacagagctgcta

SEQ ID NO: 58567 - DNA, 20 bp, Human coronavirus
cctcctccttcattttacat

SEQ ID NO: 58568 - DNA, 20 bp, Human coronavirus
ctcctccttcattttacatg

SEQ ID NO: 58569 - DNA, 20 bp, Human coronavirus
attttacatgcctcttttgg

SEQ ID NO: 58570 - DNA, 20 bp, Human coronavirus
tacatgcctcttttggttag

SEQ ID NO: 58571 - DNA, 20 bp, Human coronavirus
tttgggttgctaaggaaggt

SEQ ID NO: 58572 - DNA, 20 bp, Human coronavirus
gggttgctaaggaaggtgct

SEQ ID NO: 58573 - DNA, 20 bp, Human coronavirus
ggttgctaaggaaggtgcta

SEQ ID NO: 58574 - DNA, 20 bp, Human coronavirus
ctaaggaaggtgctaaaact

SEQ ID NO: 58575 - DNA, 20 bp, Human coronavirus
ataccagtcttggtaatcgc

SEQ ID NO: 58576 - DNA, 20 bp, Human coronavirus
ttgctgctgttactttggct

SEQ ID NO: 58577 - DNA, 20 bp, Human coronavirus
ctgctgttactttggcttta

SEQ ID NO: 58578 - DNA, 20 bp, Human coronavirus
ctttggctttaaagaactta

SEQ ID NO: 58579 - DNA, 20 bp, Human coronavirus
ggctttaaagaacttaggtt

SEQ ID NO: 58580 - DNA, 20 bp, Human coronavirus
gctttaaagaacttaggttt

SEQ ID NO: 58581 - DNA, 20 bp, Human coronavirus
ctgaattgattcctaatcag

SEQ ID NO: 58582 - DNA, 20 bp, Human coronavirus
attcctaatcaggctgcgtt

SEQ ID NO: 58583 - DNA, 20 bp, Human coronavirus
ctaatcaggctgcgttattc

SEQ ID NO: 58584 - DNA, 20 bp, Human coronavirus
ttctttgatagtgaggttag

SEQ ID NO: 58585 - DNA, 20 bp, Human coronavirus
tttgatagtgaggttagcac

SEQ ID NO: 58586 - DNA, 20 bp, Human papillomavirus
gcctattggagtttgtttta

SEQ ID NO: 58587 - DNA, 20 bp, Human papillomavirus
gagtttgttttatattatca

SEQ ID NO: 58588 - DNA, 20 bp, Human papillomavirus
gttttatattatcaggagtc

SEQ ID NO: 58589 - DNA, 20 bp, Human papillomavirus
ttttatattatcaggagtct

SEQ ID NO: 58590 - DNA, 20 bp, Human papillomavirus
tatattatcaggagtcttat

SEQ ID NO: 58591 - DNA, 20 bp, Human papillomavirus
tgaggaaacgttagaggaaa

SEQ ID NO: 58592 - DNA, 20 bp, Human papillomavirus
gaggaaacctcacttggtga

SEQ ID NO: 58593 - DNA, 20 bp, Human papillomavirus
gtgacctagataatgtttct

SEQ ID NO: 58594 - DNA, 20 bp, Human papillomavirus
cttgtgttagcgacttatct

SEQ ID NO: 58595 - DNA, 20 bp, Human papillomavirus
ttgtgttagcgacttatctg

SEQ ID NO: 58596 - DNA, 20 bp, Human papillomavirus
tacagacctgacgcggtcgt

SEQ ID NO: 58597 - DNA, 20 bp, Human papillomavirus
acagacctgacgcggtcgta

SEQ ID NO: 58598 - DNA, 20 bp, Human papillomavirus
cagacctgacgcggtcgtac

SEQ ID NO: 58599 - DNA, 20 bp, Human papillomavirus
tggagattgggttttggcag

SEQ ID NO: 58600 - DNA, 20 bp, Human papillomavirus
ggttttggcagtttggggtg

SEQ ID NO: 58601 - DNA, 20 bp, Human papillomavirus
ttttggtataaaagatctat

SEQ ID NO: 58602 - DNA, 20 bp, Human papillomavirus
tggtataaaagatctatgtc

SEQ ID NO: 58603 - DNA, 20 bp, Human papillomavirus
ggtataaaagatctatgtct

SEQ ID NO: 58604 - DNA, 20 bp, Human papillomavirus
gtataaaagatctatgtctt

SEQ ID NO: 58605 - DNA, 20 bp, Human papillomavirus
aactgtttttacatggggta

SEQ ID NO: 58606 - DNA, 20 bp, Human papillomavirus
agcagtggaatctaattaga

SEQ ID NO: 58607 - DNA, 20 bp, Human papillomavirus
gacaagaacaagttcttttc

SEQ ID NO: 58608 - DNA, 20 bp, Human papillomavirus
ttttccatttcgccagaaaa

SEQ ID NO: 58609 - DNA, 20 bp, Human papillomavirus
tccatttcgccagaaaaaat

SEQ ID NO: 58610 - DNA, 20 bp, Human papillomavirus
ccatttcgccagaaaaaatg

SEQ ID NO: 58611 - DNA, 20 bp, Human papillomavirus
aagaagagtggcagcacact

SEQ ID NO: 58612 - DNA, 20 bp, Human papillomavirus
aggttacctatgacaataac

SEQ ID NO: 58613 - DNA, 20 bp, Human papillomavirus
cctatgacaataaccctgat

SEQ ID NO: 58614 - DNA, 20 bp, Human papillomavirus
caaattgtgtgccttgtctg

SEQ ID NO: 58615 - DNA, 20 bp, Human papillomavirus
tgtgccttgtctgattatca

SEQ ID NO: 58616 - DNA, 20 bp, Human papillomavirus
ggtgtagtcgatggacgtcg

SEQ ID NO: 58617 - DNA, 20 bp, Human papillomavirus
ctgggcggtgtcactctcgg

SEQ ID NO: 58618 - DNA, 20 bp, Human papillomavirus
gtaaagtttattgatgaggc

SEQ ID NO: 58619 - DNA, 20 bp, Human papillomavirus
attgatgaggctcaacgaga

SEQ ID NO: 58620 - DNA, 20 bp, Human papillomavirus
ttgatgaggctcaacgagag

SEQ ID NO: 58621 - DNA, 20 bp, Human papillomavirus
atgaggctcaacgagagaag

SEQ ID NO: 58622 - DNA, 20 bp, Human papillomavirus
cttgagagagttgctttgcc

SEQ ID NO: 58623 - DNA, 20 bp, Human papillomavirus
aaaataaaattgagcataca

SEQ ID NO: 58624 - DNA, 20 bp, Human papillomavirus
agcatacaacaattgctgat

SEQ ID NO: 58625 - DNA, 20 bp, Human papillomavirus
ctgataaaatattgcaatat

SEQ ID NO: 58626 - DNA, 20 bp, Human papillomavirus
caatatggcagtctgggagt

SEQ ID NO: 58627 - DNA, 20 bp, Human papillomavirus
ttttgggaggtttgggcatt

SEQ ID NO: 58628 - DNA, 20 bp, Human papillomavirus
tagatcctacaggccctgct

SEQ ID NO: 58629 - DNA, 20 bp, Human papillomavirus
ttcccctacaagatttaggt

SEQ ID NO: 58630 - DNA, 20 bp, Human papillomavirus
ccctacaagatttaggtaga

SEQ ID NO: 58631 - DNA, 20 bp, Human papillomavirus
aggtagagacttcccaatac

SEQ ID NO: 58632 - DNA, 20 bp, Human papillomavirus
ggtagagacttcccaatacc

SEQ ID NO: 58633 - DNA, 20 bp, Human papillomavirus
tatttgttagcaatggttca

SEQ ID NO: 58634 - DNA, 20 bp, Human papillomavirus
gttagcaatggttcaggtga

SEQ ID NO: 58635 - DNA, 20 bp, Human papillomavirus
ttagcaatggttcaggtgac

SEQ ID NO: 58636 - DNA, 20 bp, Human papillomavirus
gcaatggttcaggtgacagg

SEQ ID NO: 58637 - DNA, 20 bp, Human papillomavirus
aggtgacagggtggtgggcg

SEQ ID NO: 58638 - DNA, 20 bp, Human papillomavirus
atgaggtgtctattatcttc

SEQ ID NO: 58639 - DNA, 20 bp, Human papillomavirus
tcttccaaagagacttagat

SEQ ID NO: 58640 - DNA, 20 bp, Human papillomavirus
caaagagacttagatgctct

SEQ ID NO: 58641 - DNA, 20 bp, Human papillomavirus
gatgctcttgctcagacacc

SEQ ID NO: 58642 - DNA, 20 bp, Human papillomavirus
ctcagacaccagtgcctgaa

SEQ ID NO: 58643 - DNA, 20 bp, Human papillomavirus
aattattgcctttaggtgag

SEQ ID NO: 58644 - DNA, 20 bp, Human papillomavirus
ttgcctttaggtgagcatag

SEQ ID NO: 58645 - DNA, 20 bp, Human papillomavirus
cctttaggtgagcatagtca

SEQ ID NO: 58646 - DNA, 20 bp, Human papillomavirus
aggtgagcatagtcaaacaa

SEQ ID NO: 58647 - DNA, 20 bp, Human papillomavirus
ggtgagcatagtcaaacaac

SEQ ID NO: 58648 - DNA, 20 bp, Human papillomavirus
taccatgcaacatctgaacg

SEQ ID NO: 58649 - DNA, 20 bp, Human papillomavirus
gtttgagatctccagtaatc

SEQ ID NO: 58650 - DNA, 20 bp, Human papillomavirus
tttgagatctccagtaatca

SEQ ID NO: 58651 - DNA, 20 bp, Human papillomavirus
attactggagatctcaaaca

SEQ ID NO: 58652 - DNA, 20 bp, Human papillomavirus
ctggagatctcaaacaaagg

SEQ ID NO: 58653 - DNA, 20 bp, Human papillomavirus
gatgatgcagaaaatccaac

SEQ ID NO: 58654 - DNA, 20 bp, Human papillomavirus
tattaatactcatgcaaatg

SEQ ID NO: 58655 - DNA, 20 bp, Human papillomavirus
atactcatgcaaatggagat

SEQ ID NO: 58656 - DNA, 20 bp, Human papillomavirus
tagacaaaatactgcttttg

SEQ ID NO: 58657 - DNA, 20 bp, Human papillomavirus
tgatgcaaaacagacacaaa

SEQ ID NO: 58658 - DNA, 20 bp, Human papillomavirus
ctgctttacagcaagacaag

SEQ ID NO: 58659 - DNA, 20 bp, Human papillomavirus
acagcaagacaagtctgatg

SEQ ID NO: 58660 - DNA, 20 bp, Human papillomavirus
cagcaagacaagtctgatgt

SEQ ID NO: 58661 - DNA, 20 bp, Human papillomavirus
agatgttgttcaagcaacat

SEQ ID NO: 58662 - DNA, 20 bp, Human papillomavirus
gatgttgttcaagcaacatg

SEQ ID NO: 58663 - DNA, 20 bp, Human papillomavirus
catctgatgtccaattgttt

SEQ ID NO: 58664 - DNA, 20 bp, Human papillomavirus
atctgatgtccaattgttta

SEQ ID NO: 58665 - DNA, 20 bp, Human papillomavirus
tttaatagatcttactggct

SEQ ID NO: 58666 - DNA, 20 bp, Human papillomavirus
aatagatcttactggcttca

SEQ ID NO: 58667 - DNA, 20 bp, Human papillomavirus
atagatcttactggcttcag

SEQ ID NO: 58668 - DNA, 20 bp, Human papillomavirus
ctgcaatatgcaataaaagt

SEQ ID NO: 58669 - DNA, 20 bp, Human papillomavirus
ctttttgttaatccctccct

SEQ ID NO: 58670 - DNA, 20 bp, Human papillomavirus
tttttgttaatccctcccta

SEQ ID NO: 58671 - DNA, 20 bp, Human papillomavirus
ttgttaatccctccctactc

SEQ ID NO: 58672 - DNA, 20 bp, Human papillomavirus
tgttaatccctccctactcc

SEQ ID NO: 58673 - DNA, 20 bp, Human papillomavirus
gcccaaagacggtttgccaa

SEQ ID NO: 58674 - DNA, 20 bp, Human papillomavirus
cccaaagacggtttgccaac

SEQ ID NO: 58675 - DNA, 20 bp, Human papillomavirus
gccaaccgcggttaggactt

SEQ ID NO: 58676 - DNA, 20 bp, Human papillomavirus
ccaaccgcggttaggacttg

SEQ ID NO: 58677 - DNA, 20 bp, Human papillomavirus
ggacttgtttcaatttgctg

SEQ ID NO: 58678 - DNA, 20 bp, Human papillomavirus type 204
acttgtgcagcagatctgct

SEQ ID NO: 58679 - DNA, 20 bp, Human papillomavirus type 204
tgcagcagatctgctctcca

SEQ ID NO: 58680 - DNA, 20 bp, Human papillomavirus type 204
ttgattgtttatttttgtgt

SEQ ID NO: 58681 - DNA, 20 bp, Human papillomavirus type 204
tgattgtttatttttgtgtg

SEQ ID NO: 58682 - DNA, 20 bp, Human papillomavirus type 204
gattgtttatttttgtgtga

SEQ ID NO: 58683 - DNA, 20 bp, Human papillomavirus type 204
aatagatgaggcaccacaaa

SEQ ID NO: 58684 - DNA, 20 bp, Human papillomavirus type 204
atagatgaggcaccacaaag

SEQ ID NO: 58685 - DNA, 20 bp, Human papillomavirus type 204
cctggaattgttccaccaac

SEQ ID NO: 58686 - DNA, 20 bp, Human papillomavirus type 204
ttccaccaacaggaaagctt

SEQ ID NO: 58687 - DNA, 20 bp, Human papillomavirus type 204
caccaacaggaaagcttgga

SEQ ID NO: 58688 - DNA, 20 bp, Human papillomavirus type 204
tcgttgccaaatgaagttga

SEQ ID NO: 58689 - DNA, 20 bp, Human papillomavirus type 204
ccaaatgaagttgacactga

SEQ ID NO: 58690 - DNA, 20 bp, Human papillomavirus type 204
acactgatgttacggagagt

SEQ ID NO: 58691 - DNA, 20 bp, Human papillomavirus type 204
cggagagtcaaacccaggta

SEQ ID NO: 58692 - DNA, 20 bp, Human papillomavirus type 204
cattcagtttctacctgggt

SEQ ID NO: 58693 - DNA, 20 bp, Human papillomavirus type 204
gtttaaatgtacaatttcaa

SEQ ID NO: 58694 - DNA, 20 bp, Human papillomavirus type 204
aaatgtacaatttcaaaatt

SEQ ID NO: 58695 - DNA, 20 bp, Human papillomavirus type 204
aatgtacaatttcaaaattg

SEQ ID NO: 58696 - DNA, 20 bp, Human papillomavirus type 204
caaaattgacattcacatat

SEQ ID NO: 58697 - DNA, 20 bp, Human papillomavirus type 204
aaaattgacattcacatatg

SEQ ID NO: 58698 - DNA, 20 bp, Human papillomavirus type 204
ttggttgcagcccttatcag

SEQ ID NO: 58699 - DNA, 20 bp, Human papillomavirus type 204
tggttgcagcccttatcaga

SEQ ID NO: 58700 - DNA, 20 bp, Human papillomavirus type 204
ggttgcagcccttatcagat

SEQ ID NO: 58701 - DNA, 20 bp, Human papillomavirus type 204
gttgcagcccttatcagata

SEQ ID NO: 58702 - DNA, 20 bp, Human papillomavirus type 204
cagcccttatcagatacaaa

SEQ ID NO: 58703 - DNA, 20 bp, Human papillomavirus type 204
aagatcaaataacacattgg

SEQ ID NO: 58704 - DNA, 20 bp, Human papillomavirus type 204
gaccttaataaaacaagagc

SEQ ID NO: 58705 - DNA, 20 bp, Human papillomavirus type 204
ataaaacaagagcaagtgct

SEQ ID NO: 58706 - DNA, 20 bp, Human papillomavirus type 204
ttcactatgctcgacaaaat

SEQ ID NO: 58707 - DNA, 20 bp, Human papillomavirus type 204
tcactatgctcgacaaaatg

SEQ ID NO: 58708 - DNA, 20 bp, Human papillomavirus type 204
ggtgtcttcttcggtggtct

SEQ ID NO: 58709 - DNA, 20 bp, Human papillomavirus type 204
ttcggtggtcttggtattgg

SEQ ID NO: 58710 - DNA, 20 bp, Human papillomavirus type 204
ggtggtcttggtattggaac

SEQ ID NO: 58711 - DNA, 20 bp, Human papillomavirus type 204
gtattggaactggtagagga

SEQ ID NO: 58712 - DNA, 20 bp, Human papillomavirus type 204
gaactggtagaggatctggt

SEQ ID NO: 58713 - DNA, 20 bp, Human papillomavirus type 204
accctgcttctgatcttcct

SEQ ID NO: 58714 - DNA, 20 bp, Human papillomavirus type 204
tgatcttcctacatctacta

SEQ ID NO: 58715 - DNA, 20 bp, Human papillomavirus type 204
ctacatctactacaataggg

SEQ ID NO: 58716 - DNA, 20 bp, Human papillomavirus type 204
attttgggtcacccctattg

SEQ ID NO: 58717 - DNA, 20 bp, Human papillomavirus type 204
tgggtcacccctattgtagt

SEQ ID NO: 58718 - DNA, 20 bp, Human papillomavirus type 204
ttgaatttcatagtgggcgt

SEQ ID NO: 58719 - DNA, 20 bp, Human papillomavirus type 204
aatttcatagtgggcgtgca

SEQ ID NO: 58720 - DNA, 20 bp, Human papillomavirus type 204
catagtgggcgtgcatccag

SEQ ID NO: 58721 - DNA, 20 bp, Human papillomavirus type 204
atagtgggcgtgcatccagc

SEQ ID NO: 58722 - DNA, 20 bp, Human papillomavirus type 204
gacacagatattgtagcaga

SEQ ID NO: 58723 - DNA, 20 bp, Human papillomavirus type 204
aatagatttgatgatgtgga

SEQ ID NO: 58724 - DNA, 20 bp, Human papillomavirus type 204
atagatttgatgatgtggaa

SEQ ID NO: 58725 - DNA, 20 bp, Human papillomavirus type 204
gatgatgtggaaaatcctgc

SEQ ID NO: 58726 - DNA, 20 bp, Human papillomavirus type 204
atgatgtggaaaatcctgct

SEQ ID NO: 58727 - DNA, 20 bp, Human papillomavirus type 204
gatcctaaacaaacacaagt

SEQ ID NO: 58728 - DNA, 20 bp, Human papillomavirus type 204
tggaaatttggattttaggc

SEQ ID NO: 58729 - DNA, 20 bp, Human papillomavirus type 204
ggaaatttggattttaggcg

SEQ ID NO: 58730 - DNA, 20 bp, Human papillomavirus type 204
gaaatttggattttaggcga

SEQ ID NO: 58731 - DNA, 20 bp, Human papillomavirus type 204
ggattttaggcgattacaag

SEQ ID NO: 58732 - DNA, 20 bp, Human papillomavirus type 204
gattttaggcgattacaagg

SEQ ID NO: 58733 - DNA, 20 bp, Human papillomavirus type 204
ctacagacaattattttgct

SEQ ID NO: 58734 - DNA, 20 bp, Human papillomavirus type 204
ttttgctgttcccagtggtt

SEQ ID NO: 58735 - DNA, 20 bp, Human papillomavirus type 204
tgctgttcccagtggttctc

SEQ ID NO: 58736 - DNA, 20 bp, Human papillomavirus type 204
gctgttcccagtggttctct

SEQ ID NO: 58737 - DNA, 20 bp, Human papillomavirus type 204
ctgttcccagtggttctctc

SEQ ID NO: 58738 - DNA, 20 bp, Human papillomavirus type 204
agtacggtatgtatatccct

SEQ ID NO: 58739 - DNA, 20 bp, Human papillomavirus type 204
taaacatctcagacaagttg

SEQ ID NO: 58740 - DNA, 20 bp, Human papillomavirus type 204
tagcatcctttttggcagca

SEQ ID NO: 58741 - DNA, 20 bp, Human papillomavirus type 204
ttggcagcatcgtttggcag

SEQ ID NO: 58742 - DNA, 20 bp, Human papillomavirus type 204
tggcagcatcgtttggcagc

SEQ ID NO: 58743 - DNA, 20 bp, Influenza B virus
aggtgggtccgggagcaacc

SEQ ID NO: 58744 - DNA, 20 bp, Influenza B virus
gaagcaggaattctggagtg

SEQ ID NO: 58745 - DNA, 20 bp, Influenza B virus
aagcaggaattctggagtgc

SEQ ID NO: 58746 - DNA, 20 bp, Influenza B virus
tggagtgctatgaaaggttt

SEQ ID NO: 58747 - DNA, 20 bp, Influenza B virus
tcatggcaaagagcccttga

SEQ ID NO: 58748 - DNA, 20 bp, Influenza B virus
tgtttatggatccctctgct

SEQ ID NO: 58749 - DNA, 20 bp, Influenza B virus
atggatccctctgctggaat

SEQ ID NO: 58750 - DNA, 20 bp, Influenza B virus
tggatccctctgctggaatt

SEQ ID NO: 58751 - DNA, 20 bp, Influenza B virus
aagggtttgagccatactgt

SEQ ID NO: 58752 - DNA, 20 bp, Influenza B virus
gagccatactgtgtgaaaaa

SEQ ID NO: 58753 - DNA, 20 bp, Influenza B virus
tccttgagagtgttggtgaa

SEQ ID NO: 58754 - DNA, 20 bp, Influenza B virus
agagtgttggtgaacggaac

SEQ ID NO: 58755 - DNA, 20 bp, Influenza B virus
gtgaacggaaccttcctcaa

SEQ ID NO: 58756 - DNA, 20 bp, Influenza B virus
ctcaagcaccctaatggaga

SEQ ID NO: 58757 - DNA, 20 bp, Influenza B virus
tcaactcttcatagattgaa

SEQ ID NO: 58758 - DNA, 20 bp, Influenza B virus
aaagccaattcgagcagctg

SEQ ID NO: 58759 - DNA, 20 bp, Influenza B virus
gagcagctgaaactgcggtg

SEQ ID NO: 58760 - DNA, 20 bp, Influenza B virus
tcccaatttggtcaagagca

SEQ ID NO: 58761 - DNA, 20 bp, Influenza B virus
ggtcaagagcaccgattatc

SEQ ID NO: 58762 - DNA, 20 bp, Influenza B virus
gtcaagagcaccgattatca

SEQ ID NO: 58763 - DNA, 20 bp, Hepatitis A virus
atacctcaccgccgtttgcc

SEQ ID NO: 58764 - DNA, 20 bp, Hepatitis A virus
gcctaggctataggctaaat

SEQ ID NO: 58765 - DNA, 20 bp, Hepatitis A virus
cctaggctataggctaaatt

SEQ ID NO: 58766 - DNA, 20 bp, Hepatitis A virus
tccctttcccttttcccttt

SEQ ID NO: 58767 - DNA, 20 bp, Hepatitis A virus
ccctttcccttttccctttc

SEQ ID NO: 58768 - DNA, 20 bp, Hepatitis A virus
gggacacagatgtttggaac

SEQ ID NO: 58769 - DNA, 20 bp, Hepatitis A virus
ggaacgtcaccttgcagtgt

SEQ ID NO: 58770 - DNA, 20 bp, Hepatitis A virus
gaacgtcaccttgcagtgtt

SEQ ID NO: 58771 - DNA, 20 bp, Hepatitis A virus
cagtgttaacttggctttca

SEQ ID NO: 58772 - DNA, 20 bp, Hepatitis A virus
acttggctttcatgaatctc

SEQ ID NO: 58773 - DNA, 20 bp, Hepatitis A virus
ggcagacattgaggaagagc

SEQ ID NO: 58774 - DNA, 20 bp, Hepatitis A virus
gcagacattgaggaagagca

SEQ ID NO: 58775 - DNA, 20 bp, Hepatitis A virus
aggaagagcaaatgattcaa

SEQ ID NO: 58776 - DNA, 20 bp, Hepatitis A virus
aatcagttgataggactgca

SEQ ID NO: 58777 - DNA, 20 bp, Hepatitis A virus
ataggactgcagtgactggt

SEQ ID NO: 58778 - DNA, 20 bp, Hepatitis A virus
gctgttcaagggttgttgag

SEQ ID NO: 58779 - DNA, 20 bp, Hepatitis A virus
ctgttcaagggttgttgaga

SEQ ID NO: 58780 - DNA, 20 bp, Hepatitis A virus
aagggttgttgagataccat

SEQ ID NO: 58781 - DNA, 20 bp, Hepatitis A virus
ttgagataccatacatatgc

SEQ ID NO: 58782 - DNA, 20 bp, Hepatitis A virus
agataccatacatatgcaag

SEQ ID NO: 58783 - DNA, 20 bp, Hepatitis A virus
ccactttaaagatccacaat

SEQ ID NO: 58784 - DNA, 20 bp, Hepatitis A virus
aaagatccacaatacccagt

SEQ ID NO: 58785 - DNA, 20 bp, Hepatitis A virus
aagatccacaatacccagtt

SEQ ID NO: 58786 - DNA, 20 bp, Hepatitis A virus
gggaattgacaattagagtt

SEQ ID NO: 58787 - DNA, 20 bp, Hepatitis A virus
ggaattgacaattagagttt

SEQ ID NO: 58788 - DNA, 20 bp, Hepatitis A virus
ggatcaggaagattggaaat

SEQ ID NO: 58789 - DNA, 20 bp, Hepatitis A virus
gatcaggaagattggaaatc

SEQ ID NO: 58790 - DNA, 20 bp, Hepatitis A virus
gaaatctgatccgtcccagg

SEQ ID NO: 58791 - DNA, 20 bp, Hepatitis A virus
ctcattttactacttggaca

SEQ ID NO: 58792 - DNA, 20 bp, Hepatitis A virus
tactacttggacatctattc

SEQ ID NO: 58793 - DNA, 20 bp, Hepatitis A virus
ttcccaccaaatatcattca

SEQ ID NO: 58794 - DNA, 20 bp, Hepatitis A virus
tcccaccaaatatcattcag

SEQ ID NO: 58795 - DNA, 20 bp, Hepatitis A virus
cccaccaaatatcattcagg

SEQ ID NO: 58796 - DNA, 20 bp, Hepatitis A virus
ccaccaaatatcattcaggt

SEQ ID NO: 58797 - DNA, 20 bp, Hepatitis A virus
aggtagattactgttttgtt

SEQ ID NO: 58798 - DNA, 20 bp, Hepatitis A virus
ggaagcttattgtgtattgt

SEQ ID NO: 58799 - DNA, 20 bp, Hepatitis A virus
ttgtgtattgttataacaga

SEQ ID NO: 58800 - DNA, 20 bp, Hepatitis A virus
tgtattgttataacagattg

SEQ ID NO: 58801 - DNA, 20 bp, Hepatitis A virus
ttataacagattgacctctc

SEQ ID NO: 58802 - DNA, 20 bp, Hepatitis A virus
taacagattgacctctcctt

SEQ ID NO: 58803 - DNA, 20 bp, Hepatitis A virus
caggagtacaagcacctgtg

SEQ ID NO: 58804 - DNA, 20 bp, Hepatitis A virus
aggagtacaagcacctgtgg

SEQ ID NO: 58805 - DNA, 20 bp, Hepatitis A virus
aggatccagttttagcaaag

SEQ ID NO: 58806 - DNA, 20 bp, Hepatitis A virus
tagcaaagaaagtacctgag

SEQ ID NO: 58807 - DNA, 20 bp, Hepatitis A virus
agcaaagaaagtacctgaga

SEQ ID NO: 58808 - DNA, 20 bp, Hepatitis A virus
gccatcaacactgaggtggt

SEQ ID NO: 58809 - DNA, 20 bp, Hepatitis A virus
ccatcaacactgaggtggtt

SEQ ID NO: 58810 - DNA, 20 bp, Hepatitis A virus
ttcaacttgtttcagttgta

SEQ ID NO: 58811 - DNA, 20 bp, Hepatitis A virus
tcaacttgtttcagttgtat

SEQ ID NO: 58812 - DNA, 20 bp, Hepatitis A virus
caacttgtttcagttgtata

SEQ ID NO: 58813 - DNA, 20 bp, Hepatitis A virus
gagagtcatatagaatgcag

SEQ ID NO: 58814 - DNA, 20 bp, Hepatitis A virus
agagtcatatagaatgcagg

SEQ ID NO: 58815 - DNA, 20 bp, Hepatitis A virus
gaagttgggaaacaaagact

SEQ ID NO: 58816 - DNA, 20 bp, Hepatitis A virus
ggaaacaaagactcaagtat

SEQ ID NO: 58817 - DNA, 20 bp, Hepatitis A virus
atttgacaattcttcctgag

SEQ ID NO: 58818 - DNA, 20 bp, Hepatitis A virus
aaggaggtttggattctctt

SEQ ID NO: 58819 - DNA, 20 bp, Hepatitis A virus
aggaggtttggattctcttt

SEQ ID NO: 58820 - DNA, 20 bp, Hepatitis A virus
ggattctctttggccgcagg

SEQ ID NO: 58821 - DNA, 20 bp, Hepatitis A virus
gattctctttggccgcaggc

SEQ ID NO: 58822 - DNA, 20 bp, Hepatitis A virus
tctttggccgcaggcagaag

SEQ ID NO: 58823 - DNA, 20 bp, Hepatitis A virus
gcatcattgatgatattggc

SEQ ID NO: 58824 - DNA, 20 bp, Hepatitis A virus
catcattgatgatattggcc

SEQ ID NO: 58825 - DNA, 20 bp, Hepatitis A virus
atgatattggccaaaacaca

SEQ ID NO: 58826 - DNA, 20 bp, Hepatitis A virus
gccaaaacacaacagatgag

SEQ ID NO: 58827 - DNA, 20 bp, Hepatitis A virus
gtcagatttttgtcagttag

SEQ ID NO: 58828 - DNA, 20 bp, Hepatitis A virus
tctggctttttccaatctgt

SEQ ID NO: 58829 - DNA, 20 bp, Hepatitis A virus
ttccaatctgttactaatca

SEQ ID NO: 58830 - DNA, 20 bp, Hepatitis A virus
tccaatctgttactaatcac

SEQ ID NO: 58831 - DNA, 20 bp, Hepatitis A virus
ccaatctgttactaatcaca

SEQ ID NO: 58832 - DNA, 20 bp, Hepatitis A virus
caatctgttactaatcacaa

SEQ ID NO: 58833 - DNA, 20 bp, Hepatitis A virus
ggaagaacttggttcagttt

SEQ ID NO: 58834 - DNA, 20 bp, Hepatitis A virus
gttcagtttggagttggaga

SEQ ID NO: 58835 - DNA, 20 bp, Hepatitis A virus
agtttggagttggagagaag

SEQ ID NO: 58836 - DNA, 20 bp, Hepatitis A virus
ggagttggagagaagaatgg

SEQ ID NO: 58837 - DNA, 20 bp, Hepatitis A virus
gagttggagagaagaatgga

SEQ ID NO: 58838 - DNA, 20 bp, Hepatitis A virus
gtttcatcgaatcaatctat

SEQ ID NO: 58839 - DNA, 20 bp, Hepatitis A virus
catcgaatcaatctatacag

SEQ ID NO: 58840 - DNA, 20 bp, Hepatitis A virus
atcgaatcaatctatacaga

SEQ ID NO: 58841 - DNA, 20 bp, Hepatitis A virus
ggcatccatgttgctggagg

SEQ ID NO: 58842 - DNA, 20 bp, Hepatitis A virus
ctggaggaaattcaattctt

SEQ ID NO: 58843 - DNA, 20 bp, Hepatitis A virus
attttcctgcagctatgccc

SEQ ID NO: 58844 - DNA, 20 bp, Hepatitis A virus
tcctgcagctatgccctttt

SEQ ID NO: 58845 - DNA, 20 bp, Hepatitis A virus
cctgcagctatgcccttttc

SEQ ID NO: 58846 - DNA, 20 bp, Hepatitis A virus
ctgcagctatgcccttttct

SEQ ID NO: 58847 - DNA, 20 bp, Hepatitis A virus
tctaaagctgaaattgatcc

SEQ ID NO: 58848 - DNA, 20 bp, Hepatitis A virus
accaaaagagatttaatttg

SEQ ID NO: 58849 - DNA, 20 bp, Hepatitis A virus
aatttggttggatgaaaatg

SEQ ID NO: 58850 - DNA, 20 bp, Hepatitis A virus
atttggttggatgaaaatgg

SEQ ID NO: 58851 - DNA, 20 bp, Hepatitis A virus
ggttggatgaaaatggttta

SEQ ID NO: 58852 - DNA, 20 bp, Hepatitis A virus
gttggatgaaaatggtttat

SEQ ID NO: 58853 - DNA, 20 bp, Hepatitis A virus
gggtccagctattagttatt

SEQ ID NO: 58854 - DNA, 20 bp, Hepatitis A virus
gttattttcatttgaatcca

SEQ ID NO: 58855 - DNA, 20 bp, Hepatitis A virus
ttttcatttgaatccaggtt

SEQ ID NO: 58856 - DNA, 20 bp, Hepatitis A virus
tcatttgaatccaggtttcc

SEQ ID NO: 58857 - DNA, 20 bp, Hepatitis A virus
catttgaatccaggtttcca

SEQ ID NO: 58858 - DNA, 20 bp, Influenza A virus
tcgctcaaaaacttcccgga

SEQ ID NO: 58859 - DNA, 20 bp, Influenza A virus
cgctcaaaaacttcccggaa

SEQ ID NO: 58860 - DNA, 20 bp, Influenza A virus
gctcaaaaacttcccggaaa

SEQ ID NO: 58861 - DNA, 20 bp, Influenza A virus
ccggaaatgacaacagcacg

SEQ ID NO: 58862 - DNA, 20 bp, Influenza A virus
ggcaccatgcagtaccaaac

SEQ ID NO: 58863 - DNA, 20 bp, Influenza A virus
caaaataagaaatgggacct

SEQ ID NO: 58864 - DNA, 20 bp, Influenza A virus
ttgttgaacgcagcaaagcc

SEQ ID NO: 58865 - DNA, 20 bp, Influenza A virus
tgttgaacgcagcaaagcct

SEQ ID NO: 58866 - DNA, 20 bp, Influenza A virus
gttgaacgcagcaaagccta

SEQ ID NO: 58867 - DNA, 20 bp, Influenza A virus
ttgaacgcagcaaagcctac

SEQ ID NO: 58868 - DNA, 20 bp, Influenza A virus
aacgtgactatgccaaacaa

SEQ ID NO: 58869 - DNA, 20 bp, Influenza A virus
gacaaactgtacatttgggg

SEQ ID NO: 58870 - DNA, 20 bp, Influenza A virus
acaaactgtacatttggggg

SEQ ID NO: 58871 - DNA, 20 bp, Influenza A virus
ggggggttcaccacccgggt

SEQ ID NO: 58872 - DNA, 20 bp, Influenza A virus
gggggttcaccacccgggta

SEQ ID NO: 58873 - DNA, 20 bp, Influenza A virus
ctcctcggggttacttcaaa

SEQ ID NO: 58874 - DNA, 20 bp, Influenza A virus
cttcaaaatacgaagtggga

SEQ ID NO: 58875 - DNA, 20 bp, Influenza A virus
aaaatacgaagtgggaaaag

SEQ ID NO: 58876 - DNA, 20 bp, Influenza A virus
gcaaatgcaattctgaatgc

SEQ ID NO: 58877 - DNA, 20 bp, Influenza A virus
tgaatgcatcactccaaatg

SEQ ID NO: 58878 - DNA, 20 bp, Influenza A virus
ggcgcaatcgcgggtttcat

SEQ ID NO: 58879 - DNA, 20 bp, Influenza A virus
gcgcaatcgcgggtttcata

SEQ ID NO: 58880 - DNA, 20 bp, Influenza A virus
catagaaaatggttgggagg

SEQ ID NO: 58881 - DNA, 20 bp, Influenza A virus
atagaaaatggttgggaggg

SEQ ID NO: 58882 - DNA, 20 bp, Influenza A virus
ggagggaatggtagacggtt

SEQ ID NO: 58883 - DNA, 20 bp, Influenza A virus
aggacactaaaatagatctc

SEQ ID NO: 58884 - DNA, 20 bp, Influenza A virus
ttgtggccctggagaaccaa

SEQ ID NO: 58885 - DNA, 20 bp, Influenza A virus
tggccctggagaaccaacat

SEQ ID NO: 58886 - DNA, 20 bp, Influenza A virus
gatcaattgtatgttggttc

SEQ ID NO: 58887 - DNA, 20 bp, Influenza A virus
tatgttggttctccagggcc

SEQ ID NO: 58888 - DNA, 20 bp, Influenza A virus
cagatcaaaggtgttgagtt

SEQ ID NO: 58889 - DNA, 20 bp, Influenza A virus
agttgaagtcaggatacaaa

SEQ ID NO: 58890 - DNA, 20 bp, Influenza A virus
aagtcaggatacaaagattg

SEQ ID NO: 58891 - DNA, 20 bp, Influenza A virus
gatcctatggatttcctttg

SEQ ID NO: 58892 - DNA, 20 bp, Influenza A virus
cctttgccatatcatgtttt

SEQ ID NO: 58893 - DNA, 20 bp, Human papillomavirus type 96
ctaggacattttatatacag

SEQ ID NO: 58894 - DNA, 20 bp, Human papillomavirus type 96
taggacattttatatacaga

SEQ ID NO: 58895 - DNA, 20 bp, Human papillomavirus type 96
tatatacagacatacagatc

SEQ ID NO: 58896 - DNA, 20 bp, Human papillomavirus type 96
atatacagacatacagatct

SEQ ID NO: 58897 - DNA, 20 bp, Human papillomavirus type 96
tatacagacatacagatctc

SEQ ID NO: 58898 - DNA, 20 bp, Human papillomavirus type 96
gaacatttttatgaaaaaac

SEQ ID NO: 58899 - DNA, 20 bp, Human papillomavirus type 96
aacatttttatgaaaaaaca

SEQ ID NO: 58900 - DNA, 20 bp, Human papillomavirus type 96
ttatgaaaaaacagtcaagg

SEQ ID NO: 58901 - DNA, 20 bp, Human papillomavirus type 96
tatgaaaaaacagtcaaggg

SEQ ID NO: 58902 - DNA, 20 bp, Human papillomavirus type 96
atgaaaaaacagtcaaggga

SEQ ID NO: 58903 - DNA, 20 bp, Human papillomavirus type 96
tcctgcccattgacctgcat

SEQ ID NO: 58904 - DNA, 20 bp, Human papillomavirus type 96
acctgcattgtgacgaagag

SEQ ID NO: 58905 - DNA, 20 bp, Human papillomavirus type 96
tgacgaagagttgacagaag

SEQ ID NO: 58906 - DNA, 20 bp, Human papillomavirus type 96
acagaagagcagtcagaaaa

SEQ ID NO: 58907 - DNA, 20 bp, Human papillomavirus type 96
tgacaggttttctgactgct

SEQ ID NO: 58908 - DNA, 20 bp, Human papillomavirus type 96
cagaaatggcagataataga

SEQ ID NO: 58909 - DNA, 20 bp, Human papillomavirus type 96
atcctaaagaagggtgtagt

SEQ ID NO: 58910 - DNA, 20 bp, Human papillomavirus type 96
gttttctcttgaagcagact

SEQ ID NO: 58911 - DNA, 20 bp, Human papillomavirus type 96
tctcttgaagcagactgtag

SEQ ID NO: 58912 - DNA, 20 bp, Human papillomavirus type 96
ctcttgaagcagactgtagt

SEQ ID NO: 58913 - DNA, 20 bp, Human papillomavirus type 96
aaacgaaagtatttcagtcc

SEQ ID NO: 58914 - DNA, 20 bp, Human papillomavirus type 96
cagtccgaaagagttgcagc

SEQ ID NO: 58915 - DNA, 20 bp, Human papillomavirus type 96
agtccgaaagagttgcagca

SEQ ID NO: 58916 - DNA, 20 bp, Human papillomavirus type 96
cagcagcttagccctcgttt

SEQ ID NO: 58917 - DNA, 20 bp, Human papillomavirus type 96
gccctcgtttggaagcaata

SEQ ID NO: 58918 - DNA, 20 bp, Human papillomavirus type 96
ggggtggggtttatggaact

SEQ ID NO: 58919 - DNA, 20 bp, Human papillomavirus type 96
gggtggggtttatggaactg

SEQ ID NO: 58920 - DNA, 20 bp, Human papillomavirus type 96
atggaactgtgtaggaaatt

SEQ ID NO: 58921 - DNA, 20 bp, Human papillomavirus type 96
tggaactgtgtaggaaattt

SEQ ID NO: 58922 - DNA, 20 bp, Human papillomavirus type 96
aatagcaataagacttgttg

SEQ ID NO: 58923 - DNA, 20 bp, Human papillomavirus type 96
tgataaaattagtacaacat

SEQ ID NO: 58924 - DNA, 20 bp, Human papillomavirus type 96
gataaaattagtacaacatg

SEQ ID NO: 58925 - DNA, 20 bp, Human papillomavirus type 96
ataaaattagtacaacatgg

SEQ ID NO: 58926 - DNA, 20 bp, Human papillomavirus type 96
gtacaacatggtcatgggtg

SEQ ID NO: 58927 - DNA, 20 bp, Human papillomavirus type 96
acaaggtaatacacgcatag

SEQ ID NO: 58928 - DNA, 20 bp, Human papillomavirus type 96
tgttacaaatatttacaggg

SEQ ID NO: 58929 - DNA, 20 bp, Human papillomavirus type 96
caaatatttacaggggctgt

SEQ ID NO: 58930 - DNA, 20 bp, Human papillomavirus type 96
acaggggctgtaaggcagct

SEQ ID NO: 58931 - DNA, 20 bp, Human papillomavirus type 96
caggggctgtaaggcagctg

SEQ ID NO: 58932 - DNA, 20 bp, Human papillomavirus type 96
ttaataaagttgaacaaaaa

SEQ ID NO: 58933 - DNA, 20 bp, Human papillomavirus type 96
gatacagtcaaccctattga

SEQ ID NO: 58934 - DNA, 20 bp, Human papillomavirus type 96
accctgttgcaccttcagtt

SEQ ID NO: 58935 - DNA, 20 bp, Human papillomavirus type 96
caccttcagttgtccctctt

SEQ ID NO: 58936 - DNA, 20 bp, Human papillomavirus type 96
agttgtccctcttacagaca

SEQ ID NO: 58937 - DNA, 20 bp, Human papillomavirus type 96
tccctcttacagacacagga

SEQ ID NO: 58938 - DNA, 20 bp, Human papillomavirus type 96
ggaaacgagcaaccatcaga

SEQ ID NO: 58939 - DNA, 20 bp, Human papillomavirus type 96
gcactcaagttcacttttac

SEQ ID NO: 58940 - DNA, 20 bp, Human papillomavirus type 96
acttttacagagatataagc

SEQ ID NO: 58941 - DNA, 20 bp, Human papillomavirus type 96
tacagagatataagcactat

SEQ ID NO: 58942 - DNA, 20 bp, Human papillomavirus type 96
acagagatataagcactatt

SEQ ID NO: 58943 - DNA, 20 bp, Human papillomavirus type 96
gtaatttttttgcagatgtc

SEQ ID NO: 58944 - DNA, 20 bp, Human papillomavirus type 96
taatttttttgcagatgtca

SEQ ID NO: 58945 - DNA, 20 bp, Human papillomavirus type 96
ttttgcagatgtcatcattg

SEQ ID NO: 58946 - DNA, 20 bp, Human papillomavirus type 96
tttgcagatgtcatcattgt

SEQ ID NO: 58947 - DNA, 20 bp, Human papillomavirus type 96
ttgcagatgtcatcattgtg

SEQ ID NO: 58948 - DNA, 20 bp, Human papillomavirus type 96
agggtacacttaccggatcc

SEQ ID NO: 58949 - DNA, 20 bp, Human papillomavirus type 96
gggtacacttaccggatcct

SEQ ID NO: 58950 - DNA, 20 bp, Human papillomavirus type 96
ccggatcctaacagatttgc

SEQ ID NO: 58951 - DNA, 20 bp, Human papillomavirus type 96
gctctagctgacatgtcagt

SEQ ID NO: 58952 - DNA, 20 bp, Human papillomavirus type 96
ctctagctgacatgtcagtg

SEQ ID NO: 58953 - DNA, 20 bp, Human papillomavirus type 96
aaatgtttgttttgggttgt

SEQ ID NO: 58954 - DNA, 20 bp, Human papillomavirus type 96
gttttgggttgtataccctg

SEQ ID NO: 58955 - DNA, 20 bp, Human papillomavirus type 96
ttttgggttgtataccctgc

SEQ ID NO: 58956 - DNA, 20 bp, Human papillomavirus type 96
tgggttgtataccctgcttg

SEQ ID NO: 58957 - DNA, 20 bp, Human papillomavirus type 96
gggttgtataccctgcttgg

SEQ ID NO: 58958 - DNA, 20 bp, Human papillomavirus type 96
cttcttttatgccagaagag

SEQ ID NO: 58959 - DNA, 20 bp, Human papillomavirus type 96
ttttatgccagaagagaaca

SEQ ID NO: 58960 - DNA, 20 bp, Human papillomavirus type 96
tatgccagaagagaacaatg

SEQ ID NO: 58961 - DNA, 20 bp, Human papillomavirus type 96
atgccagaagagaacaatgt

SEQ ID NO: 58962 - DNA, 20 bp, Human papillomavirus type 96
tgccagaagagaacaatgtt

SEQ ID NO: 58963 - DNA, 20 bp, Influenza A virus
ctcatgcagattgccatcct

SEQ ID NO: 58964 - DNA, 20 bp, Influenza A virus
ccatcctggtaactactgtg

SEQ ID NO: 58965 - DNA, 20 bp, Influenza A virus
cattttaagcaacatgagtg

SEQ ID NO: 58966 - DNA, 20 bp, Influenza A virus
taagcaacatgagtgcgact

SEQ ID NO: 58967 - DNA, 20 bp, Influenza A virus
aagcaacatgagtgcgactc

SEQ ID NO: 58968 - DNA, 20 bp, Influenza A virus
gcacctttttctaaggacaa

SEQ ID NO: 58969 - DNA, 20 bp, Influenza A virus
cacctttttctaaggacaat

SEQ ID NO: 58970 - DNA, 20 bp, Influenza A virus
ttctaaggacaattcaatcc

SEQ ID NO: 58971 - DNA, 20 bp, Influenza A virus
tctaaggacaattcaatccg

SEQ ID NO: 58972 - DNA, 20 bp, Influenza A virus
ctaaggacaattcaatccgg

SEQ ID NO: 58973 - DNA, 20 bp, Influenza A virus
tcacgatggaaaagcatggt

SEQ ID NO: 58974 - DNA, 20 bp, Influenza A virus
catgtttgtgtcactgggga

SEQ ID NO: 58975 - DNA, 20 bp, Influenza A virus
gtgtcactggggatgataaa

SEQ ID NO: 58976 - DNA, 20 bp, Influenza A virus
tgtcactggggatgataaaa

SEQ ID NO: 58977 - DNA, 20 bp, Influenza A virus
catttttatcatccccagtg

SEQ ID NO: 58978 - DNA, 20 bp, Influenza A virus
tcaggaagtgctcagcatgt

SEQ ID NO: 58979 - DNA, 20 bp, Influenza A virus
ctgttatcctcgatatcctg

SEQ ID NO: 58980 - DNA, 20 bp, Influenza A virus
tcctcgatatcctgacgtca

SEQ ID NO: 58981 - DNA, 20 bp, Influenza A virus
gagcctttccagttgtctct

SEQ ID NO: 58982 - DNA, 20 bp, Influenza A virus
ccagttgtctctgcagatac

SEQ ID NO: 58983 - DNA, 20 bp, Influenza A virus
gacaatggagatgacgtgtg

SEQ ID NO: 58984 - DNA, 20 bp, Influenza A virus
acaatggagatgacgtgtgg

SEQ ID NO: 58985 - DNA, 20 bp, Influenza A virus
acgctcaggttatgaaactt

SEQ ID NO: 58986 - DNA, 20 bp, Influenza A virus
cgctcaggttatgaaacttt

SEQ ID NO: 58987 - DNA, 20 bp, Influenza A virus
tgaaactttcaaagtcattg

SEQ ID NO: 58988 - DNA, 20 bp, Human beta herpesvirus 6A
cacgcgcgtgtcggctacga

SEQ ID NO: 58989 - DNA, 20 bp, Human beta herpesvirus 6A
cacgcgacagatccgtctct

SEQ ID NO: 58990 - DNA, 20 bp, Human beta herpesvirus 6A
gagtgggagagcacagagct

SEQ ID NO: 58991 - DNA, 20 bp, Human beta herpesvirus 6A
cgcccgcgtctccagtccgt

SEQ ID NO: 58992 - DNA, 20 bp, Human beta herpesvirus 6A
gcccgcgtctccagtccgtc

SEQ ID NO: 58993 - DNA, 20 bp, Human beta herpesvirus 6A
ccttcgcgtttctctccaca

SEQ ID NO: 58994 - DNA, 20 bp, Human beta herpesvirus 6A
gcgtttctctccacatctcc

SEQ ID NO: 58995 - DNA, 20 bp, Human beta herpesvirus 6A
ctctccacatctccgcacgt

SEQ ID NO: 58996 - DNA, 20 bp, Human beta herpesvirus 6A
tctccacatctccgcacgtc

SEQ ID NO: 58997 - DNA, 20 bp, Human beta herpesvirus 6A
acgtcaaccgccaggacggg

SEQ ID NO: 58998 - DNA, 20 bp, Human beta herpesvirus 6A
ttccgcccatgaggcgggac

SEQ ID NO: 58999 - DNA, 20 bp, Human beta herpesvirus 6A
cgcccatgaggcgggacttc

SEQ ID NO: 59000 - DNA, 20 bp, Human beta herpesvirus 6A
gagacgagccacccttcgta

SEQ ID NO: 59001 - DNA, 20 bp, Human beta herpesvirus 6A
gtatacgtccggcccctccc

SEQ ID NO: 59002 - DNA, 20 bp, Human beta herpesvirus 6A
cgcaacgagggggtgcgtcc

SEQ ID NO: 59003 - DNA, 20 bp, Human beta herpesvirus 6A
acaagacgagggctgcaacg

SEQ ID NO: 59004 - DNA, 20 bp, Human beta herpesvirus 6A
caagacgagggctgcaacgc

SEQ ID NO: 59005 - DNA, 20 bp, Human beta herpesvirus 6A
ttcatacgtcacggcgtcgc

SEQ ID NO: 59006 - DNA, 20 bp, Human beta herpesvirus 6A
atacgtcacggcgtcgcgtt

SEQ ID NO: 59007 - DNA, 20 bp, Human beta herpesvirus 6A
cagccctcgtcttgtaaact

SEQ ID NO: 59008 - DNA, 20 bp, Human beta herpesvirus 6A
ccgaggagggcccgcgcgcg

SEQ ID NO: 59009 - DNA, 20 bp, Human beta herpesvirus 6A
tctctcctccggcgtatcct

SEQ ID NO: 59010 - DNA, 20 bp, Human beta herpesvirus 6A
tccggcctcccgggtacggc

SEQ ID NO: 59011 - DNA, 20 bp, Human beta herpesvirus 6A
cgccgtgtctttcgataagg

SEQ ID NO: 59012 - DNA, 20 bp, Human beta herpesvirus 6A
gccgtgtctttcgataaggc

SEQ ID NO: 59013 - DNA, 20 bp, Human beta herpesvirus 6A
cgataaggctctcgtgccgt

SEQ ID NO: 59014 - DNA, 20 bp, Human beta herpesvirus 6A
gataaggctctcgtgccgtt

SEQ ID NO: 59015 - DNA, 20 bp, Human beta herpesvirus 6A
ccagagaccgaacgcgtcct

SEQ ID NO: 59016 - DNA, 20 bp, Human beta herpesvirus 6A
cagagaccgaacgcgtcctc

SEQ ID NO: 59017 - DNA, 20 bp, Human beta herpesvirus 6A
aacgcgtagatctccccgca

SEQ ID NO: 59018 - DNA, 20 bp, Human beta herpesvirus 6A
aacggtgtgttcgacgacgc

SEQ ID NO: 59019 - DNA, 20 bp, Human beta herpesvirus 6A
acggtgtgttcgacgacgcg

SEQ ID NO: 59020 - DNA, 20 bp, Human beta herpesvirus 6A
ggaatggtatacgtgacccg

SEQ ID NO: 59021 - DNA, 20 bp, Human beta herpesvirus 6A
tcggacgggtcccttataaa

SEQ ID NO: 59022 - DNA, 20 bp, Human beta herpesvirus 6A
taaatgtcgtggtccaataa

SEQ ID NO: 59023 - DNA, 20 bp, Human beta herpesvirus 6A
ttggaccacgacatttataa

SEQ ID NO: 59024 - DNA, 20 bp, Human beta herpesvirus 6A
gaccacgacatttataaggg

SEQ ID NO: 59025 - DNA, 20 bp, Human beta herpesvirus 6A
accagcacgttgtctatcca

SEQ ID NO: 59026 - DNA, 20 bp, Human beta herpesvirus 6A
tctatccaatcgtaataata

SEQ ID NO: 59027 - DNA, 20 bp, Human beta herpesvirus 6A
ttacgattggatagacaacg

SEQ ID NO: 59028 - DNA, 20 bp, Human beta herpesvirus 6A
cgattggatagacaacgtgc

SEQ ID NO: 59029 - DNA, 20 bp, Human beta herpesvirus 6A
gatagacaacgtgctggtta

SEQ ID NO: 59030 - DNA, 20 bp, Human beta herpesvirus 6A
attaaatttcagcctccgtt

SEQ ID NO: 59031 - DNA, 20 bp, Human beta herpesvirus 6A
ttaaatttcagcctccgttt

SEQ ID NO: 59032 - DNA, 20 bp, Human beta herpesvirus 6A
aatttcagcctccgttttga

SEQ ID NO: 59033 - DNA, 20 bp, Human beta herpesvirus 6A
cagcctccgttttgactcac

SEQ ID NO: 59034 - DNA, 20 bp, Human beta herpesvirus 6A
agcctccgttttgactcaca

SEQ ID NO: 59035 - DNA, 20 bp, Human beta herpesvirus 6A
cacatttcttgcaactctgc

SEQ ID NO: 59036 - DNA, 20 bp, Human beta herpesvirus 6A
cttgcaactctgcggcagac

SEQ ID NO: 59037 - DNA, 20 bp, Human beta herpesvirus 6A
ttgcaactctgcggcagact

SEQ ID NO: 59038 - DNA, 20 bp, Human beta herpesvirus 6A
caactctgcggcagactttg

SEQ ID NO: 59039 - DNA, 20 bp, Human beta herpesvirus 6A
gtgggaaatggaattttaca

SEQ ID NO: 59040 - DNA, 20 bp, Human beta herpesvirus 6A
ttagccactgcacccactaa

SEQ ID NO: 59041 - DNA, 20 bp, Human beta herpesvirus 6A
gccactgcacccactaaaca

SEQ ID NO: 59042 - DNA, 20 bp, Human beta herpesvirus 6A
caaacttgcaaacctgacct

SEQ ID NO: 59043 - DNA, 20 bp, Human beta herpesvirus 6A
caaacctgacctcgataaag

SEQ ID NO: 59044 - DNA, 20 bp, Human beta herpesvirus 6A
atttgctcttccatatgtcg

SEQ ID NO: 59045 - DNA, 20 bp, Human beta herpesvirus 6A
cccgccggagatttcaaagc

SEQ ID NO: 59046 - DNA, 20 bp, Human beta herpesvirus 6A
caaagcatactttcgcaaca

SEQ ID NO: 59047 - DNA, 20 bp, Human beta herpesvirus 6A
aaagcatactttcgcaacat

SEQ ID NO: 59048 - DNA, 20 bp, Human beta herpesvirus 6A
cgcaacatagagggaaatga

SEQ ID NO: 59049 - DNA, 20 bp, Human beta herpesvirus 6A
gcaacatagagggaaatgac

SEQ ID NO: 59050 - DNA, 20 bp, Human beta herpesvirus 6A
ggcatctctcgatctagtac

SEQ ID NO: 59051 - DNA, 20 bp, Human beta herpesvirus 6A
gcatctctcgatctagtaca

SEQ ID NO: 59052 - DNA, 20 bp, Human beta herpesvirus 6A
accgcagagttgcctgagtt

SEQ ID NO: 59053 - DNA, 20 bp, Human beta herpesvirus 6A
ccgcagagttgcctgagttt

SEQ ID NO: 59054 - DNA, 20 bp, Human beta herpesvirus 6A
cctgagttttcggtattcga

SEQ ID NO: 59055 - DNA, 20 bp, Human beta herpesvirus 6A
agtatagtctagtgtgtcgt

SEQ ID NO: 59056 - DNA, 20 bp, Human beta herpesvirus 6A
gttgtgtcgcactgggtttt

SEQ ID NO: 59057 - DNA, 20 bp, Human beta herpesvirus 6A
tgtcgcactgggttttgaag

SEQ ID NO: 59058 - DNA, 20 bp, Human beta herpesvirus 6A
tgaagaagaagatgggatgt

SEQ ID NO: 59059 - DNA, 20 bp, Human beta herpesvirus 6A
gaagaagaagatgggatgtg

SEQ ID NO: 59060 - DNA, 20 bp, Human beta herpesvirus 6A
tttgtataaaagttaaatgt

SEQ ID NO: 59061 - DNA, 20 bp, Human beta herpesvirus 6A
ttgtataaaagttaaatgtt

SEQ ID NO: 59062 - DNA, 20 bp, Human beta herpesvirus 6A
tgtataaaagttaaatgtta

SEQ ID NO: 59063 - DNA, 20 bp, Human beta herpesvirus 6A
gtataaaagttaaatgttat

SEQ ID NO: 59064 - DNA, 20 bp, Human beta herpesvirus 6A
tataaaagttaaatgttata

SEQ ID NO: 59065 - DNA, 20 bp, Human beta herpesvirus 6A
tttttctcttttaaatgtta

SEQ ID NO: 59066 - DNA, 20 bp, Human beta herpesvirus 6A
ttttctcttttaaatgttac

SEQ ID NO: 59067 - DNA, 20 bp, Human beta herpesvirus 6A
tttctcttttaaatgttaca

SEQ ID NO: 59068 - DNA, 20 bp, Human beta herpesvirus 6A
ttctcttttaaatgttacaa

SEQ ID NO: 59069 - DNA, 20 bp, Human beta herpesvirus 6A
tctcttttaaatgttacaac

SEQ ID NO: 59070 - DNA, 20 bp, Human beta herpesvirus 6A
atatttagcgtgacggtgct

SEQ ID NO: 59071 - DNA, 20 bp, Human beta herpesvirus 6A
agcgtgacggtgctccgatc

SEQ ID NO: 59072 - DNA, 20 bp, Human beta herpesvirus 6A
gcgtgacggtgctccgatca

SEQ ID NO: 59073 - DNA, 20 bp, Human beta herpesvirus 6A
tttcgtgattggaaaccgtc

SEQ ID NO: 59074 - DNA, 20 bp, Human beta herpesvirus 6A
cgtgattggaaaccgtcgct

SEQ ID NO: 59075 - DNA, 20 bp, Human beta herpesvirus 6A
aataaagaagagaaccttcc

SEQ ID NO: 59076 - DNA, 20 bp, Human beta herpesvirus 6A
ccgagggtcattcgactcac

SEQ ID NO: 59077 - DNA, 20 bp, Human beta herpesvirus 6A
gactcacatcattgaagcgg

SEQ ID NO: 59078 - DNA, 20 bp, Human beta herpesvirus 6A
aagcggattacgttcgctgc

SEQ ID NO: 59079 - DNA, 20 bp, Human beta herpesvirus 6A
cgttcgctgcaacggcgatc

SEQ ID NO: 59080 - DNA, 20 bp, Human beta herpesvirus 6A
gattgcgcgattaggttaga

SEQ ID NO: 59081 - DNA, 20 bp, Human beta herpesvirus 6A
cgcgattaggttagattcgg

SEQ ID NO: 59082 - DNA, 20 bp, Human beta herpesvirus 6A
ggttagattcggaaaccata

SEQ ID NO: 59083 - DNA, 20 bp, Human beta herpesvirus 6A
gattcggaaaccatagctgt

SEQ ID NO: 59084 - DNA, 20 bp, Human beta herpesvirus 6A
ggaaaccatagctgtccatg

SEQ ID NO: 59085 - DNA, 20 bp, Human beta herpesvirus 6A
ggtttggccttgttccgtaa

SEQ ID NO: 59086 - DNA, 20 bp, Human beta herpesvirus 6A
ggccttgttccgtaattaaa

SEQ ID NO: 59087 - DNA, 20 bp, Human beta herpesvirus 6A
gccttgttccgtaattaaaa

SEQ ID NO: 59088 - DNA, 20 bp, Human beta herpesvirus 6A
ttccgtaattaaaacgtcgt

SEQ ID NO: 59089 - DNA, 20 bp, Human beta herpesvirus 6A
cgtaattaaaacgtcgttga

SEQ ID NO: 59090 - DNA, 20 bp, Human beta herpesvirus 6A
cttgcgattgttctgcgata

SEQ ID NO: 59091 - DNA, 20 bp, Human beta herpesvirus 6A
cgattgttctgcgatagagg

SEQ ID NO: 59092 - DNA, 20 bp, Human beta herpesvirus 6A
ttctgcgatagaggaattgc

SEQ ID NO: 59093 - DNA, 20 bp, Human beta herpesvirus 6A
tgcgatagaggaattgcttt

SEQ ID NO: 59094 - DNA, 20 bp, Human beta herpesvirus 6A
ctttgtcacgagtcgcttct

SEQ ID NO: 59095 - DNA, 20 bp, Human beta herpesvirus 6A
gcaagcagaccagtttacag

SEQ ID NO: 59096 - DNA, 20 bp, Human beta herpesvirus 6A
caagcagaccagtttacagg

SEQ ID NO: 59097 - DNA, 20 bp, Human beta herpesvirus 6A
acaggtatgggcgcaaagtg

SEQ ID NO: 59098 - DNA, 20 bp, Human beta herpesvirus 6A
caggtatgggcgcaaagtgc

SEQ ID NO: 59099 - DNA, 20 bp, Human beta herpesvirus 6A
cacatgccgcaagatactgg

SEQ ID NO: 59100 - DNA, 20 bp, Human beta herpesvirus 6A
gtgcctctaaccgttgttct

SEQ ID NO: 59101 - DNA, 20 bp, Human beta herpesvirus 6A
ttcttggagatgacgggtta

SEQ ID NO: 59102 - DNA, 20 bp, Human beta herpesvirus 6A
ttggagatgacgggttagag

SEQ ID NO: 59103 - DNA, 20 bp, Human beta herpesvirus 6A
gagatgacgggttagagatt

SEQ ID NO: 59104 - DNA, 20 bp, Human beta herpesvirus 6A
gagattttggaagcatacgt

SEQ ID NO: 59105 - DNA, 20 bp, Human beta herpesvirus 6A
gtgacgccaaaaaatgctta

SEQ ID NO: 59106 - DNA, 20 bp, Human beta herpesvirus 6A
tgccttattgttcgacgatg

SEQ ID NO: 59107 - DNA, 20 bp, Human beta herpesvirus 6A
ttgttcgacgatgatttgtg

SEQ ID NO: 59108 - DNA, 20 bp, Human beta herpesvirus 6A
ttcgacgatgatttgtgttt

SEQ ID NO: 59109 - DNA, 20 bp, Human beta herpesvirus 6A
gacgatgatttgtgtttgct

SEQ ID NO: 59110 - DNA, 20 bp, Human beta herpesvirus 6A
cgctactccataggctattt

SEQ ID NO: 59111 - DNA, 20 bp, Human beta herpesvirus 6A
gttttttcagtacggcggaa

SEQ ID NO: 59112 - DNA, 20 bp, Human beta herpesvirus 6A
ttttttcagtacggcggaat

SEQ ID NO: 59113 - DNA, 20 bp, Human beta herpesvirus 6A
tttcagtacggcggaatctc

SEQ ID NO: 59114 - DNA, 20 bp, Human beta herpesvirus 6A
ttcagtacggcggaatctcg

SEQ ID NO: 59115 - DNA, 20 bp, Human beta herpesvirus 6A
gctcgtgatcctacaagggc

SEQ ID NO: 59116 - DNA, 20 bp, Human beta herpesvirus 6A
tgccacgacgtgctgcaagg

SEQ ID NO: 59117 - DNA, 20 bp, Human beta herpesvirus 6A
cagcacgtcgtggcagaaca

SEQ ID NO: 59118 - DNA, 20 bp, Human beta herpesvirus 6A
gcgaggtgcagaccgctgct

SEQ ID NO: 59119 - DNA, 20 bp, Human beta herpesvirus 6A
gtccagcagcggtctgcacc

SEQ ID NO: 59120 - DNA, 20 bp, Human beta herpesvirus 6A
cgcgacgctgggcgcgtctc

SEQ ID NO: 59121 - DNA, 20 bp, Human beta herpesvirus 6A
gacgtgatcgccgcggccgc

SEQ ID NO: 59122 - DNA, 20 bp, Human beta herpesvirus 6A
tgttcgtcggcggccgcggc

SEQ ID NO: 59123 - DNA, 20 bp, Human beta herpesvirus 6A
gtcggcggccgcggcgatca

SEQ ID NO: 59124 - DNA, 20 bp, Human beta herpesvirus 6A
gttccgcacatacgctggtc

SEQ ID NO: 59125 - DNA, 20 bp, Human beta herpesvirus 6A
cgcacatacgctggtccggc

SEQ ID NO: 59126 - DNA, 20 bp, Human beta herpesvirus 6A
ggtggtcttgactttggcgg

SEQ ID NO: 59127 - DNA, 20 bp, Human beta herpesvirus 6A
actttggcgggacctctgtt

SEQ ID NO: 59128 - DNA, 20 bp, Human beta herpesvirus 6A
ggcgggacctctgttagcgt

SEQ ID NO: 59129 - DNA, 20 bp, Human beta herpesvirus 6A
gcgggacctctgttagcgtt

SEQ ID NO: 59130 - DNA, 20 bp, Human beta herpesvirus 6A
tccttccctcttccctttaa

SEQ ID NO: 59131 - DNA, 20 bp, Human beta herpesvirus 6A
ccttccctcttccctttaac

SEQ ID NO: 59132 - DNA, 20 bp, Human beta herpesvirus 6A
cttccctcttccctttaacc

SEQ ID NO: 59133 - DNA, 20 bp, Human beta herpesvirus 6A
cctcttccctttaaccccac

SEQ ID NO: 59134 - DNA, 20 bp, Human beta herpesvirus 6A
cctttaaccccacgaaaaat

SEQ ID NO: 59135 - DNA, 20 bp, Influenza B virus
atttgattataaaaccaaga

SEQ ID NO: 59136 - DNA, 20 bp, Influenza B virus
tttgattataaaaccaagag

SEQ ID NO: 59137 - DNA, 20 bp, Influenza B virus
gattataaaaccaagaggtt

SEQ ID NO: 59138 - DNA, 20 bp, Influenza B virus
attataaaaccaagaggttt

SEQ ID NO: 59139 - DNA, 20 bp, Influenza B virus
taaaaccaagaggtttatcg

SEQ ID NO: 59140 - DNA, 20 bp, Influenza B virus
agtttgaaaaacctatggca

SEQ ID NO: 59141 - DNA, 20 bp, Influenza B virus
gaaaaacctatggcaagttc

SEQ ID NO: 59142 - DNA, 20 bp, Influenza B virus
aaaaacctatggcaagttct

SEQ ID NO: 59143 - DNA, 20 bp, Influenza B virus
taataggggaagaagaaatt

SEQ ID NO: 59144 - DNA, 20 bp, Influenza B virus
aaaaaggaattgacttcaaa

SEQ ID NO: 59145 - DNA, 20 bp, Influenza B virus
acaaccatgagctaccagaa

SEQ ID NO: 59146 - DNA, 20 bp, Influenza B virus
caaccatgagctaccagaag

SEQ ID NO: 59147 - DNA, 20 bp, Influenza B virus
catataatgcctttctcctc

SEQ ID NO: 59148 - DNA, 20 bp, Influenza B virus
ctcctcatgtctgatgagtt

SEQ ID NO: 59149 - DNA, 20 bp, Influenza B virus
tcctcatgtctgatgagttg

SEQ ID NO: 59150 - DNA, 20 bp, Influenza B virus
cagaaaaccaattatgccaa

SEQ ID NO: 59151 - DNA, 20 bp, Influenza B virus
tgccaagtgggccacaggag

SEQ ID NO: 59152 - DNA, 20 bp, Influenza B virus
ggttcttcttggtacatcgt

SEQ ID NO: 59153 - DNA, 20 bp, Influenza B virus
ttcttggtacatcgtttcgt

SEQ ID NO: 59154 - DNA, 20 bp, Influenza B virus
ttggtacatcgtttcgtcat

SEQ ID NO: 59155 - DNA, 20 bp, Influenza B virus
aaaattggctccctatttgt

SEQ ID NO: 59156 - DNA, 20 bp, Influenza B virus
aaattggctccctatttgtg

SEQ ID NO: 59157 - DNA, 20 bp, Influenza B virus
gctccctatttgtgagtgga

SEQ ID NO: 59158 - DNA, 20 bp, Influenza B virus
gtgagtggaagagaaaaacc

SEQ ID NO: 59159 - DNA, 20 bp, Influenza B virus
tgagtggaagagaaaaacct

SEQ ID NO: 59160 - DNA, 20 bp, Influenza B virus
tttcaagggagacagagtga

SEQ ID NO: 59161 - DNA, 20 bp, Influenza B virus
caagggagacagagtgaata

SEQ ID NO: 59162 - DNA, 20 bp, Influenza B virus
aagggagacagagtgaataa

SEQ ID NO: 59163 - DNA, 20 bp, Influenza B virus
cagtattgggactcaggaag

SEQ ID NO: 59164 - DNA, 20 bp, Influenza B virus
agtattgggactcaggaagg

SEQ ID NO: 59165 - DNA, 20 bp, Influenza A virus
accttctagaagacaagcat

SEQ ID NO: 59166 - DNA, 20 bp, Influenza A virus
tagaagacaagcataacggg

SEQ ID NO: 59167 - DNA, 20 bp, Influenza A virus
gtttgcatagtttcccgtta

SEQ ID NO: 59168 - DNA, 20 bp, Influenza A virus
gcatagtttcccgttatgct

SEQ ID NO: 59169 - DNA, 20 bp, Influenza A virus
catagtttcccgttatgctt

SEQ ID NO: 59170 - DNA, 20 bp, Influenza A virus
tggaaacacctagttcagac

SEQ ID NO: 59171 - DNA, 20 bp, Influenza A virus
agacaatggaacgtgttacc

SEQ ID NO: 59172 - DNA, 20 bp, Influenza A virus
cccaggagatttcatcgatt

SEQ ID NO: 59173 - DNA, 20 bp, Influenza A virus
catcgattatgaggagctaa

SEQ ID NO: 59174 - DNA, 20 bp, Influenza A virus
atcgattatgaggagctaag

SEQ ID NO: 59175 - DNA, 20 bp, Influenza A virus
accatccatctactagtgct

SEQ ID NO: 59176 - DNA, 20 bp, Influenza A virus
ttgtggggtcatcaagatac

SEQ ID NO: 59177 - DNA, 20 bp, Influenza A virus
tgtggggtcatcaagataca

SEQ ID NO: 59178 - DNA, 20 bp, Influenza A virus
gtggggtcatcaagatacag

SEQ ID NO: 59179 - DNA, 20 bp, Influenza A virus
tggggtcatcaagatacagc

SEQ ID NO: 59180 - DNA, 20 bp, Influenza A virus
gcaatggaaagaaatgctgg

SEQ ID NO: 59181 - DNA, 20 bp, Influenza A virus
tcatttcagatacaccagtc

SEQ ID NO: 59182 - DNA, 20 bp, Influenza A virus
cagatacaccagtccacgat

SEQ ID NO: 59183 - DNA, 20 bp, Influenza A virus
agatacaccagtccacgatt

SEQ ID NO: 59184 - DNA, 20 bp, Influenza A virus
caatacaacttgtcaaacac

SEQ ID NO: 59185 - DNA, 20 bp, Influenza A virus
gggccattgccggtttcatt

SEQ ID NO: 59186 - DNA, 20 bp, Influenza A virus
ccggtttcattgaagggggg

SEQ ID NO: 59187 - DNA, 20 bp, Influenza A virus
cattgaaggggggtggacag

SEQ ID NO: 59188 - DNA, 20 bp, Influenza A virus
attgaaggggggtggacagg

SEQ ID NO: 59189 - DNA, 20 bp, Influenza A virus
aaggggggtggacagggatg

SEQ ID NO: 59190 - DNA, 20 bp, Human herpesvirus 6B
gttaacgggatcgtcccctt

SEQ ID NO: 59191 - DNA, 20 bp, Human herpesvirus 6B
acgggatcgtccccttggct

SEQ ID NO: 59192 - DNA, 20 bp, Human herpesvirus 6B
gctcgtgctcctacaagcgc

SEQ ID NO: 59193 - DNA, 20 bp, Human herpesvirus 6B
gaacacgtcgtggcagaaca

SEQ ID NO: 59194 - DNA, 20 bp, Human herpesvirus 6B
taggagcacgagccaagggg

SEQ ID NO: 59195 - DNA, 20 bp, Human herpesvirus 6B
cctcgagtgacgccggagac

SEQ ID NO: 59196 - DNA, 20 bp, Human herpesvirus 6B
ctcgagtgacgccggagaca

SEQ ID NO: 59197 - DNA, 20 bp, Human herpesvirus 6B
acctgaacgacacctccctg

SEQ ID NO: 59198 - DNA, 20 bp, Human herpesvirus 6B
gagctgctgctgcgcctggg

SEQ ID NO: 59199 - DNA, 20 bp, Human herpesvirus 6B
aggtcaagcgccaggacggg

SEQ ID NO: 59200 - DNA, 20 bp, Human herpesvirus 6B
ccgccgacgcgcctgcgcga

SEQ ID NO: 59201 - DNA, 20 bp, Human herpesvirus 6B
gagtgggggtgagagggacg

SEQ ID NO: 59202 - DNA, 20 bp, Human herpesvirus 6B
gcttgcggtggtgtgttttt

SEQ ID NO: 59203 - DNA, 20 bp, Human herpesvirus 6B
cttgcggtggtgtgtttttt

SEQ ID NO: 59204 - DNA, 20 bp, Human herpesvirus 6B
cggtggtgtgtttttttttt

SEQ ID NO: 59205 - DNA, 20 bp, Human herpesvirus 6B
gcaaggcgagggctgcagcg

SEQ ID NO: 59206 - DNA, 20 bp, Human herpesvirus 6B
caaggcgagggctgcagcgg

SEQ ID NO: 59207 - DNA, 20 bp, Human herpesvirus 6B
gttccgcacatacgccggtc

SEQ ID NO: 59208 - DNA, 20 bp, Human herpesvirus 6B
cgcacatacgccggtccggc

SEQ ID NO: 59209 - DNA, 20 bp, Human herpesvirus 6B
ctcatacgccacggggtccc

SEQ ID NO: 59210 - DNA, 20 bp, Human herpesvirus 6B
tgggaaacgtgcccacgccg

SEQ ID NO: 59211 - DNA, 20 bp, Human herpesvirus 6B
cccagaatcacgcctccgct

SEQ ID NO: 59212 - DNA, 20 bp, Human herpesvirus 6B
ccagaatcacgcctccgctg

SEQ ID NO: 59213 - DNA, 20 bp, Human herpesvirus 6B
tccgccctcctgggtacggc

SEQ ID NO: 59214 - DNA, 20 bp, Human herpesvirus 6B
gccgcgcggagctttctttg

SEQ ID NO: 59215 - DNA, 20 bp, Human herpesvirus 6B
ctttgagtttgccgtaccca

SEQ ID NO: 59216 - DNA, 20 bp, Human herpesvirus 6B
tttgagtttgccgtacccag

SEQ ID NO: 59217 - DNA, 20 bp, Human herpesvirus 6B
gagtttgccgtacccaggag

SEQ ID NO: 59218 - DNA, 20 bp, Human herpesvirus 6B
ccatgagacacttggaaccg

SEQ ID NO: 59219 - DNA, 20 bp, Human herpesvirus 6B
catgagacacttggaaccgt

SEQ ID NO: 59220 - DNA, 20 bp, Human herpesvirus 6B
gaaccgtagacgggctcgaa

SEQ ID NO: 59221 - DNA, 20 bp, Human herpesvirus 6B
cagagaccgaacgcgtcctc

SEQ ID NO: 59222 - DNA, 20 bp, Human herpesvirus 6B
ggtctctggaagcacggctt

SEQ ID NO: 59223 - DNA, 20 bp, Human herpesvirus 6B
gccaactcggcctgcgtgat

SEQ ID NO: 59224 - DNA, 20 bp, Human herpesvirus 6B
gccacctccgacatgctcgg

SEQ ID NO: 59225 - DNA, 20 bp, Human herpesvirus 6B
gccaagctgtctcgcggata

SEQ ID NO: 59226 - DNA, 20 bp, Human herpesvirus 6B
aattttccagcgattcgaat

SEQ ID NO: 59227 - DNA, 20 bp, Human herpesvirus 6B
tccagcgattcgaatctggg

SEQ ID NO: 59228 - DNA, 20 bp, Human herpesvirus 6B
ccagcgattcgaatctgggg

SEQ ID NO: 59229 - DNA, 20 bp, Human herpesvirus 6B
cagcgattcgaatctggggc

SEQ ID NO: 59230 - DNA, 20 bp, Human herpesvirus 6B
gaatctggggccgtcataca

SEQ ID NO: 59231 - DNA, 20 bp, Human herpesvirus 6B
tttatgacagtgaacagaga

SEQ ID NO: 59232 - DNA, 20 bp, Human herpesvirus 6B
ttatgacagtgaacagagag

SEQ ID NO: 59233 - DNA, 20 bp, Human herpesvirus 6B
tatgacagtgaacagagagc

SEQ ID NO: 59234 - DNA, 20 bp, Human herpesvirus 6B
atgacagtgaacagagagca

SEQ ID NO: 59235 - DNA, 20 bp, Human herpesvirus 6B
tgacagtgaacagagagcag

SEQ ID NO: 59236 - DNA, 20 bp, Human herpesvirus 6B
ccaaaagactatgtagtaca

SEQ ID NO: 59237 - DNA, 20 bp, Human herpesvirus 6B
tcatccactgacgattctga

SEQ ID NO: 59238 - DNA, 20 bp, Human herpesvirus 6B
catccactgacgattctgat

SEQ ID NO: 59239 - DNA, 20 bp, Human herpesvirus 6B
atccactgacgattctgatg

SEQ ID NO: 59240 - DNA, 20 bp, Human herpesvirus 6B
tgatggcgagttctgatcat

SEQ ID NO: 59241 - DNA, 20 bp, Human herpesvirus 6B
catagagcatggcgcacgct

SEQ ID NO: 59242 - DNA, 20 bp, Human herpesvirus 6B
taacttcgacggacgatccc

SEQ ID NO: 59243 - DNA, 20 bp, Human herpesvirus 6B
aacttcgacggacgatccca

SEQ ID NO: 59244 - DNA, 20 bp, Human herpesvirus 6B
acttcgacggacgatcccat

SEQ ID NO: 59245 - DNA, 20 bp, Human herpesvirus 6B
gacggacgatcccatattgt

SEQ ID NO: 59246 - DNA, 20 bp, Human herpesvirus 6B
tctcgatataccggatcata

SEQ ID NO: 59247 - DNA, 20 bp, Human herpesvirus 6B
ctcgatataccggatcataa

SEQ ID NO: 59248 - DNA, 20 bp, Human herpesvirus 6B
tcgatataccggatcataac

SEQ ID NO: 59249 - DNA, 20 bp, Human herpesvirus 6B
cgtcgtttccgccaacaaat

SEQ ID NO: 59250 - DNA, 20 bp, Human herpesvirus 6B
ccgccaacaaatacagtgtc

SEQ ID NO: 59251 - DNA, 20 bp, Human herpesvirus 6B
ccccaggcagaaacatatcc

SEQ ID NO: 59252 - DNA, 20 bp, Human herpesvirus 6B
cccaggcagaaacatatcca

SEQ ID NO: 59253 - DNA, 20 bp, Human herpesvirus 6B
caatctctctgggcagcaaa

SEQ ID NO: 59254 - DNA, 20 bp, Human herpesvirus 6B
tttaaaaggaaaaataactt

SEQ ID NO: 59255 - DNA, 20 bp, Human herpesvirus 6B
aaaaggaaaaataactttat

SEQ ID NO: 59256 - DNA, 20 bp, Human herpesvirus 6B
gttgtgaagactccattgaa

SEQ ID NO: 59257 - DNA, 20 bp, Human herpesvirus 6B
tgaagactccattgaatgtt

SEQ ID NO: 59258 - DNA, 20 bp, Human herpesvirus 6B
aatgttcgttccaatgggcc

SEQ ID NO: 59259 - DNA, 20 bp, Human herpesvirus 6B
gttccaatgggccgatatcg

SEQ ID NO: 59260 - DNA, 20 bp, Human herpesvirus 6B
caatgggccgatatcgtcga

SEQ ID NO: 59261 - DNA, 20 bp, Human herpesvirus 6B
tcgtaagcattctactaaac

SEQ ID NO: 59262 - DNA, 20 bp, Human herpesvirus 6B
tactaaacgcgtataccgac

SEQ ID NO: 59263 - DNA, 20 bp, Human herpesvirus 6B
aaaaatacgtaaacccctgg

SEQ ID NO: 59264 - DNA, 20 bp, Human herpesvirus 6B
gccgttatggtctgtttgat

SEQ ID NO: 59265 - DNA, 20 bp, Human herpesvirus 6B
ccgttatggtctgtttgatc

SEQ ID NO: 59266 - DNA, 20 bp, Human herpesvirus 6B
ttagccactgcacccactaa

SEQ ID NO: 59267 - DNA, 20 bp, Human herpesvirus 6B
gccactgcacccactaaaca

SEQ ID NO: 59268 - DNA, 20 bp, Human herpesvirus 6B
caaacttgcaagcctgagct

SEQ ID NO: 59269 - DNA, 20 bp, Human herpesvirus 6B
caagcctgagctcgataaag

SEQ ID NO: 59270 - DNA, 20 bp, Human herpesvirus 6B
tagtgctttatcgagctcag

SEQ ID NO: 59271 - DNA, 20 bp, Human herpesvirus 6B
gatttaaccttaggcgtacc

SEQ ID NO: 59272 - DNA, 20 bp, Human herpesvirus 6B
aaccttaggcgtaccttggt

SEQ ID NO: 59273 - DNA, 20 bp, Human herpesvirus 6B
accttaggcgtaccttggtt

SEQ ID NO: 59274 - DNA, 20 bp, Human herpesvirus 6B
ggcgtaccttggtttttatg

SEQ ID NO: 59275 - DNA, 20 bp, Human herpesvirus 6B
gtttttatgtgaacgatgag

SEQ ID NO: 59276 - DNA, 20 bp, Human herpesvirus 6B
caggaaacgttgtcgtattg

SEQ ID NO: 59277 - DNA, 20 bp, Human herpesvirus 6B
tcgtattgcatctgtcggac

SEQ ID NO: 59278 - DNA, 20 bp, Human herpesvirus 6B
catctgtcggacttccacaa

SEQ ID NO: 59279 - DNA, 20 bp, Human herpesvirus 6B
cacaaccctgatgtaataaa

SEQ ID NO: 59280 - DNA, 20 bp, Human herpesvirus 6B
cgtgtgaagggtacaggttt

SEQ ID NO: 59281 - DNA, 20 bp, Human herpesvirus 6B
aaagtcagtcctcactaaga

SEQ ID NO: 59282 - DNA, 20 bp, Human herpesvirus 6B
gggagaaaatagatcaaggg

SEQ ID NO: 59283 - DNA, 20 bp, Human herpesvirus 6B
ttagcaacttgtcgcgatgc

SEQ ID NO: 59284 - DNA, 20 bp, Human herpesvirus 6B
gcaacttgtcgcgatgccct

SEQ ID NO: 59285 - DNA, 20 bp, Human herpesvirus 6B
tcgcgatgcccttgatctat

SEQ ID NO: 59286 - DNA, 20 bp, Human herpesvirus 6B
tgtatcttgcttcccatgtc

SEQ ID NO: 59287 - DNA, 20 bp, Human herpesvirus 6B
gtatcttgcttcccatgtct

SEQ ID NO: 59288 - DNA, 20 bp, Human herpesvirus 6B
tatcttgcttcccatgtctg

SEQ ID NO: 59289 - DNA, 20 bp, Human herpesvirus 6B
cttcccatgtctgatttaat

SEQ ID NO: 59290 - DNA, 20 bp, Human herpesvirus 6B
ccatgtctgatttaattcgc

SEQ ID NO: 59291 - DNA, 20 bp, Human herpesvirus 6B
acgataaagacagggctaaa

SEQ ID NO: 59292 - DNA, 20 bp, Human herpesvirus 6B
ccttgtgtcgtctgttgtta

SEQ ID NO: 59293 - DNA, 20 bp, Human herpesvirus 6B
tgtcgtctgttgttaggacc

SEQ ID NO: 59294 - DNA, 20 bp, Human herpesvirus 6B
ttaggaccggttgcggtgcc

SEQ ID NO: 59295 - DNA, 20 bp, Human herpesvirus 6B
ggaccggttgcggtgccatg

SEQ ID NO: 59296 - DNA, 20 bp, Human herpesvirus 6B
ccgcgttcgtttagcatatg

SEQ ID NO: 59297 - DNA, 20 bp, Human herpesvirus 6B
gtttagcatatgggcgtgat

SEQ ID NO: 59298 - DNA, 20 bp, Human herpesvirus 6B
agcatatgggcgtgatcttc

SEQ ID NO: 59299 - DNA, 20 bp, Human herpesvirus 6B
gcatatgggcgtgatcttcg

SEQ ID NO: 59300 - DNA, 20 bp, Human herpesvirus 6B
gcatacgtaagaaactacgg

SEQ ID NO: 59301 - DNA, 20 bp, Human herpesvirus 6B
tgcagggtgctttgcttcag

SEQ ID NO: 59302 - DNA, 20 bp, Human herpesvirus 6B
gcttcagtggaagattctct

SEQ ID NO: 59303 - DNA, 20 bp, Human herpesvirus 6B
cttcagtggaagattctcta

SEQ ID NO: 59304 - DNA, 20 bp, Human herpesvirus 6B
agtggaagattctctaatgc

SEQ ID NO: 59305 - DNA, 20 bp, Human herpesvirus 6B
tctaatgcgaacactagtcc

SEQ ID NO: 59306 - DNA, 20 bp, Human herpesvirus 6B
gaatcccaactctttttcgc

SEQ ID NO: 59307 - DNA, 20 bp, Human herpesvirus 6B
ttcgcagatggtcttgtatt

SEQ ID NO: 59308 - DNA, 20 bp, Human herpesvirus 6B
tcgcagatggtcttgtattc

SEQ ID NO: 59309 - DNA, 20 bp, Human herpesvirus 6B
cgcagatggtcttgtattcc

SEQ ID NO: 59310 - DNA, 20 bp, Human herpesvirus 6B
gcagatggtcttgtattcca

SEQ ID NO: 59311 - DNA, 20 bp, Human herpesvirus 6B
agcgctcgcgataaagagag

SEQ ID NO: 59312 - DNA, 20 bp, Human herpesvirus 6B
tcgaggtcatggtccagatc

SEQ ID NO: 59313 - DNA, 20 bp, Human herpesvirus 6B
tagcgatcacaatcgttatt

SEQ ID NO: 59314 - DNA, 20 bp, Human herpesvirus 6B
tgatcgctataacccggatc

SEQ ID NO: 59315 - DNA, 20 bp, Human herpesvirus 6B
atcgcgagcgctgaacatag

SEQ ID NO: 59316 - DNA, 20 bp, Human herpesvirus 6B
ataatttgttttttgaacag

SEQ ID NO: 59317 - DNA, 20 bp, Human herpesvirus 6B
gttttttgaacaggtctcga

SEQ ID NO: 59318 - DNA, 20 bp, Human herpesvirus 6B
ttttttgaacaggtctcgaa

SEQ ID NO: 59319 - DNA, 20 bp, Human herpesvirus 6B
tttgaacaggtctcgaacgt

SEQ ID NO: 59320 - DNA, 20 bp, Human herpesvirus 6B
ttgaacaggtctcgaacgtc

SEQ ID NO: 59321 - DNA, 20 bp, Human herpesvirus 6B
atgcgtattctcactcaatg

SEQ ID NO: 59322 - DNA, 20 bp, Human herpesvirus 6B
tcactcaatggttgtctatg

SEQ ID NO: 59323 - DNA, 20 bp, Human herpesvirus 6B
tctatgtgtgacgtccgcat

SEQ ID NO: 59324 - DNA, 20 bp, Human herpesvirus 6B
tccggactataccatgatgc

SEQ ID NO: 59325 - DNA, 20 bp, Human herpesvirus 6B
agtgagaatacgcatcaaga

SEQ ID NO: 59326 - DNA, 20 bp, Human herpesvirus 6B
cacgcggcagatccgtctct

SEQ ID NO: 59327 - DNA, 20 bp, Human herpesvirus 6B
gttaacgggatcgtcccctt

SEQ ID NO: 59328 - DNA, 20 bp, Human herpesvirus 6B
acgggatcgtccccttggct

SEQ ID NO: 59329 - DNA, 20 bp, Human herpesvirus 6B
gctcgtgctcctacaagcgc

SEQ ID NO: 59330 - DNA, 20 bp, Human herpesvirus 6B
taggagcacgagccaagggg

SEQ ID NO: 59331 - DNA, 20 bp, Human herpesvirus 6B
gagtgggagagaacagagct

SEQ ID NO: 59332 - DNA, 20 bp, Human herpesvirus 6B
gttttccgtgtcacggcgcg

SEQ ID NO: 59333 - DNA, 20 bp, Human herpesvirus 6B
tccgtgtcacggcgcgcgca

SEQ ID NO: 59334 - DNA, 20 bp, Human herpesvirus 6B
ccgtgtcacggcgcgcgcat

SEQ ID NO: 59335 - DNA, 20 bp, Human herpesvirus 6B
cgtgtcacggcgcgcgcata

SEQ ID NO: 59336 - DNA, 20 bp, Human herpesvirus 6B
gcccgtttacatcggggtcc

SEQ ID NO: 59337 - DNA, 20 bp, Human herpesvirus 6B
acatcggggtccgcagacgc

SEQ ID NO: 59338 - DNA, 20 bp, Human herpesvirus 6B
catcggggtccgcagacgcg

SEQ ID NO: 59339 - DNA, 20 bp, Human herpesvirus 6B
tgccagggcgttgcgctgtc

SEQ ID NO: 59340 - DNA, 20 bp, Human herpesvirus 6B
cgctgtcggttccgcacaaa

SEQ ID NO: 59341 - DNA, 20 bp, Human herpesvirus 6B
gcaaggcgagggctgcagcg

SEQ ID NO: 59342 - DNA, 20 bp, Human herpesvirus 6B
caaggcgagggctgcagcgg

SEQ ID NO: 59343 - DNA, 20 bp, Human herpesvirus 6B
ctcatacgccacggggtccc

SEQ ID NO: 59344 - DNA, 20 bp, Human herpesvirus 6B
caaactccgttacgttcgac

SEQ ID NO: 59345 - DNA, 20 bp, Human herpesvirus 6B
cgttcgacgccagacggcag

SEQ ID NO: 59346 - DNA, 20 bp, Influenza A virus
aactgtataggaagctcaag

SEQ ID NO: 59347 - DNA, 20 bp, Influenza A virus
catggggccaaagaaatctc

SEQ ID NO: 59348 - DNA, 20 bp, Influenza A virus
ctttggccccatggaatgtt

SEQ ID NO: 59349 - DNA, 20 bp, Influenza A virus
tttggccccatggaatgtta

SEQ ID NO: 59350 - DNA, 20 bp, Influenza A virus
ggccccatggaatgttatct

SEQ ID NO: 59351 - DNA, 20 bp, Influenza A virus
ggatcttgcacttgatattg

SEQ ID NO: 59352 - DNA, 20 bp, Influenza A virus
cacttgatattgtggattct

SEQ ID NO: 59353 - DNA, 20 bp, Influenza A virus
atattgtggattcttgatcg

SEQ ID NO: 59354 - DNA, 20 bp, Influenza A virus
tggattcttgatcgtctttt

SEQ ID NO: 59355 - DNA, 20 bp, Influenza A virus
ttgatcgtctttttttcaaa

SEQ ID NO: 59356 - DNA, 20 bp, Influenza A virus
gcagacaatggattgggtga

SEQ ID NO: 59357 - DNA, 20 bp, Influenza A virus
cagacaatggattgggtgat

SEQ ID NO: 59358 - DNA, 20 bp, Influenza A virus
ggtgatgccccattccttga

SEQ ID NO: 59359 - DNA, 20 bp, Influenza A virus
cttgatcggctccgccgaga

SEQ ID NO: 59360 - DNA, 20 bp, Influenza A virus
atcggctccgccgagatcaa

SEQ ID NO: 59361 - DNA, 20 bp, Influenza A virus
atgctcatgcctaggcaaaa

SEQ ID NO: 59362 - DNA, 20 bp, Influenza A virus
gcgtgcgattggaccaggcg

SEQ ID NO: 59363 - DNA, 20 bp, Influenza A virus
cgtgcgattggaccaggcga

SEQ ID NO: 59364 - DNA, 20 bp, Influenza A virus
gaccaggcgatcatggaaaa

SEQ ID NO: 59365 - DNA, 20 bp, Influenza A virus
agtgtaatctttaaccgatt

SEQ ID NO: 59366 - DNA, 20 bp, Influenza A virus
gagtctctgaaaatatacag

SEQ ID NO: 59367 - DNA, 20 bp, Influenza A virus
gcttggagaaactgtgatga

SEQ ID NO: 59368 - DNA, 20 bp, Influenza A virus
gagaaactgtgatgagaatg

SEQ ID NO: 59369 - DNA, 20 bp, Influenza A virus
actacctccagagcagaaat

SEQ ID NO: 59370 - DNA, 20 bp, Influenza A virus
tcatttctgctctggaggta

SEQ ID NO: 59371 - DNA, 20 bp, Human papillomavirus type 7
cggctccacagctagaactt

SEQ ID NO: 59372 - DNA, 20 bp, Human papillomavirus type 7
aaataaagttctagctgtgg

SEQ ID NO: 59373 - DNA, 20 bp, Human papillomavirus type 7
tagctgtggagccgcaacgt

SEQ ID NO: 59374 - DNA, 20 bp, Human papillomavirus type 7
tttgggttggtttttatatg

SEQ ID NO: 59375 - DNA, 20 bp, Human papillomavirus type 7
ttgggttggtttttatatgt

SEQ ID NO: 59376 - DNA, 20 bp, Human papillomavirus type 7
agatacgctgcatatgcacc

SEQ ID NO: 59377 - DNA, 20 bp, Human papillomavirus type 7
gatacgctgcatatgcacca

SEQ ID NO: 59378 - DNA, 20 bp, Human papillomavirus type 7
acaattttagaagtgagaat

SEQ ID NO: 59379 - DNA, 20 bp, Human papillomavirus type 7
tagaagtgagaataagatgc

SEQ ID NO: 59380 - DNA, 20 bp, Human papillomavirus type 7
agaagtgagaataagatgct

SEQ ID NO: 59381 - DNA, 20 bp, Human papillomavirus type 7
caagtaaatttgcaatcatt

SEQ ID NO: 59382 - DNA, 20 bp, Human papillomavirus type 7
gcaatcatttaaaatagtaa

SEQ ID NO: 59383 - DNA, 20 bp, Human papillomavirus type 7
caatcatttaaaatagtaac

SEQ ID NO: 59384 - DNA, 20 bp, Human papillomavirus type 7
ctattttaaatgattgcaaa

SEQ ID NO: 59385 - DNA, 20 bp, Human papillomavirus type 7
taaatgattgcaaatttact

SEQ ID NO: 59386 - DNA, 20 bp, Human papillomavirus type 7
aggtacagaggatgtggggt

SEQ ID NO: 59387 - DNA, 20 bp, Human papillomavirus type 7
aggatggtttttagttgagg

SEQ ID NO: 59388 - DNA, 20 bp, Human papillomavirus type 7
ttagttgaggctgtggtaga

SEQ ID NO: 59389 - DNA, 20 bp, Human papillomavirus type 7
tagttgaggctgtggtagat

SEQ ID NO: 59390 - DNA, 20 bp, Human papillomavirus type 7
agttgaggctgtggtagata

SEQ ID NO: 59391 - DNA, 20 bp, Human papillomavirus type 7
aagtgctagaagaaagcagt

SEQ ID NO: 59392 - DNA, 20 bp, Human papillomavirus type 7
tacagcaacttagtccgcgt

SEQ ID NO: 59393 - DNA, 20 bp, Human papillomavirus type 7
gtccgcgtacacaggtggta

SEQ ID NO: 59394 - DNA, 20 bp, Human papillomavirus type 7
aaatgcaaggatttaaatgc

SEQ ID NO: 59395 - DNA, 20 bp, Human papillomavirus type 7
aatgcaaggatttaaatgct

SEQ ID NO: 59396 - DNA, 20 bp, Human papillomavirus type 7
cttgcattgtgtagatataa

SEQ ID NO: 59397 - DNA, 20 bp, Human papillomavirus type 7
cattgtgtagatataaggta

SEQ ID NO: 59398 - DNA, 20 bp, Human papillomavirus type 7
tgtagatataaggtagcaaa

SEQ ID NO: 59399 - DNA, 20 bp, Human papillomavirus type 7
ccaaaatgttaaatgtacca

SEQ ID NO: 59400 - DNA, 20 bp, Human papillomavirus type 7
aatgtaccagataatcaact

SEQ ID NO: 59401 - DNA, 20 bp, Human papillomavirus type 7
agtttaactcagatggtgca

SEQ ID NO: 59402 - DNA, 20 bp, Human papillomavirus type 7
gtttaactcagatggtgcag

SEQ ID NO: 59403 - DNA, 20 bp, Human papillomavirus type 7
aactcagatggtgcagtggg

SEQ ID NO: 59404 - DNA, 20 bp, Human papillomavirus type 7
actcagatggtgcagtgggc

SEQ ID NO: 59405 - DNA, 20 bp, Human papillomavirus type 7
ttatgcacaaatagcagata

SEQ ID NO: 59406 - DNA, 20 bp, Human papillomavirus type 7
gtgccaggaacagttgttag

SEQ ID NO: 59407 - DNA, 20 bp, Human papillomavirus type 7
tgccaggaacagttgttaga

SEQ ID NO: 59408 - DNA, 20 bp, Human papillomavirus type 7
ttagaactttatgaacaaga

SEQ ID NO: 59409 - DNA, 20 bp, Human papillomavirus type 7
gaactttatgaacaagacag

SEQ ID NO: 59410 - DNA, 20 bp, Human papillomavirus type 7
atgaacaagacagcaaacag

SEQ ID NO: 59411 - DNA, 20 bp, Human papillomavirus type 7
gcaaactactgaatataact

SEQ ID NO: 59412 - DNA, 20 bp, Human papillomavirus type 7
caaactactgaatataactt

SEQ ID NO: 59413 - DNA, 20 bp, Human papillomavirus type 7
gagccatggacgttacagga

SEQ ID NO: 59414 - DNA, 20 bp, Human papillomavirus type 7
caggacacaagtcaagaact

SEQ ID NO: 59415 - DNA, 20 bp, Human papillomavirus type 7
cagaaccaaagaaatgtttt

SEQ ID NO: 59416 - DNA, 20 bp, Human papillomavirus type 7
aaagcaacaacaaaatcagg

SEQ ID NO: 59417 - DNA, 20 bp, Human papillomavirus type 7
ctgattttgttgttgctttc

SEQ ID NO: 59418 - DNA, 20 bp, Human papillomavirus type 7
tgttgttgctttcaatatca

SEQ ID NO: 59419 - DNA, 20 bp, Human papillomavirus type 7
gttgttgctttcaatatcag

SEQ ID NO: 59420 - DNA, 20 bp, Human papillomavirus type 7
ttgttgctttcaatatcagg

SEQ ID NO: 59421 - DNA, 20 bp, Human papillomavirus type 7
tagatatatcttctactaat

SEQ ID NO: 59422 - DNA, 20 bp, Human papillomavirus type 7
agatatatcttctactaata

SEQ ID NO: 59423 - DNA, 20 bp, Human papillomavirus type 7
gatatatcttctactaatac

SEQ ID NO: 59424 - DNA, 20 bp, Human papillomavirus type 7
tactaatacagtacatgtta

SEQ ID NO: 59425 - DNA, 20 bp, Human papillomavirus type 7
catctaccacacaccataac

SEQ ID NO: 59426 - DNA, 20 bp, Human papillomavirus type 7
ccttctgttcctgcaggtac

SEQ ID NO: 59427 - DNA, 20 bp, Human papillomavirus type 7
cttctgttcctgcaggtaca

SEQ ID NO: 59428 - DNA, 20 bp, Human papillomavirus type 7
tgttcctgcaggtacaccat

SEQ ID NO: 59429 - DNA, 20 bp, Human papillomavirus type 7
ctgcaggtacaccatatttg

SEQ ID NO: 59430 - DNA, 20 bp, Human papillomavirus type 7
gcctgtgtcaccttctatac

SEQ ID NO: 59431 - DNA, 20 bp, Human papillomavirus type 7
agagtacgcttgcccgaccc

SEQ ID NO: 59432 - DNA, 20 bp, Human papillomavirus type 7
gagtacgcttgcccgaccct

SEQ ID NO: 59433 - DNA, 20 bp, Human papillomavirus type 7
cccgaccctaataaatttgg

SEQ ID NO: 59434 - DNA, 20 bp, Human papillomavirus type 7
attagggtcgggcaagcgta

SEQ ID NO: 59435 - DNA, 20 bp, Human papillomavirus type 7
ttagggtcgggcaagcgtac

SEQ ID NO: 59436 - DNA, 20 bp, Human papillomavirus type 7
tgtattgtaggctgtactcc

SEQ ID NO: 59437 - DNA, 20 bp, Human papillomavirus type 7
taggctgtactcctcctatt

SEQ ID NO: 59438 - DNA, 20 bp, Human papillomavirus type 7
gagaatattggggtatgggt

SEQ ID NO: 59439 - DNA, 20 bp, Human papillomavirus type 7
gggtatgggtacaccgtgca

SEQ ID NO: 59440 - DNA, 20 bp, Human papillomavirus type 7
taaagtgtctcctggtgact

SEQ ID NO: 59441 - DNA, 20 bp, Human papillomavirus type 7
ctcttctgggtcagtcaccc

SEQ ID NO: 59442 - DNA, 20 bp, Human papillomavirus type 7
tgggtcagtcacccccaaac

SEQ ID NO: 59443 - DNA, 20 bp, Human papillomavirus type 7
tgtatgtgtgtgtgtgtgat

SEQ ID NO: 59444 - DNA, 20 bp, Human papillomavirus type 7
cactcccttatgtgttgtta

SEQ ID NO: 59445 - DNA, 20 bp, Human papillomavirus type 7
tgttttcttacgtttggggg

SEQ ID NO: 59446 - DNA, 20 bp, Human papillomavirus type 7
gggtgaggttgccacacctt

SEQ ID NO: 59447 - DNA, 20 bp, Human papillomavirus type 7
ccacacctttaattacactt

SEQ ID NO: 59448 - DNA, 20 bp, Human papillomavirus type 7
aattacacttttattgcact

SEQ ID NO: 59449 - DNA, 20 bp, Human papillomavirus type 7
attacacttttattgcactg

SEQ ID NO: 59450 - DNA, 20 bp, Human papillomavirus type 7
cacttttattgcactgttac

SEQ ID NO: 59451 - DNA, 20 bp, Human papillomavirus type 53
tttgaaaatacagaagagcg

SEQ ID NO: 59452 - DNA, 20 bp, Human papillomavirus type 53
gaaaatacagaagagcgacc

SEQ ID NO: 59453 - DNA, 20 bp, Human papillomavirus type 53
aaaatacagaagagcgacca

SEQ ID NO: 59454 - DNA, 20 bp, Human papillomavirus type 53
caccagctatgtgaagttgt

SEQ ID NO: 59455 - DNA, 20 bp, Human papillomavirus type 53
tgaataaaccattgctggag

SEQ ID NO: 59456 - DNA, 20 bp, Human papillomavirus type 53
agatattacaattgttcagt

SEQ ID NO: 59457 - DNA, 20 bp, Human papillomavirus type 53
caattgttcagtgtacgggg

SEQ ID NO: 59458 - DNA, 20 bp, Human papillomavirus type 53
ttcagtgtacggggctagcc

SEQ ID NO: 59459 - DNA, 20 bp, Human papillomavirus type 53
agtgtacggggctagcctgg

SEQ ID NO: 59460 - DNA, 20 bp, Human papillomavirus type 53
tctgatttatcaataaggtg

SEQ ID NO: 59461 - DNA, 20 bp, Human papillomavirus type 53
cacaatatattatagaactt

SEQ ID NO: 59462 - DNA, 20 bp, Human papillomavirus type 53
tagaacttataccacaaact

SEQ ID NO: 59463 - DNA, 20 bp, Human papillomavirus type 53
taccacaaactgagattgac

SEQ ID NO: 59464 - DNA, 20 bp, Human papillomavirus type 53
acctgcaatgccatgagcaa

SEQ ID NO: 59465 - DNA, 20 bp, Human papillomavirus type 53
aacagctcagaggatgagga

SEQ ID NO: 59466 - DNA, 20 bp, Human papillomavirus type 53
catgccaaaacacacatgca

SEQ ID NO: 59467 - DNA, 20 bp, Human papillomavirus type 53
aaacgaaagtatttaggcag

SEQ ID NO: 59468 - DNA, 20 bp, Human papillomavirus type 53
aggcagtccattaggtgata

SEQ ID NO: 59469 - DNA, 20 bp, Human papillomavirus type 53
ggcagtccattaggtgatat

SEQ ID NO: 59470 - DNA, 20 bp, Human papillomavirus type 53
ggtgatattagtaatcagca

SEQ ID NO: 59471 - DNA, 20 bp, Human papillomavirus type 53
ctacattttaatatatcttg

SEQ ID NO: 59472 - DNA, 20 bp, Human papillomavirus type 53
taatatatcttgtatttgtt

SEQ ID NO: 59473 - DNA, 20 bp, Human papillomavirus type 53
aatatatcttgtatttgttg

SEQ ID NO: 59474 - DNA, 20 bp, Human papillomavirus type 53
atatatcttgtatttgttgc

SEQ ID NO: 59475 - DNA, 20 bp, Human papillomavirus type 53
tatttgttgcagtggcatta

SEQ ID NO: 59476 - DNA, 20 bp, Human papillomavirus type 53
caacatagctttgaggactg

SEQ ID NO: 59477 - DNA, 20 bp, Human papillomavirus type 53
gaggactgtcaatttgaact

SEQ ID NO: 59478 - DNA, 20 bp, Human papillomavirus type 53
aggactgtcaatttgaacta

SEQ ID NO: 59479 - DNA, 20 bp, Human papillomavirus type 53
gaactatctaaaatggtgca

SEQ ID NO: 59480 - DNA, 20 bp, Human papillomavirus type 53
aactatctaaaatggtgcag

SEQ ID NO: 59481 - DNA, 20 bp, Human papillomavirus type 53
ctaaggtatcaaggggtcga

SEQ ID NO: 59482 - DNA, 20 bp, Human papillomavirus type 53
atttcatttttaagttattt

SEQ ID NO: 59483 - DNA, 20 bp, Human papillomavirus type 53
tttcatttttaagttatttt

SEQ ID NO: 59484 - DNA, 20 bp, Human papillomavirus type 53
catttttaagttattttaaa

SEQ ID NO: 59485 - DNA, 20 bp, Human papillomavirus type 53
atttttaagttattttaaat

SEQ ID NO: 59486 - DNA, 20 bp, Human papillomavirus type 53
aataatgcaaactggaaatg

SEQ ID NO: 59487 - DNA, 20 bp, Human papillomavirus type 53
ttttgaaaggacatggtcca

SEQ ID NO: 59488 - DNA, 20 bp, Human papillomavirus type 53
tttgaaaggacatggtccag

SEQ ID NO: 59489 - DNA, 20 bp, Human papillomavirus type 53
ttgaaaggacatggtccaga

SEQ ID NO: 59490 - DNA, 20 bp, Human papillomavirus type 53
tgaaaggacatggtccagat

SEQ ID NO: 59491 - DNA, 20 bp, Human papillomavirus type 53
tgcagtaagctatgagggca

SEQ ID NO: 59492 - DNA, 20 bp, Human papillomavirus type 53
tatacatgacggccataaaa

SEQ ID NO: 59493 - DNA, 20 bp, Human papillomavirus type 53
tacaaactttaaagacgagg

SEQ ID NO: 59494 - DNA, 20 bp, Human papillomavirus type 53
aaagacgaggccaccaaata

SEQ ID NO: 59495 - DNA, 20 bp, Human papillomavirus type 53
aagacgaggccaccaaatat

SEQ ID NO: 59496 - DNA, 20 bp, Human papillomavirus type 53
tgggacgttttcccggccgc

SEQ ID NO: 59497 - DNA, 20 bp, Human papillomavirus type 53
tcccggccgcagggatgatg

SEQ ID NO: 59498 - DNA, 20 bp, Human papillomavirus type 53
cccggccgcagggatgatga

SEQ ID NO: 59499 - DNA, 20 bp, Human papillomavirus type 53
ccggccgcagggatgatgag

SEQ ID NO: 59500 - DNA, 20 bp, Human papillomavirus type 53
gttactgtatcatccaccta

SEQ ID NO: 59501 - DNA, 20 bp, Human papillomavirus type 53
ttactgtatcatccacctat

SEQ ID NO: 59502 - DNA, 20 bp, Human papillomavirus type 53
ctgtatcatccacctatcat

SEQ ID NO: 59503 - DNA, 20 bp, Human papillomavirus type 53
gacaaatgtaaactgtgctg

SEQ ID NO: 59504 - DNA, 20 bp, Human papillomavirus type 53
tattactgttgtatataaag

SEQ ID NO: 59505 - DNA, 20 bp, Human papillomavirus type 53
caaccattgtgttgtgtgtt

SEQ ID NO: 59506 - DNA, 20 bp, Human papillomavirus type 53
tgttgtgtgttagttttgtg

SEQ ID NO: 59507 - DNA, 20 bp, Human papillomavirus type 53
tgtgttagttttgtgttttt

SEQ ID NO: 59508 - DNA, 20 bp, Human papillomavirus type 53
gttttgtgtttttgctttgc

SEQ ID NO: 59509 - DNA, 20 bp, Human papillomavirus type 53
tgtgtttttgctttgctgct

SEQ ID NO: 59510 - DNA, 20 bp, Human papillomavirus type 53
gtagaccctcctgttattga

SEQ ID NO: 59511 - DNA, 20 bp, Human papillomavirus type 53
tagaccctcctgttattgag

SEQ ID NO: 59512 - DNA, 20 bp, Human papillomavirus type 53
ttgaggtcccccaaactggt

SEQ ID NO: 59513 - DNA, 20 bp, Human papillomavirus type 53
aggtcccccaaactggtgag

SEQ ID NO: 59514 - DNA, 20 bp, Human papillomavirus type 53
ataagtaccccaacatctgg

SEQ ID NO: 59515 - DNA, 20 bp, Human papillomavirus type 53
accttttcaccatcaggtgt

SEQ ID NO: 59516 - DNA, 20 bp, Human papillomavirus type 53
tcaccatcaggtgtggcacc

SEQ ID NO: 59517 - DNA, 20 bp, Human papillomavirus type 53
caccatcaggtgtggcacct

SEQ ID NO: 59518 - DNA, 20 bp, Human papillomavirus type 53
accatcaggtgtggcacctg

SEQ ID NO: 59519 - DNA, 20 bp, Human papillomavirus type 53
tttagacattgtggctttac

SEQ ID NO: 59520 - DNA, 20 bp, Human papillomavirus type 53
tacagggctccacatttgcg

SEQ ID NO: 59521 - DNA, 20 bp, Human papillomavirus type 53
gcgttatggcctgtttattt

SEQ ID NO: 59522 - DNA, 20 bp, Human papillomavirus type 53
cgttatggcctgtttatttt

SEQ ID NO: 59523 - DNA, 20 bp, Human papillomavirus type 53
tggcctgtttattttttgaa

SEQ ID NO: 59524 - DNA, 20 bp, Human papillomavirus type 53
attttttgaaacgtaggcgt

SEQ ID NO: 59525 - DNA, 20 bp, Human papillomavirus type 53
gtcgcctcctgttgccacta

SEQ ID NO: 59526 - DNA, 20 bp, Human papillomavirus type 53
tcgcctcctgttgccactag

SEQ ID NO: 59527 - DNA, 20 bp, Human papillomavirus type 53
ccactagcttagaggacaaa

SEQ ID NO: 59528 - DNA, 20 bp, Human papillomavirus type 53
gaggacaaatacagatatgt

SEQ ID NO: 59529 - DNA, 20 bp, Human papillomavirus type 53
tgacaggttatagctgcact

SEQ ID NO: 59530 - DNA, 20 bp, Human papillomavirus type 53
gtcacttactgtaggctgcc

SEQ ID NO: 59531 - DNA, 20 bp, Human papillomavirus type 53
ctgtaggctgccaactatgc

SEQ ID NO: 59532 - DNA, 20 bp, Human papillomavirus type 53
tacctgcataccttagtgct

SEQ ID NO: 59533 - DNA, 20 bp, Human papillomavirus type 53
acctgcataccttagtgctt

SEQ ID NO: 59534 - DNA, 20 bp, Human papillomavirus type 53
cctgcataccttagtgcttt

SEQ ID NO: 59535 - DNA, 20 bp, Human rhinovirus 1
ttccggtaactttgtacgcc

SEQ ID NO: 59536 - DNA, 20 bp, Human rhinovirus 1
cggtaactttgtacgccagt

SEQ ID NO: 59537 - DNA, 20 bp, Human rhinovirus 1
gtacgccagtttttccctcc

SEQ ID NO: 59538 - DNA, 20 bp, Human rhinovirus 1
tacgccagtttttccctccc

SEQ ID NO: 59539 - DNA, 20 bp, Human rhinovirus 1
ttccctcccctccccatcct

SEQ ID NO: 59540 - DNA, 20 bp, Human rhinovirus 1
cagatgaggctggacattcc

SEQ ID NO: 59541 - DNA, 20 bp, Human rhinovirus 1
cccactggtaacagtggtcc

SEQ ID NO: 59542 - DNA, 20 bp, Human rhinovirus 1
acaccctgtccgatctttgg

SEQ ID NO: 59543 - DNA, 20 bp, Human rhinovirus 1
ggcttcacacctcatgagag

SEQ ID NO: 59544 - DNA, 20 bp, Human rhinovirus 1
gcttcacacctcatgagagg

SEQ ID NO: 59545 - DNA, 20 bp, Human rhinovirus 1
gaaaaggggatcccaacact

SEQ ID NO: 59546 - DNA, 20 bp, Human rhinovirus 1
aggcttgtggctattcagac

SEQ ID NO: 59547 - DNA, 20 bp, Human rhinovirus 1
tggctattcagacaggatta

SEQ ID NO: 59548 - DNA, 20 bp, Human rhinovirus 1
agacaggattatgcaaataa

SEQ ID NO: 59549 - DNA, 20 bp, Human rhinovirus 1
tgcaaataaccagaggagat

SEQ ID NO: 59550 - DNA, 20 bp, Human rhinovirus 1
tctggtgcaagagcaaaaaa

SEQ ID NO: 59551 - DNA, 20 bp, Human rhinovirus 1
ctggtgcaagagcaaaaaac

SEQ ID NO: 59552 - DNA, 20 bp, Human rhinovirus 1
tggtgcaagagcaaaaaaca

SEQ ID NO: 59553 - DNA, 20 bp, Human rhinovirus 1
aacaaggattacctgtatat

SEQ ID NO: 59554 - DNA, 20 bp, Human rhinovirus 1
cctgtatatataactccagg

SEQ ID NO: 59555 - DNA, 20 bp, Human rhinovirus 1
tcaataaaagtagacattac

SEQ ID NO: 59556 - DNA, 20 bp, Human rhinovirus 1
caataaaagtagacattaca

SEQ ID NO: 59557 - DNA, 20 bp, Human rhinovirus 1
aataaaagtagacattacat

SEQ ID NO: 59558 - DNA, 20 bp, Human rhinovirus 1
catcacagcctttggctaca

SEQ ID NO: 59559 - DNA, 20 bp, Human rhinovirus 1
ggctacaactttaattgggg

SEQ ID NO: 59560 - DNA, 20 bp, Human rhinovirus 1
tgtgggatgttggattgcag

SEQ ID NO: 59561 - DNA, 20 bp, Human rhinovirus 1
gattgcagtctactatatct

SEQ ID NO: 59562 - DNA, 20 bp, Human rhinovirus 1
cagtctactatatctcttgt

SEQ ID NO: 59563 - DNA, 20 bp, Human rhinovirus 1
ttgtaccatgggtgagtgcc

SEQ ID NO: 59564 - DNA, 20 bp, Human rhinovirus 1
taccatgggtgagtgccagc

SEQ ID NO: 59565 - DNA, 20 bp, Human rhinovirus 1
tgtccacatctcaagaataa

SEQ ID NO: 59566 - DNA, 20 bp, Human rhinovirus 1
attacactgactataatgga

SEQ ID NO: 59567 - DNA, 20 bp, Human rhinovirus 1
cactgactataatggacagg

SEQ ID NO: 59568 - DNA, 20 bp, Human rhinovirus 1
cacaaaatggaaaatcacac

SEQ ID NO: 59569 - DNA, 20 bp, Human rhinovirus 1
acaaaatggaaaatcacact

SEQ ID NO: 59570 - DNA, 20 bp, Human rhinovirus 1
aaaaagaaacgatttctcat

SEQ ID NO: 59571 - DNA, 20 bp, Human rhinovirus 1
ctcatggcaatcaggcacca

SEQ ID NO: 59572 - DNA, 20 bp, Human rhinovirus 1
tcatggcaatcaggcaccaa

SEQ ID NO: 59573 - DNA, 20 bp, Human rhinovirus 1
tggcaacatggacagccatt

SEQ ID NO: 59574 - DNA, 20 bp, Human rhinovirus 1
cctagattttctttaccatt

SEQ ID NO: 59575 - DNA, 20 bp, Human rhinovirus 1
atagatcttagacaatttca

SEQ ID NO: 59576 - DNA, 20 bp, Human rhinovirus 1
tagatcttagacaatttcac

SEQ ID NO: 59577 - DNA, 20 bp, Human rhinovirus 1
gacaatttcactgtgctgag

SEQ ID NO: 59578 - DNA, 20 bp, Human rhinovirus 1
cactgtgctgaggaacaagg

SEQ ID NO: 59579 - DNA, 20 bp, Human rhinovirus 1
actgtgctgaggaacaaggc

SEQ ID NO: 59580 - DNA, 20 bp, Human rhinovirus 1
acactaattggttgcaatgg

SEQ ID NO: 59581 - DNA, 20 bp, Human rhinovirus 1
gttgcaatggttcaccatgg

SEQ ID NO: 59582 - DNA, 20 bp, Human rhinovirus 1
caatggttcaccatggagat

SEQ ID NO: 59583 - DNA, 20 bp, Human rhinovirus 1
accatggagatttctcaaag

SEQ ID NO: 59584 - DNA, 20 bp, Human rhinovirus 1
ctcaaagaaaagttttgcaa

SEQ ID NO: 59585 - DNA, 20 bp, Human rhinovirus 1
acaatcacattttggaagaa

SEQ ID NO: 59586 - DNA, 20 bp, Human rhinovirus 1
caatcacattttggaagaag

SEQ ID NO: 59587 - DNA, 20 bp, Human rhinovirus 1
tggaagaagacaaaagaagg

SEQ ID NO: 59588 - DNA, 20 bp, Human rhinovirus 1
ggaagaagacaaaagaagga

SEQ ID NO: 59589 - DNA, 20 bp, Human rhinovirus 1
gaagaagacaaaagaaggag

SEQ ID NO: 59590 - DNA, 20 bp, Human papillomavirus type 166
ggcagtgatctttatccagg

SEQ ID NO: 59591 - DNA, 20 bp, Human papillomavirus type 166
gcagtgatctttatccaggt

SEQ ID NO: 59592 - DNA, 20 bp, Human papillomavirus type 166
atccaggtaagtacaagctg

SEQ ID NO: 59593 - DNA, 20 bp, Human papillomavirus type 166
tccaggtaagtacaagctga

SEQ ID NO: 59594 - DNA, 20 bp, Human papillomavirus type 166
atgagtcaaaaggttggcac

SEQ ID NO: 59595 - DNA, 20 bp, Human papillomavirus type 166
ttaaggcttcagcgcttgaa

SEQ ID NO: 59596 - DNA, 20 bp, Human papillomavirus type 166
aggcttcagcgcttgaaggt

SEQ ID NO: 59597 - DNA, 20 bp, Human papillomavirus type 166
agcgcttgaaggtcttttgc

SEQ ID NO: 59598 - DNA, 20 bp, Human papillomavirus type 166
aaggtcttttgcataaatct

SEQ ID NO: 59599 - DNA, 20 bp, Human papillomavirus type 166
tgcataaatctttacagagc

SEQ ID NO: 59600 - DNA, 20 bp, Human papillomavirus type 166
gatacatttgaagatatttt

SEQ ID NO: 59601 - DNA, 20 bp, Human papillomavirus type 166
gaagatattttcgatgaaag

SEQ ID NO: 59602 - DNA, 20 bp, Human papillomavirus type 166
aagatattttcgatgaaagt

SEQ ID NO: 59603 - DNA, 20 bp, Human papillomavirus type 166
tcgatgaaagtacagatggt

SEQ ID NO: 59604 - DNA, 20 bp, Human papillomavirus type 166
cgatgaaagtacagatggtt

SEQ ID NO: 59605 - DNA, 20 bp, Human papillomavirus type 166
ggttacggttgtatttaatg

SEQ ID NO: 59606 - DNA, 20 bp, Human papillomavirus type 166
cggttgtatttaatgcttta

SEQ ID NO: 59607 - DNA, 20 bp, Human papillomavirus type 166
tatttaatgctttagaagaa

SEQ ID NO: 59608 - DNA, 20 bp, Human papillomavirus type 166
aatgctttagaagaagtaat

SEQ ID NO: 59609 - DNA, 20 bp, Human papillomavirus type 166
atgctttagaagaagtaatt

SEQ ID NO: 59610 - DNA, 20 bp, Human papillomavirus type 166
tttaaattgtaataatcaag

SEQ ID NO: 59611 - DNA, 20 bp, Human papillomavirus type 166
ttaaattgtaataatcaagt

SEQ ID NO: 59612 - DNA, 20 bp, Human papillomavirus type 166
taaattgtaataatcaagta

SEQ ID NO: 59613 - DNA, 20 bp, Human papillomavirus type 166
aaattgtaataatcaagtaa

SEQ ID NO: 59614 - DNA, 20 bp, Human papillomavirus type 166
aattgtaataatcaagtaaa

SEQ ID NO: 59615 - DNA, 20 bp, Human papillomavirus type 166
atgcaaaacatagagtccca

SEQ ID NO: 59616 - DNA, 20 bp, Human papillomavirus type 166
aactacctccattagttgtt

SEQ ID NO: 59617 - DNA, 20 bp, Human papillomavirus type 166
gttgttacaaccaacttaga

SEQ ID NO: 59618 - DNA, 20 bp, Human papillomavirus type 166
ttacaaccaacttagatgta

SEQ ID NO: 59619 - DNA, 20 bp, Human papillomavirus type 166
caaccaacttagatgtaaaa

SEQ ID NO: 59620 - DNA, 20 bp, Human papillomavirus type 166
gaatgctgatgttgttaaga

SEQ ID NO: 59621 - DNA, 20 bp, Human papillomavirus type 166
ttaagaagtttaagtaaatc

SEQ ID NO: 59622 - DNA, 20 bp, Human papillomavirus type 166
agaagtttaagtaaatcaca

SEQ ID NO: 59623 - DNA, 20 bp, Human papillomavirus type 166
aagtaaatcacagtatgcct

SEQ ID NO: 59624 - DNA, 20 bp, Human papillomavirus type 166
agtaaatcacagtatgcctc

SEQ ID NO: 59625 - DNA, 20 bp, Human papillomavirus type 166
ccctgagaggaggcctacct

SEQ ID NO: 59626 - DNA, 20 bp, Human papillomavirus type 166
gacgacgacaaggaggagaa

SEQ ID NO: 59627 - DNA, 20 bp, Human papillomavirus type 166
tccttgttctcctccttgtc

SEQ ID NO: 59628 - DNA, 20 bp, Human papillomavirus type 166
ttctcctccttgtcgtcgtc

SEQ ID NO: 59629 - DNA, 20 bp, Human papillomavirus type 166
tcctccttgtcgtcgtcgaa

SEQ ID NO: 59630 - DNA, 20 bp, Human papillomavirus type 166
acatatggtcaattaaatag

SEQ ID NO: 59631 - DNA, 20 bp, Human papillomavirus type 166
aatagcttataatgtacaga

SEQ ID NO: 59632 - DNA, 20 bp, Human papillomavirus type 166
taatgtacagagcaggtaga

SEQ ID NO: 59633 - DNA, 20 bp, Human papillomavirus type 166
tgcagaggagctatataaac

SEQ ID NO: 59634 - DNA, 20 bp, Human papillomavirus type 166
tattttatttttaacatcag

SEQ ID NO: 59635 - DNA, 20 bp, Human papillomavirus type 166
tatcgtctacagatgagtct

SEQ ID NO: 59636 - DNA, 20 bp, Human papillomavirus type 166
tgggggtggaattggttgca

SEQ ID NO: 59637 - DNA, 20 bp, Human papillomavirus type 166
gggggtggaattggttgcac

SEQ ID NO: 59638 - DNA, 20 bp, Human papillomavirus type 166
ggggtggaattggttgcaca

SEQ ID NO: 59639 - DNA, 20 bp, Human papillomavirus type 166
gttgcacatctagtactgca

SEQ ID NO: 59640 - DNA, 20 bp, Human papillomavirus type 166
agagatattagagtattaca

SEQ ID NO: 59641 - DNA, 20 bp, Human papillomavirus type 166
gagatattagagtattacat

SEQ ID NO: 59642 - DNA, 20 bp, Human papillomavirus type 166
gagtattacatagaccttcc

SEQ ID NO: 59643 - DNA, 20 bp, Human papillomavirus type 166
catagaccttcctattttac

SEQ ID NO: 59644 - DNA, 20 bp, Human papillomavirus type 166
ctattttacaaccgataccg

SEQ ID NO: 59645 - DNA, 20 bp, Human papillomavirus type 166
ctacaaagcagcaaaccatt

SEQ ID NO: 59646 - DNA, 20 bp, Human papillomavirus type 166
taccatcacaaacagagcca

SEQ ID NO: 59647 - DNA, 20 bp, Human papillomavirus type 166
ttatagatttattttcagat

SEQ ID NO: 59648 - DNA, 20 bp, Human papillomavirus type 166
tagatttattttcagatgac

SEQ ID NO: 59649 - DNA, 20 bp, Human papillomavirus type 166
attttcagatgacttttact

SEQ ID NO: 59650 - DNA, 20 bp, Human papillomavirus type 166
catgcacaggacatccttat

SEQ ID NO: 59651 - DNA, 20 bp, Human papillomavirus type 166
atgcacaggacatccttatt

SEQ ID NO: 59652 - DNA, 20 bp, Human papillomavirus type 166
tttcaataaatattcagatg

SEQ ID NO: 59653 - DNA, 20 bp, Human papillomavirus type 166
caataaatattcagatgttg

SEQ ID NO: 59654 - DNA, 20 bp, Human papillomavirus type 166
aataaatattcagatgttga

SEQ ID NO: 59655 - DNA, 20 bp, Human papillomavirus type 166
caatggaaggtactgactat

SEQ ID NO: 59656 - DNA, 20 bp, Human papillomavirus type 166
catagctaagcaggataata

SEQ ID NO: 59657 - DNA, 20 bp, Human papillomavirus type 166
cttcccacatttattataca

SEQ ID NO: 59658 - DNA, 20 bp, Human papillomavirus type 166
ccacatttattatacaacac

SEQ ID NO: 59659 - DNA, 20 bp, Human papillomavirus type 166
attatacaacaccgagtggc

SEQ ID NO: 59660 - DNA, 20 bp, Human papillomavirus type 166
cgcagagtataaattctggg

SEQ ID NO: 59661 - DNA, 20 bp, Human papillomavirus type 166
tgggacgttgatttaacaga

SEQ ID NO: 59662 - DNA, 20 bp, Human papillomavirus type 166
atttaacagagaaatttacc

SEQ ID NO: 59663 - DNA, 20 bp, Human papillomavirus type 166
aacagagaaatttacctctg

SEQ ID NO: 59664 - DNA, 20 bp, Human papillomavirus type 166
acagagaaatttacctctga

SEQ ID NO: 59665 - DNA, 20 bp, Human rhinovirus C
gaggggaagccatttaagtg

SEQ ID NO: 59666 - DNA, 20 bp, Human rhinovirus C
aggggaagccatttaagtga

SEQ ID NO: 59667 - DNA, 20 bp, Human rhinovirus C
tcacttaaatggcttcccct

SEQ ID NO: 59668 - DNA, 20 bp, Human rhinovirus C
aatggcttcccctcaaagag

SEQ ID NO: 59669 - DNA, 20 bp, Human rhinovirus C
ccctcaaagaggggcaggca

SEQ ID NO: 59670 - DNA, 20 bp, Human rhinovirus C
gggtgtccgtgtttcctgtt

SEQ ID NO: 59671 - DNA, 20 bp, Human rhinovirus C
ggtgtccgtgtttcctgttt

SEQ ID NO: 59672 - DNA, 20 bp, Human rhinovirus C
cctgttttctttaaatactt

SEQ ID NO: 59673 - DNA, 20 bp, Human rhinovirus C
ctgttttctttaaatacttg

SEQ ID NO: 59674 - DNA, 20 bp, Human rhinovirus C
tctttaaatacttgcttatg

SEQ ID NO: 59675 - DNA, 20 bp, Human rhinovirus C
caaatccagctttaatgtca

SEQ ID NO: 59676 - DNA, 20 bp, Human rhinovirus C
aatgtcaccaactgttgaag

SEQ ID NO: 59677 - DNA, 20 bp, Human rhinovirus C
atgtcaccaactgttgaagc

SEQ ID NO: 59678 - DNA, 20 bp, Human rhinovirus C
aagcatgtgggatgtccgat

SEQ ID NO: 59679 - DNA, 20 bp, Human rhinovirus C
aacaaattactatcgggaat

SEQ ID NO: 59680 - DNA, 20 bp, Human rhinovirus C
cctgattgccttaaagatat

SEQ ID NO: 59681 - DNA, 20 bp, Human rhinovirus C
ccttaaagatatgggcatct

SEQ ID NO: 59682 - DNA, 20 bp, Human rhinovirus C
aagatatgggcatcttcggg

SEQ ID NO: 59683 - DNA, 20 bp, Human rhinovirus C
gggcaaaatctgtaccatca

SEQ ID NO: 59684 - DNA, 20 bp, Human rhinovirus C
ggtaggtcagggtacataat

SEQ ID NO: 59685 - DNA, 20 bp, Human rhinovirus C
tttaattgtaatgggaccct

SEQ ID NO: 59686 - DNA, 20 bp, Human rhinovirus C
aattgtaatgggaccctgct

SEQ ID NO: 59687 - DNA, 20 bp, Human rhinovirus C
attgtaatgggaccctgctt

SEQ ID NO: 59688 - DNA, 20 bp, Human rhinovirus C
taatgggaccctgcttggta

SEQ ID NO: 59689 - DNA, 20 bp, Human rhinovirus C
gtaacatcactatattccca

SEQ ID NO: 59690 - DNA, 20 bp, Human rhinovirus C
ccaacacggctgccaagtgg

SEQ ID NO: 59691 - DNA, 20 bp, Human rhinovirus C
ctcacaactgaggacgagca

SEQ ID NO: 59692 - DNA, 20 bp, Human rhinovirus C
tcacaactgaggacgagcag

SEQ ID NO: 59693 - DNA, 20 bp, Human rhinovirus C
gccgactgctcgtcctcagt

SEQ ID NO: 59694 - DNA, 20 bp, Human rhinovirus C
tgagaaattgttgagatcca

SEQ ID NO: 59695 - DNA, 20 bp, Human rhinovirus C
tgatacccatggacattagc

SEQ ID NO: 59696 - DNA, 20 bp, Human rhinovirus C
gcaacactctcttttctacc

SEQ ID NO: 59697 - DNA, 20 bp, Human rhinovirus C
tctaccactttactaggtga

SEQ ID NO: 59698 - DNA, 20 bp, Human rhinovirus C
ctaccactttactaggtgaa

SEQ ID NO: 59699 - DNA, 20 bp, Human rhinovirus C
taccactttactaggtgaag

SEQ ID NO: 59700 - DNA, 20 bp, Human rhinovirus C
gactcaaaacccagttgagg

SEQ ID NO: 59701 - DNA, 20 bp, Human rhinovirus C
actcaaaacccagttgagga

SEQ ID NO: 59702 - DNA, 20 bp, Human rhinovirus C
aggactacatagacaaggtg

SEQ ID NO: 59703 - DNA, 20 bp, Human rhinovirus C
aaccaagtgctttgggcgct

SEQ ID NO: 59704 - DNA, 20 bp, Human rhinovirus C
gggcgctatggaaattgggg

SEQ ID NO: 59705 - DNA, 20 bp, Human rhinovirus C
tgcaaaatgggatataaact

SEQ ID NO: 59706 - DNA, 20 bp, Human rhinovirus C
gcaaaatgggatataaactt

SEQ ID NO: 59707 - DNA, 20 bp, Human rhinovirus C
caaaatgggatataaacttc

SEQ ID NO: 59708 - DNA, 20 bp, Human rhinovirus C
caagagcatgcacaagtcag

SEQ ID NO: 59709 - DNA, 20 bp, Human rhinovirus C
gaaatgtttacatatgctag

SEQ ID NO: 59710 - DNA, 20 bp, Human rhinovirus C
actggattgggttcagctta

SEQ ID NO: 59711 - DNA, 20 bp, Human rhinovirus C
ggttcagcttattatatgtt

SEQ ID NO: 59712 - DNA, 20 bp, Human rhinovirus C
agcttattatatgttttatg

SEQ ID NO: 59713 - DNA, 20 bp, Human rhinovirus C
ttatatgttttatgatggtt

SEQ ID NO: 59714 - DNA, 20 bp, Human rhinovirus C
tatgttttatgatggttatg

SEQ ID NO: 59715 - DNA, 20 bp, Human rhinovirus C
agaaaccagatgacactact

SEQ ID NO: 59716 - DNA, 20 bp, Human rhinovirus C
attaaccacaggactgatat

SEQ ID NO: 59717 - DNA, 20 bp, Human rhinovirus C
ttaaccacaggactgatata

SEQ ID NO: 59718 - DNA, 20 bp, Human rhinovirus C
accacaggactgatataaaa

SEQ ID NO: 59719 - DNA, 20 bp, Human rhinovirus C
gtccatacagccactatgat

SEQ ID NO: 59720 - DNA, 20 bp, Human rhinovirus C
agatagatatataccagtta

SEQ ID NO: 59721 - DNA, 20 bp, Human rhinovirus C
gatagatatataccagttaa

SEQ ID NO: 59722 - DNA, 20 bp, Human rhinovirus C
aattagaagcacacgactgg

SEQ ID NO: 59723 - DNA, 20 bp, Human rhinovirus C
gaagcacacgactggtatca

SEQ ID NO: 59724 - DNA, 20 bp, Human rhinovirus C
ttacccacagcacatccagt

SEQ ID NO: 59725 - DNA, 20 bp, Human rhinovirus C
aggactatgtgacacaatta

SEQ ID NO: 59726 - DNA, 20 bp, Human rhinovirus C
gggagtgcctttggtagcgg

SEQ ID NO: 59727 - DNA, 20 bp, Human rhinovirus C
ggtagcggtttcactgacac

SEQ ID NO: 59728 - DNA, 20 bp, Human rhinovirus C
gtagcggtttcactgacaca

SEQ ID NO: 59729 - DNA, 20 bp, Human rhinovirus C
cactgacacacttaaagacc

SEQ ID NO: 59730 - DNA, 20 bp, Human rhinovirus C
ctcaaggaccggttatgtca

SEQ ID NO: 59731 - DNA, 20 bp, Human rhinovirus C
tcaaggaccggttatgtcag

SEQ ID NO: 59732 - DNA, 20 bp, Human rhinovirus C
tgtcagtggttaaacatcac

SEQ ID NO: 59733 - DNA, 20 bp, Human rhinovirus C
aacatcactagaccgccaag

SEQ ID NO: 59734 - DNA, 20 bp, Human rhinovirus C
aagaaattcactgaatgctg

SEQ ID NO: 59735 - DNA, 20 bp, Human rhinovirus C
actcccttcctccagaccct

SEQ ID NO: 59736 - DNA, 20 bp, Human rhinovirus C
ctcccttcctccagacccta

SEQ ID NO: 59737 - DNA, 20 bp, Human rhinovirus C
ctccagaccctaaacatttt

SEQ ID NO: 59738 - DNA, 20 bp, Human rhinovirus C
tgatgggtatgatcaacaag

SEQ ID NO: 59739 - DNA, 20 bp, Human rhinovirus C
gatgggtatgatcaacaaga

SEQ ID NO: 59740 - DNA, 20 bp, Human rhinovirus C
acaggcgcttctacttagat

SEQ ID NO: 59741 - DNA, 20 bp, Human rhinovirus C
tacttagatttagatcttaa

SEQ ID NO: 59742 - DNA, 20 bp, Human rhinovirus C
gatttagatcttaagatctt

SEQ ID NO: 59743 - DNA, 20 bp, Human rhinovirus C
agatcttaagatcttgcaag

SEQ ID NO: 59744 - DNA, 20 bp, Human rhinovirus C
gatcttaagatcttgcaagg

SEQ ID NO: 59745 - DNA, 20 bp, Human rhinovirus C
gcaataatttaacagctata

SEQ ID NO: 59746 - DNA, 20 bp, Human rhinovirus C
aacagctatatttcagggct

SEQ ID NO: 59747 - DNA, 20 bp, Human rhinovirus C
acagctatatttcagggctt

SEQ ID NO: 59748 - DNA, 20 bp, Human rhinovirus C
cagggcttgggtgataagga

SEQ ID NO: 59749 - DNA, 20 bp, Human rhinovirus C
agggcttgggtgataaggaa

SEQ ID NO: 59750 - DNA, 20 bp, Human rhinovirus C
agaagagcaaccttgcaagg

SEQ ID NO: 59751 - DNA, 20 bp, Human rhinovirus C
caaggtcctgaacatgaatt

SEQ ID NO: 59752 - DNA, 20 bp, Human rhinovirus C
taataagggcattcaaaaat

SEQ ID NO: 59753 - DNA, 20 bp, Human rhinovirus C
aaaaattcatgttcaggacc

SEQ ID NO: 59754 - DNA, 20 bp, Human rhinovirus C
atgttcaggaccttgcaagg

SEQ ID NO: 59755 - DNA, 20 bp, Human rhinovirus C
ccacccacatgtattcctat

SEQ ID NO: 59756 - DNA, 20 bp, Human rhinovirus C
cacccacatgtattcctatg

SEQ ID NO: 59757 - DNA, 20 bp, Human rhinovirus C
ctatgatattacctgtgttg

SEQ ID NO: 59758 - DNA, 20 bp, Human rhinovirus C
cctgtgttggccagcactgc

SEQ ID NO: 59759 - DNA, 20 bp, Human rhinovirus C
gccagcactgcaccacattg

SEQ ID NO: 59760 - DNA, 20 bp, Human rhinovirus C
acaccccaaggatccacgat

SEQ ID NO: 59761 - DNA, 20 bp, Human rhinovirus C
caccccaaggatccacgatt

SEQ ID NO: 59762 - DNA, 20 bp, Human rhinovirus C
gaagtagacctcactacagc

SEQ ID NO: 59763 - DNA, 20 bp, Human rhinovirus C
tgtcaaaatataaaggtaat

SEQ ID NO: 59764 - DNA, 20 bp, Human rhinovirus C
atgtccctatgaatgagtac

SEQ ID NO: 59765 - DNA, 20 bp, Human rhinovirus C
aacaacgctactaaagacac

SEQ ID NO: 59766 - DNA, 20 bp, Human rhinovirus C
gatctgtatggtattgatct

SEQ ID NO: 59767 - DNA, 20 bp, Human rhinovirus C
atctaccctacataactttc

SEQ ID NO: 59768 - DNA, 20 bp, Human rhinovirus C
cctaaaggatgaactccgcg

SEQ ID NO: 59769 - DNA, 20 bp, Human rhinovirus C
ctaaaggatgaactccgcgc

SEQ ID NO: 59770 - DNA, 20 bp, Human rhinovirus C
tggtcacaaatgcatgctat

SEQ ID NO: 59771 - DNA, 20 bp, Human rhinovirus C
ggtcacaaatgcatgctatg

SEQ ID NO: 59772 - DNA, 20 bp, Human rhinovirus C
gtcacaaatgcatgctatgt

SEQ ID NO: 59773 - DNA, 20 bp, Human rhinovirus C
gatggagaactcattgcttt

SEQ ID NO: 59774 - DNA, 20 bp, Human rhinovirus C
cttttgattacaccaattat

SEQ ID NO: 59775 - DNA, 20 bp, Human rhinovirus C
aaacctgactccaaatacaa

SEQ ID NO: 59776 - DNA, 20 bp, Human rhinovirus C
aacctgactccaaatacaaa

SEQ ID NO: 59777 - DNA, 20 bp, Human rhinovirus C
ctgatacatcctgtttactc

SEQ ID NO: 59778 - DNA, 20 bp, Human rhinovirus C
tgatacatcctgtttactca

SEQ ID NO: 59779 - DNA, 20 bp, Human rhinovirus C
actcaatgcaggatgtttat

SEQ ID NO: 59780 - DNA, 20 bp, Influenza A virus
gatatttcattgccatcatc

SEQ ID NO: 59781 - DNA, 20 bp, Influenza A virus
cattgccatcatccatttca

SEQ ID NO: 59782 - DNA, 20 bp, Influenza A virus
attgccatcatccatttcat

SEQ ID NO: 59783 - DNA, 20 bp, Influenza A virus
ccatcatccatttcattctg

SEQ ID NO: 59784 - DNA, 20 bp, Influenza A virus
cattctgagagcagggttct

SEQ ID NO: 59785 - DNA, 20 bp, Influenza A virus
gtggaacaggaatgggccga

SEQ ID NO: 59786 - DNA, 20 bp, Influenza A virus
tccaaaggtttacaaaacat

SEQ ID NO: 59787 - DNA, 20 bp, Influenza A virus
acaaaacatactttgagaag

SEQ ID NO: 59788 - DNA, 20 bp, Influenza A virus
tcaaagtatgttttgtaaac

SEQ ID NO: 59789 - DNA, 20 bp, Influenza A virus
tgtaaacctttggataatgg

SEQ ID NO: 59790 - DNA, 20 bp, Influenza A virus
acatcagagtcgcaattgac

SEQ ID NO: 59791 - DNA, 20 bp, Influenza A virus
acaataacaaaagagaagaa

SEQ ID NO: 59792 - DNA, 20 bp, Influenza A virus
taaaattgctcctttaatgg

SEQ ID NO: 59793 - DNA, 20 bp, Influenza A virus
ctcctttaatggtggcatac

SEQ ID NO: 59794 - DNA, 20 bp, Influenza A virus
aatggtggcatacatgttgg

SEQ ID NO: 59795 - DNA, 20 bp, Influenza A virus
caggcaacctccaaacattg

SEQ ID NO: 59796 - DNA, 20 bp, Influenza A virus
aaaataaaagtacatgaggg

SEQ ID NO: 59797 - DNA, 20 bp, Influenza A virus
acaatggttgggcggagagc

SEQ ID NO: 59798 - DNA, 20 bp, Influenza A virus
ggcggagagcaacagctatc

SEQ ID NO: 59799 - DNA, 20 bp, Influenza A virus
tagttgctttcctcaggata

SEQ ID NO: 59800 - DNA, 20 bp, Influenza A virus
aaccccatgcatcaactcct

SEQ ID NO: 59801 - DNA, 20 bp, Influenza A virus
caaaaagatgcaaaagtgct

SEQ ID NO: 59802 - DNA, 20 bp, Influenza A virus
cagaactggggaattgaacc

SEQ ID NO: 59803 - DNA, 20 bp, Influenza A virus
agaactggggaattgaacct

SEQ ID NO: 59804 - DNA, 20 bp, Influenza A virus
aattccccagttctgaaaca

SEQ ID NO: 59805 - DNA, 20 bp, Influenza A virus
tctcctgaagaggttagtga

SEQ ID NO: 59806 - DNA, 20 bp, Influenza A virus
gtgaaacacagggaacagag

SEQ ID NO: 59807 - DNA, 20 bp, Influenza A virus
acaataacatattcatcctc

SEQ ID NO: 59808 - DNA, 20 bp, Influenza A virus
aggatgaatatgttattgtc

SEQ ID NO: 59809 - DNA, 20 bp, Influenza A virus
ttgtcaacttctctgttccc

SEQ ID NO: 59810 - DNA, 20 bp, Human adenovirus
acgtcaagacgcacggccgg

SEQ ID NO: 59811 - DNA, 20 bp, Human adenovirus
ccgcagaggcgtggcctagc

SEQ ID NO: 59812 - DNA, 20 bp, Human adenovirus
aaacccggaaacggccgatt

SEQ ID NO: 59813 - DNA, 20 bp, Human adenovirus
aacccggaaacggccgattt

SEQ ID NO: 59814 - DNA, 20 bp, Human adenovirus
tcccacggccacgcccggat

SEQ ID NO: 59815 - DNA, 20 bp, Human adenovirus
cgattacggtgtttttttcg

SEQ ID NO: 59816 - DNA, 20 bp, Human adenovirus
gattacggtgtttttttcgc

SEQ ID NO: 59817 - DNA, 20 bp, Human adenovirus
cggtgtttttttcgccaatt

SEQ ID NO: 59818 - DNA, 20 bp, Human adenovirus
ttttcgccaatttccgcgtc

SEQ ID NO: 59819 - DNA, 20 bp, Human adenovirus
tttcgccaatttccgcgtcc

SEQ ID NO: 59820 - DNA, 20 bp, Human adenovirus
ggaggtaaatgcccaggaga

SEQ ID NO: 59821 - DNA, 20 bp, Human adenovirus
gaggtaaatgcccaggagaa

SEQ ID NO: 59822 - DNA, 20 bp, Human adenovirus
aatatttccagaatctatga

SEQ ID NO: 59823 - DNA, 20 bp, Human adenovirus
atatttccagaatctatgat

SEQ ID NO: 59824 - DNA, 20 bp, Human adenovirus
ccagaatctatgattcttca

SEQ ID NO: 59825 - DNA, 20 bp, Human adenovirus
ctgcgctctgtgttacatga

SEQ ID NO: 59826 - DNA, 20 bp, Human adenovirus
tcatgtaacacagagcgcag

SEQ ID NO: 59827 - DNA, 20 bp, Human adenovirus
catgtaacacagagcgcagg

SEQ ID NO: 59828 - DNA, 20 bp, Human adenovirus
atgtaacacagagcgcagga

SEQ ID NO: 59829 - DNA, 20 bp, Human adenovirus
gggtctccggtctgttcccg

SEQ ID NO: 59830 - DNA, 20 bp, Human adenovirus
acaaaattgaggatttgttg

SEQ ID NO: 59831 - DNA, 20 bp, Human adenovirus
caaaattgaggatttgttgc

SEQ ID NO: 59832 - DNA, 20 bp, Human adenovirus
aggatttgttgcaggacgtg

SEQ ID NO: 59833 - DNA, 20 bp, Human adenovirus
gttgcaggacgtgggtggga

SEQ ID NO: 59834 - DNA, 20 bp, Human adenovirus
ttgcaggacgtgggtgggaa

SEQ ID NO: 59835 - DNA, 20 bp, Human adenovirus
tggaggatagttcagacggg

SEQ ID NO: 59836 - DNA, 20 bp, Human adenovirus
agacgggtgctccgggtttt

SEQ ID NO: 59837 - DNA, 20 bp, Human adenovirus
tggagacactggtttggaac

SEQ ID NO: 59838 - DNA, 20 bp, Human adenovirus
ggagacactggtttggaact

SEQ ID NO: 59839 - DNA, 20 bp, Human adenovirus
gagacactggtttggaactc

SEQ ID NO: 59840 - DNA, 20 bp, Human adenovirus
gcagccatgcacctgtggag

SEQ ID NO: 59841 - DNA, 20 bp, Human adenovirus
cagccatgcacctgtggagg

SEQ ID NO: 59842 - DNA, 20 bp, Human adenovirus
aactactggcttttacagcc

SEQ ID NO: 59843 - DNA, 20 bp, Human adenovirus
tacagccagcagcgtcgggt

SEQ ID NO: 59844 - DNA, 20 bp, Human adenovirus
acagccagcagcgtcgggtc

SEQ ID NO: 59845 - DNA, 20 bp, Human adenovirus
agaaatatgccaagatagcc

SEQ ID NO: 59846 - DNA, 20 bp, Human adenovirus
caagtacagggtgactaaga

SEQ ID NO: 59847 - DNA, 20 bp, Human adenovirus
aacatgcctgctacatctcg

SEQ ID NO: 59848 - DNA, 20 bp, Human adenovirus
cccgagatgtagcaggcatg

SEQ ID NO: 59849 - DNA, 20 bp, Human adenovirus
aatattcacggtcttagtca

SEQ ID NO: 59850 - DNA, 20 bp, Human adenovirus
gaaaaatgctacctgggagt

SEQ ID NO: 59851 - DNA, 20 bp, Human adenovirus
aaaaatgctacctgggagtc

SEQ ID NO: 59852 - DNA, 20 bp, Human adenovirus
cctagaaacgggctgctttt

SEQ ID NO: 59853 - DNA, 20 bp, Human adenovirus
tgcctggtgaagggcacagc

SEQ ID NO: 59854 - DNA, 20 bp, Human adenovirus
gcctggtgaagggcacagcc

SEQ ID NO: 59855 - DNA, 20 bp, Human adenovirus
gagaacgatgccttctccag

SEQ ID NO: 59856 - DNA, 20 bp, Human adenovirus
tccagggtgaacctgaacgg

SEQ ID NO: 59857 - DNA, 20 bp, Human adenovirus
gacatggatgtctcggtgta

SEQ ID NO: 59858 - DNA, 20 bp, Human adenovirus
acatggatgtctcggtgtac

SEQ ID NO: 59859 - DNA, 20 bp, Human adenovirus
gtctcatcgtatctcaggat

SEQ ID NO: 59860 - DNA, 20 bp, Human adenovirus
gtcagaatgtgatgggatca

SEQ ID NO: 59861 - DNA, 20 bp, Human adenovirus
cagcaaattcctcgaccatg

SEQ ID NO: 59862 - DNA, 20 bp, Human adenovirus
ctcgaccatgacctacgcga

SEQ ID NO: 59863 - DNA, 20 bp, Human adenovirus
acagcaccgccgcagccgcg

SEQ ID NO: 59864 - DNA, 20 bp, Human adenovirus
gctggaagcactgggcgccc

SEQ ID NO: 59865 - DNA, 20 bp, Human adenovirus
agagtgcggtggattttttc

SEQ ID NO: 59866 - DNA, 20 bp, Human adenovirus
tttccaggacccggtagagg

SEQ ID NO: 59867 - DNA, 20 bp, Human adenovirus
ttccaggacccggtagaggt

SEQ ID NO: 59868 - DNA, 20 bp, Human adenovirus
tccaggacccggtagaggtg

SEQ ID NO: 59869 - DNA, 20 bp, Human adenovirus
ccaggacccggtagaggtgg

SEQ ID NO: 59870 - DNA, 20 bp, Human adenovirus
gcgatgttaccgcccagatc

SEQ ID NO: 59871 - DNA, 20 bp, Human adenovirus
ccgcccagatcccgccgggg

SEQ ID NO: 59872 - DNA, 20 bp, Human adenovirus
atgttgtgcaggaccaccag

SEQ ID NO: 59873 - DNA, 20 bp, Human adenovirus
tgcaggaccaccaggacaat

SEQ ID NO: 59874 - DNA, 20 bp, Human adenovirus
cccaagtgcacgggctacat

SEQ ID NO: 59875 - DNA, 20 bp, Human adenovirus
cttaacagctgggacttgcc

SEQ ID NO: 59876 - DNA, 20 bp, Human adenovirus
ttaacagctgggacttgccg

SEQ ID NO: 59877 - DNA, 20 bp, Human adenovirus
acagctgggacttgccgcac

SEQ ID NO: 59878 - DNA, 20 bp, Human adenovirus
ccgcacccggttgggccgta

SEQ ID NO: 59879 - DNA, 20 bp, Human adenovirus
ggccgtagatgaccccgatg

SEQ ID NO: 59880 - DNA, 20 bp, Human adenovirus
ctcgtttcgggggttgggac

SEQ ID NO: 59881 - DNA, 20 bp, Human adenovirus
cgggggttgggacgactgcg

SEQ ID NO: 59882 - DNA, 20 bp, Human adenovirus
gggggttgggacgactgcga

SEQ ID NO: 59883 - DNA, 20 bp, Human adenovirus
ggacgactgcgactgtaggg

SEQ ID NO: 59884 - DNA, 20 bp, Human adenovirus
tgccctacagtcgcagtcgt

SEQ ID NO: 59885 - DNA, 20 bp, Human adenovirus
cagggcgtacagtttgggcg

SEQ ID NO: 59886 - DNA, 20 bp, Human adenovirus
gggcgcgagaaagaccgact

SEQ ID NO: 59887 - DNA, 20 bp, Human adenovirus
ggcgcgagaaagaccgactc

SEQ ID NO: 59888 - DNA, 20 bp, Human adenovirus
gcccccgagtcggtctttct

SEQ ID NO: 59889 - DNA, 20 bp, Human adenovirus
cccccgagtcggtctttctc

SEQ ID NO: 59890 - DNA, 20 bp, Human adenovirus
gtcttggcgtggacgcgcgc

SEQ ID NO: 59891 - DNA, 20 bp, Human adenovirus
tcttggcgtggacgcgcgcc

SEQ ID NO: 59892 - DNA, 20 bp, Human adenovirus
gcgtggacgcgcgccttcgt

SEQ ID NO: 59893 - DNA, 20 bp, Human adenovirus
gtctcagagtggtccgagtt

SEQ ID NO: 59894 - DNA, 20 bp, Human adenovirus
ctttacgaggaggaccgcgg

SEQ ID NO: 59895 - DNA, 20 bp, Human adenovirus
cctctcaagagcgggcataa

SEQ ID NO: 59896 - DNA, 20 bp, Human adenovirus
tcagtttctagaaacgagga

SEQ ID NO: 59897 - DNA, 20 bp, Human adenovirus
ctagaaacgaggaggatttg

SEQ ID NO: 59898 - DNA, 20 bp, Human adenovirus
tagaaacgaggaggatttga

SEQ ID NO: 59899 - DNA, 20 bp, Human adenovirus
gatgttggcctgccctgccg

SEQ ID NO: 59900 - DNA, 20 bp, Human adenovirus
gggaaaaacagtggtgcgct

SEQ ID NO: 59901 - DNA, 20 bp, Human adenovirus
tgcagggtgaccaggtccac

SEQ ID NO: 59902 - DNA, 20 bp, Human adenovirus
tgcccgacgagcgcaccact

SEQ ID NO: 59903 - DNA, 20 bp, Human adenovirus
gccccgccttcttggcaccc

SEQ ID NO: 59904 - DNA, 20 bp, Human adenovirus
ttggcaccctcgcatgagtt

SEQ ID NO: 59905 - DNA, 20 bp, Human adenovirus
gcaccctcgcatgagttgta

SEQ ID NO: 59906 - DNA, 20 bp, Human adenovirus
tatgactacgtgcgcgccag

SEQ ID NO: 59907 - DNA, 20 bp, Human adenovirus
tcccacctacatcggcatcc

SEQ ID NO: 59908 - DNA, 20 bp, Human adenovirus
tccacggggagggcgtaagc

SEQ ID NO: 59909 - DNA, 20 bp, Human adenovirus
agcggccttgcggagcgagg

SEQ ID NO: 59910 - DNA, 20 bp, Human adenovirus
cggagcgaggtgtgcgtcag

SEQ ID NO: 59911 - DNA, 20 bp, Human adenovirus
aagtaccagtttttgaaagt

SEQ ID NO: 59912 - DNA, 20 bp, Human adenovirus
agtaccagtttttgaaagtc

SEQ ID NO: 59913 - DNA, 20 bp, Human adenovirus
atgttgtgcccgacaatgta

SEQ ID NO: 59914 - DNA, 20 bp, Human adenovirus
tgcccgacaatgtatagttc

SEQ ID NO: 59915 - DNA, 20 bp, Human adenovirus
catgaatcgcgggcggcctt

SEQ ID NO: 59916 - DNA, 20 bp, Human adenovirus
gatgtgcggcagctttttaa

SEQ ID NO: 59917 - DNA, 20 bp, Human adenovirus
atgtgcggcagctttttaag

SEQ ID NO: 59918 - DNA, 20 bp, Human adenovirus
gggtccccggagaatttcat

SEQ ID NO: 59919 - DNA, 20 bp, Human adenovirus
catgaccagcatgaagggga

SEQ ID NO: 59920 - DNA, 20 bp, Human adenovirus
atgaccagcatgaaggggac

SEQ ID NO: 59921 - DNA, 20 bp, Human adenovirus
ccgaaggaccccatccaggt

SEQ ID NO: 59922 - DNA, 20 bp, Human adenovirus
ggcaagcagcttgtcccctt

SEQ ID NO: 59923 - DNA, 20 bp, Human adenovirus
aggaggaacttcaggagtgg

SEQ ID NO: 59924 - DNA, 20 bp, Human adenovirus
aggagtggcggccctggctg

SEQ ID NO: 59925 - DNA, 20 bp, Human adenovirus
tcatgttcgcctgcgtagga

SEQ ID NO: 59926 - DNA, 20 bp, Human adenovirus
catgttcgcctgcgtaggac

SEQ ID NO: 59927 - DNA, 20 bp, Human adenovirus
atgttcgcctgcgtaggact

SEQ ID NO: 59928 - DNA, 20 bp, Human adenovirus
gaacctgaaagacagttcaa

SEQ ID NO: 59929 - DNA, 20 bp, Human adenovirus
aacctgaaagacagttcaac

SEQ ID NO: 59930 - DNA, 20 bp, Human adenovirus
aacagaatcaatctcggcgt

SEQ ID NO: 59931 - DNA, 20 bp, Human adenovirus
acggcggcctgccgcaggat

SEQ ID NO: 59932 - DNA, 20 bp, Human adenovirus
attctgttgaactgtctttc

SEQ ID NO: 59933 - DNA, 20 bp, Human adenovirus
agctccacgtgccgcgtaaa

SEQ ID NO: 59934 - DNA, 20 bp, Human adenovirus
cgcaggcgctgaaaaaggta

SEQ ID NO: 59935 - DNA, 20 bp, Human adenovirus
agggtggtggcgatgtgctc

SEQ ID NO: 59936 - DNA, 20 bp, Human adenovirus
tttgtcaccgagcacatcgc

SEQ ID NO: 59937 - DNA, 20 bp, Human adenovirus
gtcaccgagcacatcgccac

SEQ ID NO: 59938 - DNA, 20 bp, Human adenovirus
ttcctcttccatgacgacct

SEQ ID NO: 59939 - DNA, 20 bp, Human adenovirus
ctcttccatgacgacctctt

SEQ ID NO: 59940 - DNA, 20 bp, Human adenovirus
catgacgacctcttcttcta

SEQ ID NO: 59941 - DNA, 20 bp, Human adenovirus
ttctatttcctctgggggcg

SEQ ID NO: 59942 - DNA, 20 bp, Human adenovirus
tatttcctctgggggcggtg

SEQ ID NO: 59943 - DNA, 20 bp, Human adenovirus
tcaattgcggcgtaggggac

SEQ ID NO: 59944 - DNA, 20 bp, Human adenovirus
cggcgtaggggacgtaagcg

SEQ ID NO: 59945 - DNA, 20 bp, Human adenovirus
ggaggaaagcgtctagccaa

SEQ ID NO: 59946 - DNA, 20 bp, Human adenovirus
gaggaaagcgtctagccaat

SEQ ID NO: 59947 - DNA, 20 bp, Human adenovirus
aacacgtagcagccctgtgg

SEQ ID NO: 59948 - DNA, 20 bp, Human adenovirus
catgcgggtaaccccaacgc

SEQ ID NO: 59949 - DNA, 20 bp, Human adenovirus
cacgcgggtgagggtgtctt

SEQ ID NO: 59950 - DNA, 20 bp, Human adenovirus
caagacaccctcacccgcgt

SEQ ID NO: 59951 - DNA, 20 bp, Human adenovirus
ccgagcgcgtcgtcgccgac

SEQ ID NO: 59952 - DNA, 20 bp, Human adenovirus
gggttacccgcatggaagac

SEQ ID NO: 59953 - DNA, 20 bp, Human adenovirus
ccgcgcgcctccaccaccgc

SEQ ID NO: 59954 - DNA, 20 bp, Human adenovirus
cctggatgtcccgctacctc

SEQ ID NO: 59955 - DNA, 20 bp, Human adenovirus
ggccgcgcgtgtaccccggt

SEQ ID NO: 59956 - DNA, 20 bp, Human adenovirus
gagtcccctcgaatcaggct

SEQ ID NO: 59957 - DNA, 20 bp, Human adenovirus
gcactcccgtctcgacccaa

SEQ ID NO: 59958 - DNA, 20 bp, Human adenovirus
ggtcgagacgggagtgccaa

SEQ ID NO: 59959 - DNA, 20 bp, Human adenovirus
gtcgcggctttagcctgatt

SEQ ID NO: 59960 - DNA, 20 bp, Human adenovirus
gcagacggccgcggcgagcg

SEQ ID NO: 59961 - DNA, 20 bp, Human adenovirus
tttcttttgccagatgcatc

SEQ ID NO: 59962 - DNA, 20 bp, Human adenovirus
ttcttttgccagatgcatcc

SEQ ID NO: 59963 - DNA, 20 bp, Human adenovirus
tcttttgccagatgcatccc

SEQ ID NO: 59964 - DNA, 20 bp, Human adenovirus
cttttgccagatgcatcccg

SEQ ID NO: 59965 - DNA, 20 bp, Human adenovirus
caaaagagtttcaacaacca

SEQ ID NO: 59966 - DNA, 20 bp, Human adenovirus
caacaaccacgtgcgcaccc

SEQ ID NO: 59967 - DNA, 20 bp, Human adenovirus
aacaaccacgtgcgcaccct

SEQ ID NO: 59968 - DNA, 20 bp, Human adenovirus
cgcgcgaggaggtggccctg

SEQ ID NO: 59969 - DNA, 20 bp, Human adenovirus
ttgaaactcttttggaagtt

SEQ ID NO: 59970 - DNA, 20 bp, Human adenovirus
tacgcgcgcaagatttacaa

SEQ ID NO: 59971 - DNA, 20 bp, Human adenovirus
acgcgcgcaagatttacaag

SEQ ID NO: 59972 - DNA, 20 bp, Human adenovirus
cgcgcgcaagatttacaaga

SEQ ID NO: 59973 - DNA, 20 bp, Human adenovirus
acaagacgccgtacgtgccc

SEQ ID NO: 59974 - DNA, 20 bp, Human adenovirus
caagacgccgtacgtgccca

SEQ ID NO: 59975 - DNA, 20 bp, Human adenovirus
ttagatgtcccagcagcaag

SEQ ID NO: 59976 - DNA, 20 bp, Human adenovirus
tagatgtcccagcagcaagc

SEQ ID NO: 59977 - DNA, 20 bp, Human adenovirus
agatgtcccagcagcaagcc

SEQ ID NO: 59978 - DNA, 20 bp, Human adenovirus
gatgtcccagcagcaagccc

SEQ ID NO: 59979 - DNA, 20 bp, Human adenovirus
gcagcgccgcccttatggcg

SEQ ID NO: 59980 - DNA, 20 bp, Human adenovirus
gactgcacgttcgtgctgtt

SEQ ID NO: 59981 - DNA, 20 bp, Human adenovirus
gtgctgttgtagcggcccac

SEQ ID NO: 59982 - DNA, 20 bp, Human adenovirus
tagcggcccacgcgctccag

SEQ ID NO: 59983 - DNA, 20 bp, Human adenovirus
tacaccagcccggcctcgtc

SEQ ID NO: 59984 - DNA, 20 bp, Human adenovirus
caagaacctacgcgggctgt

SEQ ID NO: 59985 - DNA, 20 bp, Human adenovirus
aagaacctacgcgggctgtg

SEQ ID NO: 59986 - DNA, 20 bp, Human adenovirus
ttgacgcccaactcgcggct

SEQ ID NO: 59987 - DNA, 20 bp, Human adenovirus
acgcccaactcgcggctgct

SEQ ID NO: 59988 - DNA, 20 bp, Human adenovirus
ggcgtcaacaagctgctcac

SEQ ID NO: 59989 - DNA, 20 bp, Human adenovirus
ctgctgaccaatagacagca

SEQ ID NO: 59990 - DNA, 20 bp, Human adenovirus
cgccgcagtacgcactgtcg

SEQ ID NO: 59991 - DNA, 20 bp, Human adenovirus
tgagatatgtgcagcagagc

SEQ ID NO: 59992 - DNA, 20 bp, Human adenovirus
cttcctcggccgacagtgcg

SEQ ID NO: 59993 - DNA, 20 bp, Human adenovirus
ttcctcggccgacagtgcgt

SEQ ID NO: 59994 - DNA, 20 bp, Human adenovirus
accaatgccatcttgaaccc

SEQ ID NO: 59995 - DNA, 20 bp, Human adenovirus
ccaatgccatcttgaacccg

SEQ ID NO: 59996 - DNA, 20 bp, Human adenovirus
aacccgcattggctcccgcc

SEQ ID NO: 59997 - DNA, 20 bp, Human adenovirus
gctcccgccgccagggttct

SEQ ID NO: 59998 - DNA, 20 bp, Human adenovirus
tacacgggcgagtacgacat

SEQ ID NO: 59999 - DNA, 20 bp, Human adenovirus
cagcggtttagtttgtccac

SEQ ID NO: 60000 - DNA, 20 bp, Human adenovirus
agtttgtccaccagactttc

SEQ ID NO: 60001 - DNA, 20 bp, Human adenovirus
gtttgtccaccagactttct

SEQ ID NO: 60002 - DNA, 20 bp, Human adenovirus
gtccaccagactttctatcc

SEQ ID NO: 60003 - DNA, 20 bp, Human adenovirus
tccaccagactttctatccc

SEQ ID NO: 60004 - DNA, 20 bp, Human adenovirus
cgtttgtgcctccgcggtat

SEQ ID NO: 60005 - DNA, 20 bp, Human adenovirus
gtgcctccgcggtatatggc

SEQ ID NO: 60006 - DNA, 20 bp, Human adenovirus
tgcctccgcggtatatggct

SEQ ID NO: 60007 - DNA, 20 bp, Human adenovirus
cctgcgccatcacgctctcg

SEQ ID NO: 60008 - DNA, 20 bp, Human adenovirus
gagtcaagtttgacagcaga

SEQ ID NO: 60009 - DNA, 20 bp, Human adenovirus
gacagcagaaatttcaagct

SEQ ID NO: 60010 - DNA, 20 bp, Human adenovirus
acagcagaaatttcaagctg

SEQ ID NO: 60011 - DNA, 20 bp, Human adenovirus
caagctgggctgggacccgg

SEQ ID NO: 60012 - DNA, 20 bp, Human adenovirus
aagctgggctgggacccggt

SEQ ID NO: 60013 - DNA, 20 bp, Human adenovirus
atgctcctgcaagaggagat

SEQ ID NO: 60014 - DNA, 20 bp, Human adenovirus
tctacagctcttgggacact

SEQ ID NO: 60015 - DNA, 20 bp, Human adenovirus
ctacagctcttgggacactg

SEQ ID NO: 60016 - DNA, 20 bp, Human adenovirus
tacagctcttgggacactgc

SEQ ID NO: 60017 - DNA, 20 bp, Human adenovirus
ggacactgctatctcctctt

SEQ ID NO: 60018 - DNA, 20 bp, Human adenovirus
cgctccacccagcaagtcag

SEQ ID NO: 60019 - DNA, 20 bp, Human adenovirus
gctccacccagcaagtcagc

SEQ ID NO: 60020 - DNA, 20 bp, Human adenovirus
gcgccgagctcatgcccttc

SEQ ID NO: 60021 - DNA, 20 bp, Human adenovirus
tggcgcggaagggcatgagc

SEQ ID NO: 60022 - DNA, 20 bp, Human adenovirus
ggcgcggaagggcatgagct

SEQ ID NO: 60023 - DNA, 20 bp, Human adenovirus
tagaaaatgtccattctcat

SEQ ID NO: 60024 - DNA, 20 bp, Human adenovirus
tctagaaggtgcgactggag

SEQ ID NO: 60025 - DNA, 20 bp, Human adenovirus
ctagaaggtgcgactggaga

SEQ ID NO: 60026 - DNA, 20 bp, Human adenovirus
tagaaggtgcgactggagag

SEQ ID NO: 60027 - DNA, 20 bp, Human adenovirus
tagacgtagggacaggtgcg

SEQ ID NO: 60028 - DNA, 20 bp, Human adenovirus
actccgtagtcgctgacgcg

SEQ ID NO: 60029 - DNA, 20 bp, Human adenovirus
cgcgcgtcagcgactacgga

SEQ ID NO: 60030 - DNA, 20 bp, Human adenovirus
ccgccgccgcggccatctct

SEQ ID NO: 60031 - DNA, 20 bp, Human adenovirus
ccgcgcctgggtctggtcat

SEQ ID NO: 60032 - DNA, 20 bp, Human adenovirus
cgcgcctgggtctggtcatg

SEQ ID NO: 60033 - DNA, 20 bp, Human adenovirus
gaaggggcgcagggtgcagc

SEQ ID NO: 60034 - DNA, 20 bp, Human adenovirus
cggcccggcacggcggtggt

SEQ ID NO: 60035 - DNA, 20 bp, Human adenovirus
acgcccggcgagcggtcctc

SEQ ID NO: 60036 - DNA, 20 bp, Human adenovirus
cgcccggcgagcggtcctcg

SEQ ID NO: 60037 - DNA, 20 bp, Human adenovirus
caatttacgcgccgccgcgg

SEQ ID NO: 60038 - DNA, 20 bp, Human adenovirus
aggtgcgccccattaagcag

SEQ ID NO: 60039 - DNA, 20 bp, Human adenovirus
agcaggtggcgccgggcctg

SEQ ID NO: 60040 - DNA, 20 bp, Human adenovirus
atggggcgcaccttaacctc

SEQ ID NO: 60041 - DNA, 20 bp, Human adenovirus
acctcgggctccacatccat

SEQ ID NO: 60042 - DNA, 20 bp, Human adenovirus
tcacggtgtccagcacgtcc

SEQ ID NO: 60043 - DNA, 20 bp, Human adenovirus
acatccacggccaccgagcc

SEQ ID NO: 60044 - DNA, 20 bp, Human adenovirus
catccacggccaccgagcct

SEQ ID NO: 60045 - DNA, 20 bp, Human adenovirus
caggaggcgaagatggggcc

SEQ ID NO: 60046 - DNA, 20 bp, Human adenovirus
ggcatcagccggttggcagg

SEQ ID NO: 60047 - DNA, 20 bp, Human adenovirus
gcagggccccatcttcgcct

SEQ ID NO: 60048 - DNA, 20 bp, Human adenovirus
ccgcctgcgcattcccgtcc

SEQ ID NO: 60049 - DNA, 20 bp, Human adenovirus
ccgtcccgaattaccgagga

SEQ ID NO: 60050 - DNA, 20 bp, Human adenovirus
ccgaggaagatcccgccgca

SEQ ID NO: 60051 - DNA, 20 bp, Human adenovirus
aggccgctgcctgccatgcc

SEQ ID NO: 60052 - DNA, 20 bp, Human adenovirus
ggccgctgcctgccatgcct

SEQ ID NO: 60053 - DNA, 20 bp, Human adenovirus
atgggcacctggaacgagat

SEQ ID NO: 60054 - DNA, 20 bp, Human adenovirus
aattggagcagtgtctggag

SEQ ID NO: 60055 - DNA, 20 bp, Human adenovirus
gagcagtgtctggagcgggc

SEQ ID NO: 60056 - DNA, 20 bp, Human adenovirus
ttaagcccgctccagacact

SEQ ID NO: 60057 - DNA, 20 bp, Human adenovirus
taagcccgctccagacactg

SEQ ID NO: 60058 - DNA, 20 bp, Human adenovirus
tcgcccctgggcggaggagt

SEQ ID NO: 60059 - DNA, 20 bp, Human adenovirus
catcttccatctccaccacc

SEQ ID NO: 60060 - DNA, 20 bp, Human adenovirus
catctccaccaccgtgggcg

SEQ ID NO: 60061 - DNA, 20 bp, Human adenovirus
agacttttcactcccaggcc

SEQ ID NO: 60062 - DNA, 20 bp, Human adenovirus
tcactcccaggcccacgata

SEQ ID NO: 60063 - DNA, 20 bp, Human adenovirus
cactcccaggcccacgatac

SEQ ID NO: 60064 - DNA, 20 bp, Human adenovirus
actcccaggcccacgatact

SEQ ID NO: 60065 - DNA, 20 bp, Human adenovirus
tgggcctggcggcgggcggg

SEQ ID NO: 60066 - DNA, 20 bp, Human adenovirus
gcccgcgccaccgacacgta

SEQ ID NO: 60067 - DNA, 20 bp, Human adenovirus
cccgcgccaccgacacgtac

SEQ ID NO: 60068 - DNA, 20 bp, Human adenovirus
agcctgggcaacaagtttag

SEQ ID NO: 60069 - DNA, 20 bp, Human adenovirus
agaaaccccacggtggctcc

SEQ ID NO: 60070 - DNA, 20 bp, Human adenovirus
gaaaccccacggtggctccc

SEQ ID NO: 60071 - DNA, 20 bp, Human adenovirus
agggtctgcaaattggtgtt

SEQ ID NO: 60072 - DNA, 20 bp, Human adenovirus
gtgttgacaaaactgaaaac

SEQ ID NO: 60073 - DNA, 20 bp, Human adenovirus
acaaaactgaaaacaaaaat

SEQ ID NO: 60074 - DNA, 20 bp, Human adenovirus
ttgttttcagttttgtcaac

SEQ ID NO: 60075 - DNA, 20 bp, Human adenovirus
tgttttcagttttgtcaaca

SEQ ID NO: 60076 - DNA, 20 bp, Human adenovirus
ccagcttttgctagattctc

SEQ ID NO: 60077 - DNA, 20 bp, Human adenovirus
tgctagattctctgggtgac

SEQ ID NO: 60078 - DNA, 20 bp, Human adenovirus
gctagattctctgggtgaca

SEQ ID NO: 60079 - DNA, 20 bp, Human adenovirus
ctagattctctgggtgacag

SEQ ID NO: 60080 - DNA, 20 bp, Human adenovirus
tctgggtgacagaaccagat

SEQ ID NO: 60081 - DNA, 20 bp, Human adenovirus
aagtacacgccggccaacgt

SEQ ID NO: 60082 - DNA, 20 bp, Human adenovirus
agtacacgccggccaacgtc

SEQ ID NO: 60083 - DNA, 20 bp, Human adenovirus
atgtactcgtaggtgttggt

SEQ ID NO: 60084 - DNA, 20 bp, Human adenovirus
gtgttggtgggcagtgtgac

SEQ ID NO: 60085 - DNA, 20 bp, Human adenovirus
gtgggcagtgtgacgttggc

SEQ ID NO: 60086 - DNA, 20 bp, Human adenovirus
cgcaaggacgtcaacatgat

SEQ ID NO: 60087 - DNA, 20 bp, Human adenovirus
cctgggcaacgacctgcgcg

SEQ ID NO: 60088 - DNA, 20 bp, Human adenovirus
gacagtgtgaacctctacgc

SEQ ID NO: 60089 - DNA, 20 bp, Human adenovirus
acagtgtgaacctctacgcc

SEQ ID NO: 60090 - DNA, 20 bp, Human adenovirus
acactgtcaaagcggacgga

SEQ ID NO: 60091 - DNA, 20 bp, Human adenovirus
cgccgaacgagttcgagatt

SEQ ID NO: 60092 - DNA, 20 bp, Human adenovirus
gagattaagcgcagcgtcga

SEQ ID NO: 60093 - DNA, 20 bp, Human adenovirus
agcgcagcgtcgacggggag

SEQ ID NO: 60094 - DNA, 20 bp, Human adenovirus
cttatccagatgctttccca

SEQ ID NO: 60095 - DNA, 20 bp, Human adenovirus
tccagatgctttcccactac

SEQ ID NO: 60096 - DNA, 20 bp, Human adenovirus
accggctacctcgcacctac

SEQ ID NO: 60097 - DNA, 20 bp, Human adenovirus
ccctacccgcttattggaga

SEQ ID NO: 60098 - DNA, 20 bp, Human adenovirus
gcggggtagggctgcccctg

SEQ ID NO: 60099 - DNA, 20 bp, Human adenovirus
tccgccggcaacgccaccac

SEQ ID NO: 60100 - DNA, 20 bp, Human adenovirus
ttcgctggagccgctcatgc

SEQ ID NO: 60101 - DNA, 20 bp, Human adenovirus
gctggagccgctcatgctta

SEQ ID NO: 60102 - DNA, 20 bp, Human adenovirus
ggtggtggcgttgccggcgg

SEQ ID NO: 60103 - DNA, 20 bp, Human adenovirus
ccggcggagaagggcgtgcg

SEQ ID NO: 60104 - DNA, 20 bp, Human adenovirus
gacccctttgggttttcgga

SEQ ID NO: 60105 - DNA, 20 bp, Human adenovirus
acccctttgggttttcggac

SEQ ID NO: 60106 - DNA, 20 bp, Human adenovirus
gggttttcggaccgccggct

SEQ ID NO: 60107 - DNA, 20 bp, Human adenovirus
ggttttcggaccgccggctt

SEQ ID NO: 60108 - DNA, 20 bp, Human adenovirus
tcggaccgccggcttaagca

SEQ ID NO: 60109 - DNA, 20 bp, Human adenovirus
ctaacgggggtgcccaatgg

SEQ ID NO: 60110 - DNA, 20 bp, Human adenovirus
cgccggagggtgggcagcac

SEQ ID NO: 60111 - DNA, 20 bp, Human adenovirus
tagcatgccattgggcaccc

SEQ ID NO: 60112 - DNA, 20 bp, Human adenovirus
ggcacccccgttagcaagtt

SEQ ID NO: 60113 - DNA, 20 bp, Human adenovirus
aactcggggatcaccagttt

SEQ ID NO: 60114 - DNA, 20 bp, Human adenovirus
gggaacagcaatctcgggga

SEQ ID NO: 60115 - DNA, 20 bp, Human adenovirus
ggaacagcaatctcggggaa

SEQ ID NO: 60116 - DNA, 20 bp, Human adenovirus
taaaatttcagccccggaca

SEQ ID NO: 60117 - DNA, 20 bp, Human adenovirus
aaaatttcagccccggacat

SEQ ID NO: 60118 - DNA, 20 bp, Human adenovirus
cactcgcagtgcacgggcat

SEQ ID NO: 60119 - DNA, 20 bp, Human adenovirus
gcatcatccctgcgccgcgc

SEQ ID NO: 60120 - DNA, 20 bp, Human adenovirus
gggtacagggccttaataaa

SEQ ID NO: 60121 - DNA, 20 bp, Human adenovirus
ataaaggccataatctgctt

SEQ ID NO: 60122 - DNA, 20 bp, Human adenovirus
aaagcttgctgggccttggc

SEQ ID NO: 60123 - DNA, 20 bp, Human adenovirus
tggatcattaccgtcccgtg

SEQ ID NO: 60124 - DNA, 20 bp, Human adenovirus
ccgtcccgtgcagacacttg

SEQ ID NO: 60125 - DNA, 20 bp, Human adenovirus
agctggccttccacctcggc

SEQ ID NO: 60126 - DNA, 20 bp, Human adenovirus
cacctcggcacagccgtggt

SEQ ID NO: 60127 - DNA, 20 bp, Human adenovirus
taagcatcgcgcaggccgct

SEQ ID NO: 60128 - DNA, 20 bp, Human adenovirus
catcagcacgttcatggtat

SEQ ID NO: 60129 - DNA, 20 bp, Human adenovirus
atggtatccatgcccttctc

SEQ ID NO: 60130 - DNA, 20 bp, Human adenovirus
tcccaggacgaaaccaaagg

SEQ ID NO: 60131 - DNA, 20 bp, Human adenovirus
ggtttcgtcctgggagaagg

SEQ ID NO: 60132 - DNA, 20 bp, Human adenovirus
ttttttggagggctgtccag

SEQ ID NO: 60133 - DNA, 20 bp, Human adenovirus
tttggagggctgtccagtgg

SEQ ID NO: 60134 - DNA, 20 bp, Human adenovirus
ttggagggctgtccagtgga

SEQ ID NO: 60135 - DNA, 20 bp, Human adenovirus
tggagggctgtccagtggaa

SEQ ID NO: 60136 - DNA, 20 bp, Human adenovirus
ggagggctgtccagtggaac

SEQ ID NO: 60137 - DNA, 20 bp, Human adenovirus
gaagagccggctcgtctaga

SEQ ID NO: 60138 - DNA, 20 bp, Human adenovirus
gtttccttctgttcatcctg

SEQ ID NO: 60139 - DNA, 20 bp, Human adenovirus
ccttctgttcatcctgtggg

SEQ ID NO: 60140 - DNA, 20 bp, Human adenovirus
cttctgttcatcctgtgggg

SEQ ID NO: 60141 - DNA, 20 bp, Human adenovirus
tgttcatcctgtgggggttc

SEQ ID NO: 60142 - DNA, 20 bp, Human adenovirus
gaaggcgataacgccaggct

SEQ ID NO: 60143 - DNA, 20 bp, Human adenovirus
agcgcagcgtcgagctcacc

SEQ ID NO: 60144 - DNA, 20 bp, Human adenovirus
tgcctaccccgccgttaacc

SEQ ID NO: 60145 - DNA, 20 bp, Human adenovirus
gcctaccccgccgttaacct

SEQ ID NO: 60146 - DNA, 20 bp, Human adenovirus
cctaccccgccgttaacctc

SEQ ID NO: 60147 - DNA, 20 bp, Human adenovirus
tttagcgaccccgagaccct

SEQ ID NO: 60148 - DNA, 20 bp, Human adenovirus
ttagcgaccccgagaccctg

SEQ ID NO: 60149 - DNA, 20 bp, Human adenovirus
tagcgaccccgagaccctgc

SEQ ID NO: 60150 - DNA, 20 bp, Human adenovirus
agcgaccccgagaccctgcg

SEQ ID NO: 60151 - DNA, 20 bp, Human adenovirus
gcgaccccgagaccctgcgc

SEQ ID NO: 60152 - DNA, 20 bp, Human adenovirus
ttgctaaaaaccttaaaacg

SEQ ID NO: 60153 - DNA, 20 bp, Human adenovirus
ctaaaaaccttaaaacgttg

SEQ ID NO: 60154 - DNA, 20 bp, Human adenovirus
aaacgttgtggacgggcttt

SEQ ID NO: 60155 - DNA, 20 bp, Human adenovirus
tggacgggctttgacgagcg

SEQ ID NO: 60156 - DNA, 20 bp, Human adenovirus
gacgagcgcaccgtcgcctt

SEQ ID NO: 60157 - DNA, 20 bp, Human adenovirus
cctaccactcggacgtgatc

SEQ ID NO: 60158 - DNA, 20 bp, Human adenovirus
agtgccactgccgctgcaac

SEQ ID NO: 60159 - DNA, 20 bp, Human adenovirus
cagcggcagtggcactcaag

SEQ ID NO: 60160 - DNA, 20 bp, Human adenovirus
cgtcctcgatcacgtccgag

SEQ ID NO: 60161 - DNA, 20 bp, Human adenovirus
cggcctgcgtcatcacccag

SEQ ID NO: 60162 - DNA, 20 bp, Human adenovirus
cacgccatccaaaaatcccg

SEQ ID NO: 60163 - DNA, 20 bp, Human adenovirus
ttcagaagaaactcttggcg

SEQ ID NO: 60164 - DNA, 20 bp, Human adenovirus
tcagaagaaactcttggcgg

SEQ ID NO: 60165 - DNA, 20 bp, Human adenovirus
cagaagaaactcttggcggg

SEQ ID NO: 60166 - DNA, 20 bp, Human adenovirus
ccgtcaccctttactcgatc

SEQ ID NO: 60167 - DNA, 20 bp, Human adenovirus
actcgatcccatctacgagg

SEQ ID NO: 60168 - DNA, 20 bp, Human adenovirus
ctcgatcccatctacgagga

SEQ ID NO: 60169 - DNA, 20 bp, Human adenovirus
accggaggggctgccggcgc

SEQ ID NO: 60170 - DNA, 20 bp, Human adenovirus
cccactctttatgccatttt

SEQ ID NO: 60171 - DNA, 20 bp, Human adenovirus
atgccatttttcagcagagt

SEQ ID NO: 60172 - DNA, 20 bp, Human adenovirus
tgccatttttcagcagagtc

SEQ ID NO: 60173 - DNA, 20 bp, Human adenovirus
ttcagcagagtcgaggtcag

SEQ ID NO: 60174 - DNA, 20 bp, Human adenovirus
tcagcagagtcgaggtcagc

SEQ ID NO: 60175 - DNA, 20 bp, Human adenovirus
ccggtgtccgcccagacccg

SEQ ID NO: 60176 - DNA, 20 bp, Human adenovirus
ggtataaaaacactgctgat

SEQ ID NO: 60177 - DNA, 20 bp, Human adenovirus
ttatacctaagtcgggtctg

SEQ ID NO: 60178 - DNA, 20 bp, Human adenovirus
tatacctaagtcgggtctgg

SEQ ID NO: 60179 - DNA, 20 bp, Human adenovirus
atacctaagtcgggtctggg

SEQ ID NO: 60180 - DNA, 20 bp, Human adenovirus
tgccctcggtttactttaac

SEQ ID NO: 60181 - DNA, 20 bp, Human adenovirus
actttaaccccttttcaggc

SEQ ID NO: 60182 - DNA, 20 bp, Human adenovirus
ctttaaccccttttcaggct

SEQ ID NO: 60183 - DNA, 20 bp, Human adenovirus
aaccccttttcaggctcccc

SEQ ID NO: 60184 - DNA, 20 bp, Human adenovirus
accccttttcaggctcccca

SEQ ID NO: 60185 - DNA, 20 bp, Human adenovirus
ttgctgtactctttgtggtg

SEQ ID NO: 60186 - DNA, 20 bp, Human adenovirus
tgctgtactctttgtggtga

SEQ ID NO: 60187 - DNA, 20 bp, Human adenovirus
gctgtactctttgtggtgag

SEQ ID NO: 60188 - DNA, 20 bp, Human adenovirus
ctgtactctttgtggtgagt

SEQ ID NO: 60189 - DNA, 20 bp, Human adenovirus
gtggtgagtttaataaaagc

SEQ ID NO: 60190 - DNA, 20 bp, Human adenovirus
cggggaggaaccatgaaggg

SEQ ID NO: 60191 - DNA, 20 bp, Human adenovirus
tgctaattatcctttccctg

SEQ ID NO: 60192 - DNA, 20 bp, Human adenovirus
gctaattatcctttccctgg

SEQ ID NO: 60193 - DNA, 20 bp, Human adenovirus
ctaattatcctttccctggt

SEQ ID NO: 60194 - DNA, 20 bp, Human adenovirus
tcctttccctggtggggggt

SEQ ID NO: 60195 - DNA, 20 bp, Human adenovirus
ggttttctttggcttttgta

SEQ ID NO: 60196 - DNA, 20 bp, Human adenovirus
tctttggcttttgtaattat

SEQ ID NO: 60197 - DNA, 20 bp, Human adenovirus
ctttggcttttgtaattatg

SEQ ID NO: 60198 - DNA, 20 bp, Human adenovirus
tttggcttttgtaattatgg

SEQ ID NO: 60199 - DNA, 20 bp, Human adenovirus
ggcttttgtaattatggcct

SEQ ID NO: 60200 - DNA, 20 bp, Human adenovirus
tgtgatggaaatacaattaa

SEQ ID NO: 60201 - DNA, 20 bp, Human adenovirus
gtgatggaaatacaattaaa

SEQ ID NO: 60202 - DNA, 20 bp, Human adenovirus
tgatggaaatacaattaaaa

SEQ ID NO: 60203 - DNA, 20 bp, Human adenovirus
aaaacccacaaatcaagcat

SEQ ID NO: 60204 - DNA, 20 bp, Human adenovirus
acttaatgctgacaagtctc

SEQ ID NO: 60205 - DNA, 20 bp, Human adenovirus
caaaacggggctaaacaaag

SEQ ID NO: 60206 - DNA, 20 bp, Human adenovirus
aaaacggggctaaacaaagt

SEQ ID NO: 60207 - DNA, 20 bp, Human adenovirus
aacaaagtaatattggacaa

SEQ ID NO: 60208 - DNA, 20 bp, Human adenovirus
gacaaggtaatactgctcaa

SEQ ID NO: 60209 - DNA, 20 bp, Human adenovirus
agccaacacaattgtatgtt

SEQ ID NO: 60210 - DNA, 20 bp, Human adenovirus
aaattaagccacataccaaa

SEQ ID NO: 60211 - DNA, 20 bp, Human adenovirus
agccacataccaaagaacct

SEQ ID NO: 60212 - DNA, 20 bp, Human adenovirus
caattacaagttgcagaaac

SEQ ID NO: 60213 - DNA, 20 bp, Human adenovirus
aattacaagttgcagaaact

SEQ ID NO: 60214 - DNA, 20 bp, Human adenovirus
caagttgcagaaactgatca

SEQ ID NO: 60215 - DNA, 20 bp, Human adenovirus
cttttctggttatctgtggg

SEQ ID NO: 60216 - DNA, 20 bp, Human adenovirus
tctggttatctgtgggatct

SEQ ID NO: 60217 - DNA, 20 bp, Human adenovirus
ctggttatctgtgggatctt

SEQ ID NO: 60218 - DNA, 20 bp, Human adenovirus
tggttatctgtgggatcttt

SEQ ID NO: 60219 - DNA, 20 bp, Human adenovirus
tctgtgggatctttattctc

SEQ ID NO: 60220 - DNA, 20 bp, Human adenovirus
tctttgccctgctcacctgc

SEQ ID NO: 60221 - DNA, 20 bp, Human adenovirus
gccctgctcacctgcacctg

SEQ ID NO: 60222 - DNA, 20 bp, Human adenovirus
ccctgctcacctgcacctgc

SEQ ID NO: 60223 - DNA, 20 bp, Human adenovirus
tctgcctggtcattaccttc

SEQ ID NO: 60224 - DNA, 20 bp, Human adenovirus
ccttcctgcagcttatcgac

SEQ ID NO: 60225 - DNA, 20 bp, Human adenovirus
ctttgctattatgatctacc

SEQ ID NO: 60226 - DNA, 20 bp, Human adenovirus
tttgctattatgatctaccc

SEQ ID NO: 60227 - DNA, 20 bp, Human adenovirus
gctattatgatctacccctg

SEQ ID NO: 60228 - DNA, 20 bp, Human adenovirus
ctattatgatctacccctgt

SEQ ID NO: 60229 - DNA, 20 bp, Human adenovirus
tgatctacccctgttttgat

SEQ ID NO: 60230 - DNA, 20 bp, Human adenovirus
acctgcatggtgggcgtcaa

SEQ ID NO: 60231 - DNA, 20 bp, Human adenovirus
ctcctgcgaaagccccgagt

SEQ ID NO: 60232 - DNA, 20 bp, Human adenovirus
cgcaggagcaatggatacag

SEQ ID NO: 60233 - DNA, 20 bp, Human adenovirus
gcaggagcaatggatacagc

SEQ ID NO: 60234 - DNA, 20 bp, Human adenovirus
cgcccgtctgctgggtgatg

SEQ ID NO: 60235 - DNA, 20 bp, Human adenovirus
gtctcctccaatggattcca

SEQ ID NO: 60236 - DNA, 20 bp, Human adenovirus
tctcctccaatggattccaa

SEQ ID NO: 60237 - DNA, 20 bp, Human adenovirus
caaaacttcccccctggggt

SEQ ID NO: 60238 - DNA, 20 bp, Human adenovirus
ccccctggggttctgtcact

SEQ ID NO: 60239 - DNA, 20 bp, Human adenovirus
tgtcactcaaactggctaac

SEQ ID NO: 60240 - DNA, 20 bp, Human adenovirus
cagaaggcggtggcttatca

SEQ ID NO: 60241 - DNA, 20 bp, Human adenovirus
tcatttaatgataatggaga

SEQ ID NO: 60242 - DNA, 20 bp, Human adenovirus
aatgataatggagacttggt

SEQ ID NO: 60243 - DNA, 20 bp, Human adenovirus
atgataatggagacttggta

SEQ ID NO: 60244 - DNA, 20 bp, Human adenovirus
gtagcatttaataaaaaaga

SEQ ID NO: 60245 - DNA, 20 bp, Human adenovirus
atggaaacatctaccttggc

SEQ ID NO: 60246 - DNA, 20 bp, Human adenovirus
tggaaacatctaccttggcg

SEQ ID NO: 60247 - DNA, 20 bp, Human adenovirus
gcggaaagccacatcaacca

SEQ ID NO: 60248 - DNA, 20 bp, Human adenovirus
aaggtagttttaatggttgc

SEQ ID NO: 60249 - DNA, 20 bp, Human adenovirus
taatggttgctggttgatgt

SEQ ID NO: 60250 - DNA, 20 bp, Human adenovirus
tacagtgtaaacaattctct

SEQ ID NO: 60251 - DNA, 20 bp, Human adenovirus
acagtgtaaacaattctctc

SEQ ID NO: 60252 - DNA, 20 bp, Human adenovirus
cagtgtaaacaattctctca

SEQ ID NO: 60253 - DNA, 20 bp, Human adenovirus
tctcagtacgggtggcctta

SEQ ID NO: 60254 - DNA, 20 bp, Human adenovirus
aataggggaaagttctcatt

SEQ ID NO: 60255 - DNA, 20 bp, Human adenovirus
gctcatgttttcacagtaag

SEQ ID NO: 60256 - DNA, 20 bp, Human adenovirus
tcacagtaagtgcagcacat

SEQ ID NO: 60257 - DNA, 20 bp, Human adenovirus
cacagtaagtgcagcacata

SEQ ID NO: 60258 - DNA, 20 bp, Human adenovirus
acagtaagtgcagcacataa

SEQ ID NO: 60259 - DNA, 20 bp, Human adenovirus
tgttattcagcagcccataa

SEQ ID NO: 60260 - DNA, 20 bp, Human adenovirus
ttaaaatttttacttccttt

SEQ ID NO: 60261 - DNA, 20 bp, Human adenovirus
taaaatttttacttcctttg

SEQ ID NO: 60262 - DNA, 20 bp, Human adenovirus
aaaatttttacttcctttgt

SEQ ID NO: 60263 - DNA, 20 bp, Human adenovirus
aaatttttacttcctttgtg

SEQ ID NO: 60264 - DNA, 20 bp, Human adenovirus
ttacttcctttgtggtcagg

SEQ ID NO: 60265 - DNA, 20 bp, Human adenovirus
atgctgccttgtctatcatt

SEQ ID NO: 60266 - DNA, 20 bp, Human adenovirus
tctatcatttaaagggggcg

SEQ ID NO: 60267 - DNA, 20 bp, Human adenovirus
aaagggggcggaggcaggat

SEQ ID NO: 60268 - DNA, 20 bp, Human adenovirus
aagggggcggaggcaggatt

SEQ ID NO: 60269 - DNA, 20 bp, Human adenovirus
gaagaaccatttttattcca

SEQ ID NO: 60270 - DNA, 20 bp, Human adenovirus
tcatttttccagccttggat

SEQ ID NO: 60271 - DNA, 20 bp, Human adenovirus
ttccagccttggattatttc

SEQ ID NO: 60272 - DNA, 20 bp, Human adenovirus
tccagccttggattatttct

SEQ ID NO: 60273 - DNA, 20 bp, Human adenovirus
ccagccttggattatttcta

SEQ ID NO: 60274 - DNA, 20 bp, Human adenovirus
cagccttggattatttctac

SEQ ID NO: 60275 - DNA, 20 bp, Human adenovirus
gtgtctccggtaatgccttc

SEQ ID NO: 60276 - DNA, 20 bp, Human adenovirus
tgtctccggtaatgccttcc

SEQ ID NO: 60277 - DNA, 20 bp, Human adenovirus
caaaatgtaagtgataaagc

SEQ ID NO: 60278 - DNA, 20 bp, Human adenovirus
ttctttaatcattttagtaa

SEQ ID NO: 60279 - DNA, 20 bp, Human adenovirus
tctttaatcattttagtaat

SEQ ID NO: 60280 - DNA, 20 bp, Human adenovirus
ttccggcaaaaatcacatcg

SEQ ID NO: 60281 - DNA, 20 bp, Human adenovirus
cggcaaaaatcacatcggac

SEQ ID NO: 60282 - DNA, 20 bp, Human adenovirus
gtatgcccgtggcatggtag

SEQ ID NO: 60283 - DNA, 20 bp, Human adenovirus
aaagccataaatatgccctg

SEQ ID NO: 60284 - DNA, 20 bp, Human adenovirus
aagccataaatatgccctga

SEQ ID NO: 60285 - DNA, 20 bp, Human adenovirus
ctgacctagctgagtactta

SEQ ID NO: 60286 - DNA, 20 bp, Human adenovirus
aaggcaacttacactgacgt

SEQ ID NO: 60287 - DNA, 20 bp, Human adenovirus
cactgacgtaatgacggaag

SEQ ID NO: 60288 - DNA, 20 bp, Human adenovirus
ttttttggcggggtttttac

SEQ ID NO: 60289 - DNA, 20 bp, Human adenovirus
tttttggcggggtttttaca

SEQ ID NO: 60290 - DNA, 20 bp, Human parainfluenza virus 1
tgacacatttagttccagga

SEQ ID NO: 60291 - DNA, 20 bp, Human parainfluenza virus 1
gacacatttagttccaggag

SEQ ID NO: 60292 - DNA, 20 bp, Human parainfluenza virus 1
acacatttagttccaggaga

SEQ ID NO: 60293 - DNA, 20 bp, Human parainfluenza virus 1
agttccaggagaagtgagag

SEQ ID NO: 60294 - DNA, 20 bp, Human parainfluenza virus 1
gttccaggagaagtgagagc

SEQ ID NO: 60295 - DNA, 20 bp, Human parainfluenza virus 1
cttcagacatatggatatcc

SEQ ID NO: 60296 - DNA, 20 bp, Human parainfluenza virus 1
agacatatggatatcctgca

SEQ ID NO: 60297 - DNA, 20 bp, Human parainfluenza virus 1
aagtttggatagtgttggtt

SEQ ID NO: 60298 - DNA, 20 bp, Human parainfluenza virus 1
ggatagtgttggttaaagcc

SEQ ID NO: 60299 - DNA, 20 bp, Human parainfluenza virus 1
gatagtgttggttaaagcca

SEQ ID NO: 60300 - DNA, 20 bp, Human parainfluenza virus 1
atggagactttgcccctgga

SEQ ID NO: 60301 - DNA, 20 bp, Human parainfluenza virus 1
gcccctggaaactatccagc

SEQ ID NO: 60302 - DNA, 20 bp, Human parainfluenza virus 1
cccctggaaactatccagca

SEQ ID NO: 60303 - DNA, 20 bp, Human parainfluenza virus 1
ctgtggtacaaaacaaagct

SEQ ID NO: 60304 - DNA, 20 bp, Human parainfluenza virus 1
cagttacatactgttgcata

SEQ ID NO: 60305 - DNA, 20 bp, Human parainfluenza virus 1
gagtcgaggacactgctgat

SEQ ID NO: 60306 - DNA, 20 bp, Human parainfluenza virus 1
tgtggttgctgatcgagtga

SEQ ID NO: 60307 - DNA, 20 bp, Human parainfluenza virus 1
ctgatcgagtgattcatcca

SEQ ID NO: 60308 - DNA, 20 bp, Human parainfluenza virus 1
atccatctttcattgctgtc

SEQ ID NO: 60309 - DNA, 20 bp, Human parainfluenza virus 1
cattgctgtcatttgtccag

SEQ ID NO: 60310 - DNA, 20 bp, Human parainfluenza virus 1
aattcctcctatccctgcag

SEQ ID NO: 60311 - DNA, 20 bp, Human parainfluenza virus 1
ctcctatccctgcagccgct

SEQ ID NO: 60312 - DNA, 20 bp, Human parainfluenza virus 1
tcatagtcagcatcactgct

SEQ ID NO: 60313 - DNA, 20 bp, Human parainfluenza virus 1
attgtttgcctggcttagtc

SEQ ID NO: 60314 - DNA, 20 bp, Human parainfluenza virus 1
ttgtttgcctggcttagtct

SEQ ID NO: 60315 - DNA, 20 bp, Human parainfluenza virus 1
acgtcgtcttatcctacaag

SEQ ID NO: 60316 - DNA, 20 bp, Human parainfluenza virus 1
tcctacaagcccacagaaat

SEQ ID NO: 60317 - DNA, 20 bp, Human parainfluenza virus 1
gagaagacagaagctggctc

SEQ ID NO: 60318 - DNA, 20 bp, Human parainfluenza virus 1
ttttcttttgggttgtcgat

SEQ ID NO: 60319 - DNA, 20 bp, Human parainfluenza virus 1
tcttttgggttgtcgatgat

SEQ ID NO: 60320 - DNA, 20 bp, Human parainfluenza virus 1
atcaacaaggtatacacagg

SEQ ID NO: 60321 - DNA, 20 bp, Human parainfluenza virus 1
ggactagttcctcgcctaga

SEQ ID NO: 60322 - DNA, 20 bp, Human parainfluenza virus 1
gactagttcctcgcctagag

SEQ ID NO: 60323 - DNA, 20 bp, Human parainfluenza virus 1
ctcgcctagaggccctgtgt

SEQ ID NO: 60324 - DNA, 20 bp, Human parainfluenza virus 1
ttgatcaaggattctagcat

SEQ ID NO: 60325 - DNA, 20 bp, Human parainfluenza virus 1
ccaacccaagtccagagctt

SEQ ID NO: 60326 - DNA, 20 bp, Human parainfluenza virus 1
aagatgccgttctacaaagg

SEQ ID NO: 60327 - DNA, 20 bp, Human parainfluenza virus 1
tacaaaggaacaaaagacgg

SEQ ID NO: 60328 - DNA, 20 bp, Human parainfluenza virus 1
tgttcctttgtagaacggca

SEQ ID NO: 60329 - DNA, 20 bp, Human parainfluenza virus 1
gttcctttgtagaacggcat

SEQ ID NO: 60330 - DNA, 20 bp, Human parainfluenza virus 1
caccgtcaaagaacgaagag

SEQ ID NO: 60331 - DNA, 20 bp, Human parainfluenza virus 1
gcattgtttgttgtgtatct

SEQ ID NO: 60332 - DNA, 20 bp, Human parainfluenza virus 1
cattgtttgttgtgtatctt

SEQ ID NO: 60333 - DNA, 20 bp, Human parainfluenza virus 1
tttgttgtgtatcttgtttt

SEQ ID NO: 60334 - DNA, 20 bp, Human parainfluenza virus 1
gttgtgtatcttgtttttct

SEQ ID NO: 60335 - DNA, 20 bp, Human parainfluenza virus 1
acaaaagggaaagacaataa

SEQ ID NO: 60336 - DNA, 20 bp, Human parainfluenza virus 1
gacccctctatggaagctct

SEQ ID NO: 60337 - DNA, 20 bp, Human parainfluenza virus 1
acccctctatggaagctcta

SEQ ID NO: 60338 - DNA, 20 bp, Human parainfluenza virus 1
aactcttgacctcctagagc

SEQ ID NO: 60339 - DNA, 20 bp, Human parainfluenza virus 1
acctcctagagcttccatag

SEQ ID NO: 60340 - DNA, 20 bp, Human parainfluenza virus 1
cccagattctcacacgaaga

SEQ ID NO: 60341 - DNA, 20 bp, Human parainfluenza virus 1
tcacacgaagaaaatgggac

SEQ ID NO: 60342 - DNA, 20 bp, Human parainfluenza virus 1
cttttttgtcaggacctgtt

SEQ ID NO: 60343 - DNA, 20 bp, Human parainfluenza virus 1
tttgtcaggacctgttttga

SEQ ID NO: 60344 - DNA, 20 bp, Human parainfluenza virus 1
ttgtcaggacctgttttgag

SEQ ID NO: 60345 - DNA, 20 bp, Human parainfluenza virus 1
gatctggagaaatgatagta

SEQ ID NO: 60346 - DNA, 20 bp, Human parainfluenza virus 1
gatccatgctcctctactac

SEQ ID NO: 60347 - DNA, 20 bp, Human parainfluenza virus 1
tatatcatcccttgtctcag

SEQ ID NO: 60348 - DNA, 20 bp, Human parainfluenza virus 1
tctcagtcggctggaccatg

SEQ ID NO: 60349 - DNA, 20 bp, Human parainfluenza virus 1
ctccagatctaactgttctt

SEQ ID NO: 60350 - DNA, 20 bp, Human parainfluenza virus 1
caattgctaaggtcccaaaa

SEQ ID NO: 60351 - DNA, 20 bp, Human parainfluenza virus 1
ctaaggtcccaaaaactctt

SEQ ID NO: 60352 - DNA, 20 bp, Human parainfluenza virus 1
cagatcttgcattaccgaac

SEQ ID NO: 60353 - DNA, 20 bp, Human parainfluenza virus 1
cattaccgaactcaatatca

SEQ ID NO: 60354 - DNA, 20 bp, Human parainfluenza virus 1
ccgaactcaatatcagtgaa

SEQ ID NO: 60355 - DNA, 20 bp, Human parainfluenza virus 1
catggaaaaaagcagtttgc

SEQ ID NO: 60356 - DNA, 20 bp, Human parainfluenza virus 1
gctatcctttaatggatgta

SEQ ID NO: 60357 - DNA, 20 bp, Human parainfluenza virus 1
ctatcctttaatggatgtaa

SEQ ID NO: 60358 - DNA, 20 bp, Human parainfluenza virus 1
aatggatgtaaatccacata

SEQ ID NO: 60359 - DNA, 20 bp, Human parainfluenza virus 1
atggatgtaaatccacatat

SEQ ID NO: 60360 - DNA, 20 bp, Human parainfluenza virus 1
tccttttctttctttgtgtt

SEQ ID NO: 60361 - DNA, 20 bp, Human parainfluenza virus 1
tctttctttgtgttgttgtt

SEQ ID NO: 60362 - DNA, 20 bp, Human parainfluenza virus 1
ctttctttgtgttgttgttt

SEQ ID NO: 60363 - DNA, 20 bp, Human parainfluenza virus 1
tttctttgtgttgttgtttt

SEQ ID NO: 60364 - DNA, 20 bp, Human parainfluenza virus 1
ctttgtgttgttgtttttct

SEQ ID NO: 60365 - DNA, 20 bp, Human parainfluenza virus 1
tttggtgctgtcattggtac

SEQ ID NO: 60366 - DNA, 20 bp, Human parainfluenza virus 1
ggtgctgtcattggtaccat

SEQ ID NO: 60367 - DNA, 20 bp, Human parainfluenza virus 1
gtgctgtcattggtaccata

SEQ ID NO: 60368 - DNA, 20 bp, Human parainfluenza virus 1
gtaccatagcactaggagta

SEQ ID NO: 60369 - DNA, 20 bp, Human parainfluenza virus 1
tttgagcagctgtggctact

SEQ ID NO: 60370 - DNA, 20 bp, Human parainfluenza virus 1
taagtacaactaaaaaggat

SEQ ID NO: 60371 - DNA, 20 bp, Human parainfluenza virus 1
acactgaacaggttaaggga

SEQ ID NO: 60372 - DNA, 20 bp, Human parainfluenza virus 1
cactgaacaggttaagggaa

SEQ ID NO: 60373 - DNA, 20 bp, Human parainfluenza virus 1
agggaactgtgatagatgtt

SEQ ID NO: 60374 - DNA, 20 bp, Human parainfluenza virus 1
atttggaaaaatacatggtt

SEQ ID NO: 60375 - DNA, 20 bp, Human parainfluenza virus 1
cattcttgacctataccaat

SEQ ID NO: 60376 - DNA, 20 bp, Human parainfluenza virus 1
ttgacctataccaattgcgg

SEQ ID NO: 60377 - DNA, 20 bp, Human parainfluenza virus 1
acctataccaattgcggttt

SEQ ID NO: 60378 - DNA, 20 bp, Human parainfluenza virus 1
cggtttaataggtataaatg

SEQ ID NO: 60379 - DNA, 20 bp, Human parainfluenza virus 1
aataggtataaatggaatag

SEQ ID NO: 60380 - DNA, 20 bp, Human parainfluenza virus 1
accaatcaggtgtacaacaa

SEQ ID NO: 60381 - DNA, 20 bp, Human parainfluenza virus 1
gggttaaagacaatccagtc

SEQ ID NO: 60382 - DNA, 20 bp, Human parainfluenza virus 1
aagacaatccagtcaaccta

SEQ ID NO: 60383 - DNA, 20 bp, Human parainfluenza virus 1
tacaaacgatggctgaaaaa

SEQ ID NO: 60384 - DNA, 20 bp, Human parainfluenza virus 1
ttcagccatcgtttgtataa

SEQ ID NO: 60385 - DNA, 20 bp, Human parainfluenza virus 1
ctggagatgtcccgtagggg

SEQ ID NO: 60386 - DNA, 20 bp, Human parainfluenza virus 1
tggagatgtcccgtagggga

SEQ ID NO: 60387 - DNA, 20 bp, Human parainfluenza virus 1
ttacctggaccaagtctact

SEQ ID NO: 60388 - DNA, 20 bp, Human parainfluenza virus 1
cctggaccaagtctactttc

SEQ ID NO: 60389 - DNA, 20 bp, Human parainfluenza virus 1
ctggatccaccacaatttca

SEQ ID NO: 60390 - DNA, 20 bp, Human parainfluenza virus 1
tgtaatagctgcaggaacaa

SEQ ID NO: 60391 - DNA, 20 bp, Human parainfluenza virus 1
tcagttatgctccttgccca

SEQ ID NO: 60392 - DNA, 20 bp, Human parainfluenza virus 1
tgctccttgcccactgtgaa

SEQ ID NO: 60393 - DNA, 20 bp, Human parainfluenza virus 1
cccactgtgaatgagactac

SEQ ID NO: 60394 - DNA, 20 bp, Human parainfluenza virus 1
acagtgggcaaggagcataa

SEQ ID NO: 60395 - DNA, 20 bp, Human parainfluenza virus 1
aaaatacactcattttccta

SEQ ID NO: 60396 - DNA, 20 bp, Human parainfluenza virus 1
tcctagggtacggtggctta

SEQ ID NO: 60397 - DNA, 20 bp, Human parainfluenza virus 1
cctagggtacggtggcttaa

SEQ ID NO: 60398 - DNA, 20 bp, Human parainfluenza virus 1
ctagggtacggtggcttaac

SEQ ID NO: 60399 - DNA, 20 bp, Human parainfluenza virus 1
acaactccgctccaaggcga

SEQ ID NO: 60400 - DNA, 20 bp, Human parainfluenza virus 1
aggttggcactccaacctgc

SEQ ID NO: 60401 - DNA, 20 bp, Human parainfluenza virus 1
gcactccaacctgcaaatag

SEQ ID NO: 60402 - DNA, 20 bp, Human parainfluenza virus 1
gatatcaacaaccccatgac

SEQ ID NO: 60403 - DNA, 20 bp, Human parainfluenza virus 1
aatggtcatggggttgttga

SEQ ID NO: 60404 - DNA, 20 bp, Human parainfluenza virus 1
atggtcatggggttgttgat

SEQ ID NO: 60405 - DNA, 20 bp, Human parainfluenza virus 1
ctacaaccacactgtacgca

SEQ ID NO: 60406 - DNA, 20 bp, Human parainfluenza virus 1
atcccaccataatgtactca

SEQ ID NO: 60407 - DNA, 20 bp, Human parainfluenza virus 1
tcaacatgctaagactcaag

SEQ ID NO: 60408 - DNA, 20 bp, Human parainfluenza virus 1
tacattcttgagtcttagca

SEQ ID NO: 60409 - DNA, 20 bp, Human parainfluenza virus 1
ttgagtcttagcatgttgat

SEQ ID NO: 60410 - DNA, 20 bp, Human parainfluenza virus 1
aacaagaaattaaggatatt

SEQ ID NO: 60411 - DNA, 20 bp, Human parainfluenza virus 1
aggatattgatcgttacact

SEQ ID NO: 60412 - DNA, 20 bp, Human parainfluenza virus 1
atcgttacacttttgaacct

SEQ ID NO: 60413 - DNA, 20 bp, Human parainfluenza virus 1
cacttttgaaccttatccga

SEQ ID NO: 60414 - DNA, 20 bp, Human parainfluenza virus 1
tgaaccttatccgattttct

SEQ ID NO: 60415 - DNA, 20 bp, Human parainfluenza virus 1
agctggacgactcgataaaa

SEQ ID NO: 60416 - DNA, 20 bp, Human parainfluenza virus 1
tgggagcttatcgactcttt

SEQ ID NO: 60417 - DNA, 20 bp, Human parainfluenza virus 1
tcgactctttatttcccaat

SEQ ID NO: 60418 - DNA, 20 bp, Human parainfluenza virus 1
atttcccaatcttggtgagg

SEQ ID NO: 60419 - DNA, 20 bp, Human parainfluenza virus 1
tttcccaatcttggtgagga

SEQ ID NO: 60420 - DNA, 20 bp, Human parainfluenza virus 1
gcagaaacactactagcaaa

SEQ ID NO: 60421 - DNA, 20 bp, Human parainfluenza virus 1
ttcagtgaaaatgggatggt

SEQ ID NO: 60422 - DNA, 20 bp, Human parainfluenza virus 1
agtgaaaatgggatggtaaa

SEQ ID NO: 60423 - DNA, 20 bp, Human parainfluenza virus 1
acctactaaagagactgact

SEQ ID NO: 60424 - DNA, 20 bp, Human parainfluenza virus 1
agtaggtcaatttctccctt

SEQ ID NO: 60425 - DNA, 20 bp, Human parainfluenza virus 1
gtgtcagagtgtcagcaatg

SEQ ID NO: 60426 - DNA, 20 bp, Human parainfluenza virus 1
ctgtcacacaaacctataag

SEQ ID NO: 60427 - DNA, 20 bp, Human parainfluenza virus 1
ttttgcttataggtttgtgt

SEQ ID NO: 60428 - DNA, 20 bp, Human parainfluenza virus 1
tttgcttataggtttgtgtg

SEQ ID NO: 60429 - DNA, 20 bp, Human parainfluenza virus 1
ttgcttataggtttgtgtga

SEQ ID NO: 60430 - DNA, 20 bp, Human parainfluenza virus 1
atcccagctaacataggagg

SEQ ID NO: 60431 - DNA, 20 bp, Human parainfluenza virus 1
aactatatgtctacagctag

SEQ ID NO: 60432 - DNA, 20 bp, Human parainfluenza virus 1
tgtcagaaatataggtgatc

SEQ ID NO: 60433 - DNA, 20 bp, Human parainfluenza virus 1
gtcagaaatataggtgatcc

SEQ ID NO: 60434 - DNA, 20 bp, Human parainfluenza virus 1
tcagaaatataggtgatcca

SEQ ID NO: 60435 - DNA, 20 bp, Human parainfluenza virus 1
gcaataggattgaggcaaaa

SEQ ID NO: 60436 - DNA, 20 bp, Human parainfluenza virus 1
aggcaaaaaatgtggtttca

SEQ ID NO: 60437 - DNA, 20 bp, Human parainfluenza virus 1
catctaacttatggaagacc

SEQ ID NO: 60438 - DNA, 20 bp, Human parainfluenza virus 1
atctaacttatggaagacca

SEQ ID NO: 60439 - DNA, 20 bp, Human parainfluenza virus 1
tggaagaccaatccacggtt

SEQ ID NO: 60440 - DNA, 20 bp, Human parainfluenza virus 1
tagctcaaaccagggctaac

SEQ ID NO: 60441 - DNA, 20 bp, Human parainfluenza virus 1
agtttagagaatttgaagtt

SEQ ID NO: 60442 - DNA, 20 bp, Human parainfluenza virus 1
agagaatttgaagttactca

SEQ ID NO: 60443 - DNA, 20 bp, Human parainfluenza virus 1
gagaatttgaagttactcac

SEQ ID NO: 60444 - DNA, 20 bp, Human parainfluenza virus 1
gaagttactcacccctgtat

SEQ ID NO: 60445 - DNA, 20 bp, Human parainfluenza virus 1
gcatattcactttacgggtt

SEQ ID NO: 60446 - DNA, 20 bp, Human parainfluenza virus 1
catattcactttacgggtta

SEQ ID NO: 60447 - DNA, 20 bp, Human parainfluenza virus 1
actttacgggttaaacgtca

SEQ ID NO: 60448 - DNA, 20 bp, Human parainfluenza virus 1
acgggttaaacgtcagaggg

SEQ ID NO: 60449 - DNA, 20 bp, Human parainfluenza virus 1
cgggttaaacgtcagaggga

SEQ ID NO: 60450 - DNA, 20 bp, Human parainfluenza virus 1
gaggactgggatcctgatgc

SEQ ID NO: 60451 - DNA, 20 bp, Human parainfluenza virus 1
aacacaatatacctttaaag

SEQ ID NO: 60452 - DNA, 20 bp, Human parainfluenza virus 1
aaagaagaacgaaagaactc

SEQ ID NO: 60453 - DNA, 20 bp, Human parainfluenza virus 1
aagaagaacgaaagaactcc

SEQ ID NO: 60454 - DNA, 20 bp, Human parainfluenza virus 1
tttcgttcttctttaaaggt

SEQ ID NO: 60455 - DNA, 20 bp, Human parainfluenza virus 1
tcgggattaatagcaccagt

SEQ ID NO: 60456 - DNA, 20 bp, Human parainfluenza virus 1
cgggattaatagcaccagtt

SEQ ID NO: 60457 - DNA, 20 bp, Human parainfluenza virus 1
gggattaatagcaccagttg

SEQ ID NO: 60458 - DNA, 20 bp, Human parainfluenza virus 1
atagcaccagttgtttgaaa

SEQ ID NO: 60459 - DNA, 20 bp, Human parainfluenza virus 1
tttgaaagcattggaactta

SEQ ID NO: 60460 - DNA, 20 bp, Influenza A virus
cttttcttgaaagttccagc

SEQ ID NO: 60461 - DNA, 20 bp, Influenza A virus
tcttgaaagttccagcgcaa

SEQ ID NO: 60462 - DNA, 20 bp, Influenza A virus
cttgaaagttccagcgcaaa

SEQ ID NO: 60463 - DNA, 20 bp, Influenza A virus
ttgaaagttccagcgcaaaa

SEQ ID NO: 60464 - DNA, 20 bp, Influenza A virus
aaagttccagcgcaaaatgc

SEQ ID NO: 60465 - DNA, 20 bp, Influenza A virus
gaaaattcgtgtcttgaaac

SEQ ID NO: 60466 - DNA, 20 bp, Influenza A virus
aaaattcgtgtcttgaaacg

SEQ ID NO: 60467 - DNA, 20 bp, Influenza A virus
gtgtcttgaaacgatggaag

SEQ ID NO: 60468 - DNA, 20 bp, Influenza A virus
aaacgatggaagttattcaa

SEQ ID NO: 60469 - DNA, 20 bp, Influenza A virus
ttcaacaaacaagagtggac

SEQ ID NO: 60470 - DNA, 20 bp, Influenza A virus
caaagaaaaagaagagtaag

SEQ ID NO: 60471 - DNA, 20 bp, Influenza A virus
gcttcttctttcctattgtt

SEQ ID NO: 60472 - DNA, 20 bp, Influenza A virus
cttcttctttcctattgttc

SEQ ID NO: 60473 - DNA, 20 bp, Influenza A virus
ttctttcctattgttcgttg

SEQ ID NO: 60474 - DNA, 20 bp, Influenza A virus
tttcctattgttcgttgtgt

SEQ ID NO: 60475 - DNA, 20 bp, Influenza A virus
aacagtctgggcttccggtt

SEQ ID NO: 60476 - DNA, 20 bp, Influenza A virus
cggttggaggtaatgaaaag

SEQ ID NO: 60477 - DNA, 20 bp, Influenza A virus
gaggtaatgaaaagaaggct

SEQ ID NO: 60478 - DNA, 20 bp, Influenza A virus
ttagaaaaatgatgactaat

SEQ ID NO: 60479 - DNA, 20 bp, Influenza A virus
gaaaaatgatgactaattca

SEQ ID NO: 60480 - DNA, 20 bp, Influenza A virus
tcaaataaaatggctagact

SEQ ID NO: 60481 - DNA, 20 bp, Influenza A virus
catgttcgaaagcaagagca

SEQ ID NO: 60482 - DNA, 20 bp, Influenza A virus
gaaagcaagagcatgaagct

SEQ ID NO: 60483 - DNA, 20 bp, Influenza A virus
ctagcatttctgctggtatt

SEQ ID NO: 60484 - DNA, 20 bp, Influenza A virus
ctgctggtatttgtgttcgg

SEQ ID NO: 60485 - DNA, 20 bp, Influenza A virus
gctctcatagtgaatgcacc

SEQ ID NO: 60486 - DNA, 20 bp, Influenza A virus
ggtgcattcactatgagagc

SEQ ID NO: 60487 - DNA, 20 bp, Influenza A virus
gtgcattcactatgagagcg

SEQ ID NO: 60488 - DNA, 20 bp, Influenza A virus
actatgagagcgaagtcatc

SEQ ID NO: 60489 - DNA, 20 bp, Influenza A virus
gagtccgtcccaccagtatg

SEQ ID NO: 60490 - DNA, 20 bp, Influenza A virus
ggagtgtctggaattaatga

SEQ ID NO: 60491 - DNA, 20 bp, Influenza A virus
gagtgtctggaattaatgaa

SEQ ID NO: 60492 - DNA, 20 bp, Influenza A virus
atgaatcggctgatatgagc

SEQ ID NO: 60493 - DNA, 20 bp, Influenza A virus
gggtaacagtgataaagaac

SEQ ID NO: 60494 - DNA, 20 bp, Influenza A virus
ctggcccaaggtcattattt

SEQ ID NO: 60495 - DNA, 20 bp, Influenza A virus
aaatgggagctaatggatga

SEQ ID NO: 60496 - DNA, 20 bp, Influenza A virus
gtaatcccctgaatccattt

SEQ ID NO: 60497 - DNA, 20 bp, Influenza A virus
taatcccctgaatccatttg

SEQ ID NO: 60498 - DNA, 20 bp, Influenza A virus
gtcagtcataaggaaattga

SEQ ID NO: 60499 - DNA, 20 bp, Influenza A virus
tcagtcataaggaaattgag

SEQ ID NO: 60500 - DNA, 20 bp, Influenza A virus
caatctatttgagaaattct

SEQ ID NO: 60501 - DNA, 20 bp, Influenza A virus
gagaaattcttccctagcag

SEQ ID NO: 60502 - DNA, 20 bp, Influenza A virus
agaaattcttccctagcagt

SEQ ID NO: 60503 - DNA, 20 bp, Influenza A virus
ttccctagcagttcgtacag

SEQ ID NO: 60504 - DNA, 20 bp, Influenza A virus
cctagcagttcgtacaggag

SEQ ID NO: 60505 - DNA, 20 bp, Human papillomavirus 61
tcctgctctgcaaggactac

SEQ ID NO: 60506 - DNA, 20 bp, Human papillomavirus 61
cctgctctgcaaggactacg

SEQ ID NO: 60507 - DNA, 20 bp, Human papillomavirus 61
ctgctctgcaaggactacga

SEQ ID NO: 60508 - DNA, 20 bp, Human papillomavirus 61
gaggatttaaggctgacatg

SEQ ID NO: 60509 - DNA, 20 bp, Human papillomavirus 61
aggatttaaggctgacatgt

SEQ ID NO: 60510 - DNA, 20 bp, Human papillomavirus 61
ggaccattcctgttacggac

SEQ ID NO: 60511 - DNA, 20 bp, Human papillomavirus 61
ctgttacggacccactgtgg

SEQ ID NO: 60512 - DNA, 20 bp, Human papillomavirus 61
cggacccactgtggaacaga

SEQ ID NO: 60513 - DNA, 20 bp, Human papillomavirus 61
gctgaactatatatacggtg

SEQ ID NO: 60514 - DNA, 20 bp, Human papillomavirus 61
tcctgtatacttaacggttt

SEQ ID NO: 60515 - DNA, 20 bp, Human papillomavirus 61
ttagacagctcagagtcaga

SEQ ID NO: 60516 - DNA, 20 bp, Human papillomavirus 61
gacagctcagagtcagagga

SEQ ID NO: 60517 - DNA, 20 bp, Human papillomavirus 61
ttgaacaagcacagcaggcc

SEQ ID NO: 60518 - DNA, 20 bp, Human papillomavirus 61
aacaagcacagcaggcctac

SEQ ID NO: 60519 - DNA, 20 bp, Human papillomavirus 61
ctacctgtggcatttgtaag

SEQ ID NO: 60520 - DNA, 20 bp, Human papillomavirus 61
gtaatttaaaagcaaaatta

SEQ ID NO: 60521 - DNA, 20 bp, Human papillomavirus 61
aaaagcaaaattactgtaca

SEQ ID NO: 60522 - DNA, 20 bp, Human papillomavirus 61
aaagcaaaattactgtacaa

SEQ ID NO: 60523 - DNA, 20 bp, Human papillomavirus 61
ctgtacaaattcaaggacct

SEQ ID NO: 60524 - DNA, 20 bp, Human papillomavirus 61
aaggacctatttggactagc

SEQ ID NO: 60525 - DNA, 20 bp, Human papillomavirus 61
aacataccggaaagacagat

SEQ ID NO: 60526 - DNA, 20 bp, Human papillomavirus 61
aaccaccaaagattagaagc

SEQ ID NO: 60527 - DNA, 20 bp, Human papillomavirus 61
gaagcgcaccgtgcgcacta

SEQ ID NO: 60528 - DNA, 20 bp, Human papillomavirus 61
gtatagaacagccatgggaa

SEQ ID NO: 60529 - DNA, 20 bp, Human papillomavirus 61
cccatggctgttctatacca

SEQ ID NO: 60530 - DNA, 20 bp, Human papillomavirus 61
ctgggaaatgaggacccaaa

SEQ ID NO: 60531 - DNA, 20 bp, Human papillomavirus 61
ttggccagtaactgccaagc

SEQ ID NO: 60532 - DNA, 20 bp, Human papillomavirus 61
gccagtaactgccaagcaaa

SEQ ID NO: 60533 - DNA, 20 bp, Human papillomavirus 61
aatatactttgcttggcagt

SEQ ID NO: 60534 - DNA, 20 bp, Human papillomavirus 61
atatactttgcttggcagtt

SEQ ID NO: 60535 - DNA, 20 bp, Human papillomavirus 61
tacggaccaagcgacacagg

SEQ ID NO: 60536 - DNA, 20 bp, Human papillomavirus 61
acggaccaagcgacacaggg

SEQ ID NO: 60537 - DNA, 20 bp, Human papillomavirus 61
cggaccaagcgacacaggga

SEQ ID NO: 60538 - DNA, 20 bp, Human papillomavirus 61
tgcatgagcctactaaattt

SEQ ID NO: 60539 - DNA, 20 bp, Human papillomavirus 61
gcatgagcctactaaatttt

SEQ ID NO: 60540 - DNA, 20 bp, Human papillomavirus 61
agatgcgtgccaggagaaat

SEQ ID NO: 60541 - DNA, 20 bp, Human papillomavirus 61
gatgcgtgccaggagaaatt

SEQ ID NO: 60542 - DNA, 20 bp, Human papillomavirus 61
ctagacctctatgaaaaaga

SEQ ID NO: 60543 - DNA, 20 bp, Human papillomavirus 61
aggaccaaatattgcattgg

SEQ ID NO: 60544 - DNA, 20 bp, Human papillomavirus 61
ggtcctcaagcttgttgcta

SEQ ID NO: 60545 - DNA, 20 bp, Human papillomavirus 61
caaaccacctctttggaaat

SEQ ID NO: 60546 - DNA, 20 bp, Human papillomavirus 61
ggaaatgtggaatacgcagc

SEQ ID NO: 60547 - DNA, 20 bp, Human papillomavirus 61
gaaatgtggaatacgcagcc

SEQ ID NO: 60548 - DNA, 20 bp, Human papillomavirus 61
tttcttccagcatcgttgtg

SEQ ID NO: 60549 - DNA, 20 bp, Human papillomavirus 61
ttcttccagcatcgttgtgg

SEQ ID NO: 60550 - DNA, 20 bp, Human papillomavirus 61
ttggtgtttttctgtgccat

SEQ ID NO: 60551 - DNA, 20 bp, Human papillomavirus 61
tggtgtttttctgtgccata

SEQ ID NO: 60552 - DNA, 20 bp, Human papillomavirus 61
ggtgtttttctgtgccatat

SEQ ID NO: 60553 - DNA, 20 bp, Human papillomavirus 61
gtgtttttctgtgccatata

SEQ ID NO: 60554 - DNA, 20 bp, Human papillomavirus 61
ttctgtgccatatatgtagg

SEQ ID NO: 60555 - DNA, 20 bp, Human papillomavirus 61
gcacccggcctcctactgta

SEQ ID NO: 60556 - DNA, 20 bp, Human papillomavirus 61
gccctgtgtcccgcccccct

SEQ ID NO: 60557 - DNA, 20 bp, Human papillomavirus 61
tattaatcctttattcactg

SEQ ID NO: 60558 - DNA, 20 bp, Human papillomavirus 61
attaatcctttattcactga

SEQ ID NO: 60559 - DNA, 20 bp, Human papillomavirus 61
ttaatcctttattcactgag

SEQ ID NO: 60560 - DNA, 20 bp, Human papillomavirus 61
atcctttattcactgagcct

SEQ ID NO: 60561 - DNA, 20 bp, Human papillomavirus 61
attcactgagccttctatta

SEQ ID NO: 60562 - DNA, 20 bp, Human papillomavirus 61
accatgacattagtcccatt

SEQ ID NO: 60563 - DNA, 20 bp, Human papillomavirus 61
ccatgacattagtcccattc

SEQ ID NO: 60564 - DNA, 20 bp, Human papillomavirus 61
gtcccattccatcggatgct

SEQ ID NO: 60565 - DNA, 20 bp, Human papillomavirus 61
catcggatgctgtggagtta

SEQ ID NO: 60566 - DNA, 20 bp, Human papillomavirus 61
cagcctttggtgccgtcctc

SEQ ID NO: 60567 - DNA, 20 bp, Human papillomavirus 61
tatatatattcagggctctg

SEQ ID NO: 60568 - DNA, 20 bp, Human papillomavirus 61
agggctctgatttttatttg

SEQ ID NO: 60569 - DNA, 20 bp, Human papillomavirus 61
ttatttgttgcctgcttatg

SEQ ID NO: 60570 - DNA, 20 bp, Human papillomavirus 61
tatttgttgcctgcttatgt

SEQ ID NO: 60571 - DNA, 20 bp, Human papillomavirus 61
atttgttgcctgcttatgtg

SEQ ID NO: 60572 - DNA, 20 bp, Human papillomavirus 61
ctgtaggacatccctattgt

SEQ ID NO: 60573 - DNA, 20 bp, Human papillomavirus 61
tagtttgcagcttgatgggc

SEQ ID NO: 60574 - DNA, 20 bp, Human papillomavirus 61
gcagcttgatgggctgcagg

SEQ ID NO: 60575 - DNA, 20 bp, Human papillomavirus 61
cagcttgatgggctgcaggg

SEQ ID NO: 60576 - DNA, 20 bp, Human papillomavirus 61
atgggctgcagggcaagaaa

SEQ ID NO: 60577 - DNA, 20 bp, Human papillomavirus 61
gatatttgcaccactatatg

SEQ ID NO: 60578 - DNA, 20 bp, Human papillomavirus 61
gcaccactatatgcaagtat

SEQ ID NO: 60579 - DNA, 20 bp, Human papillomavirus 61
caccactatatgcaagtatc

SEQ ID NO: 60580 - DNA, 20 bp, Human papillomavirus 61
tttacaaatggctgctgaac

SEQ ID NO: 60581 - DNA, 20 bp, Human papillomavirus 61
acaaatggctgctgaaccat

SEQ ID NO: 60582 - DNA, 20 bp, Human papillomavirus 61
gctgcaacgtgcccagggcc

SEQ ID NO: 60583 - DNA, 20 bp, Human papillomavirus 61
gttggtttaatgaattgttt

SEQ ID NO: 60584 - DNA, 20 bp, Human papillomavirus 61
ttggtttaatgaattgtttg

SEQ ID NO: 60585 - DNA, 20 bp, Human papillomavirus 61
gtttaatgaattgtttgtaa

SEQ ID NO: 60586 - DNA, 20 bp, Human papillomavirus 61
aatgaattgtttgtaaccgt

SEQ ID NO: 60587 - DNA, 20 bp, Human papillomavirus 61
ggtgtggtaccaccaccctc

SEQ ID NO: 60588 - DNA, 20 bp, Human papillomavirus 61
gtgtggtaccaccaccctct

SEQ ID NO: 60589 - DNA, 20 bp, Human papillomavirus 61
agaagacacatataggtttt

SEQ ID NO: 60590 - DNA, 20 bp, Human papillomavirus 61
gaagacacatataggttttt

SEQ ID NO: 60591 - DNA, 20 bp, Human papillomavirus 61
ttgcagtccagagctattac

SEQ ID NO: 60592 - DNA, 20 bp, Human papillomavirus 61
gtctgtatgctgttgttgtg

SEQ ID NO: 60593 - DNA, 20 bp, Human papillomavirus 61
tctgtatgctgttgttgtgc

SEQ ID NO: 60594 - DNA, 20 bp, Human papillomavirus 61
ttgtgcatgtgttgttttgt

SEQ ID NO: 60595 - DNA, 20 bp, Human papillomavirus 61
tgcatgtgttgttttgtatt

SEQ ID NO: 60596 - DNA, 20 bp, Human papillomavirus 61
ttttgtattgtgctgtactg

SEQ ID NO: 60597 - DNA, 20 bp, Human papillomavirus 61
attgttgcacgccttatttt

SEQ ID NO: 60598 - DNA, 20 bp, Human papillomavirus 61
ttgttgcacgccttattttg

SEQ ID NO: 60599 - DNA, 20 bp, Human papillomavirus 61
ttgcacgccttattttgtgc

SEQ ID NO: 60600 - DNA, 20 bp, Human papillomavirus 61
cacgccttattttgtgcagc

SEQ ID NO: 60601 - DNA, 20 bp, Human papillomavirus 61
ttttgtgcagcttccccatt

SEQ ID NO: 60602 - DNA, 20 bp, Human papillomavirus 61
ctaacacacacagtttggaa

SEQ ID NO: 60603 - DNA, 20 bp, Human papillomavirus 61
ggaacaatgctccatctatc

SEQ ID NO: 60604 - DNA, 20 bp, Human papillomavirus 61
gaacaatgctccatctatct

SEQ ID NO: 60605 - DNA, 20 bp, Human papillomavirus 61
tttgacatgttgtgcaatta

SEQ ID NO: 60606 - DNA, 20 bp, Human papillomavirus 61
ttgacatgttgtgcaattac

SEQ ID NO: 60607 - DNA, 20 bp, Human herpesvirus
cgttgtagatctggatacac

SEQ ID NO: 60608 - DNA, 20 bp, Human herpesvirus
tagatctggatacactactt

SEQ ID NO: 60609 - DNA, 20 bp, Human herpesvirus
tgcccgcaatataacagcaa

SEQ ID NO: 60610 - DNA, 20 bp, Human herpesvirus
acaaggtgggacgtggtctg

SEQ ID NO: 60611 - DNA, 20 bp, Human herpesvirus
caaggtgggacgtggtctga

SEQ ID NO: 60612 - DNA, 20 bp, Human herpesvirus
caacgctcaaactatacaga

SEQ ID NO: 60613 - DNA, 20 bp, Human herpesvirus
aacgctcaaactatacagaa

SEQ ID NO: 60614 - DNA, 20 bp, Human herpesvirus
aggctttgttggaggttctg

SEQ ID NO: 60615 - DNA, 20 bp, Human herpesvirus
gttggaggttctgtatagtt

SEQ ID NO: 60616 - DNA, 20 bp, Human herpesvirus
ttggaggttctgtatagttt

SEQ ID NO: 60617 - DNA, 20 bp, Human herpesvirus
cacacaacaggcggactcta

SEQ ID NO: 60618 - DNA, 20 bp, Human herpesvirus
ggtctggcagcccatgtccg

SEQ ID NO: 60619 - DNA, 20 bp, Human herpesvirus
gtctggcagcccatgtccgc

SEQ ID NO: 60620 - DNA, 20 bp, Human herpesvirus
acctgactcacgctcagggc

SEQ ID NO: 60621 - DNA, 20 bp, Human herpesvirus
ccgctgtcgccctgagcgtg

SEQ ID NO: 60622 - DNA, 20 bp, Human herpesvirus
tccgagccgccattggccca

SEQ ID NO: 60623 - DNA, 20 bp, Human herpesvirus
ccgagccgccattggcccat

SEQ ID NO: 60624 - DNA, 20 bp, Human herpesvirus
cgagccgccattggcccatt

SEQ ID NO: 60625 - DNA, 20 bp, Human herpesvirus
gcccattcggccgaccaatc

SEQ ID NO: 60626 - DNA, 20 bp, Human herpesvirus
ggccgaccaatcccgttcga

SEQ ID NO: 60627 - DNA, 20 bp, Human herpesvirus
gtcgttgcacccatcccccc

SEQ ID NO: 60628 - DNA, 20 bp, Human herpesvirus
tcgttgcacccatcccccct

SEQ ID NO: 60629 - DNA, 20 bp, Human herpesvirus
cacccatcccccctttgctt

SEQ ID NO: 60630 - DNA, 20 bp, Human herpesvirus
gcttaatcacccgaaaacta

SEQ ID NO: 60631 - DNA, 20 bp, Human herpesvirus
cttaatcacccgaaaactag

SEQ ID NO: 60632 - DNA, 20 bp, Human herpesvirus
atttatagtggcgtatgcta

SEQ ID NO: 60633 - DNA, 20 bp, Human herpesvirus
tttatagtggcgtatgctaa

SEQ ID NO: 60634 - DNA, 20 bp, Human herpesvirus
atagtggcgtatgctaaccg

SEQ ID NO: 60635 - DNA, 20 bp, Human herpesvirus
tagtggcgtatgctaaccgc

SEQ ID NO: 60636 - DNA, 20 bp, Human herpesvirus
catgcgggataagttggcct

SEQ ID NO: 60637 - DNA, 20 bp, Human herpesvirus
ggcgtaggagcgtctttctc

SEQ ID NO: 60638 - DNA, 20 bp, Human herpesvirus
ctccaccgccgcgcatggtg

SEQ ID NO: 60639 - DNA, 20 bp, Human herpesvirus
tccaccgccgcgcatggtgt

SEQ ID NO: 60640 - DNA, 20 bp, Human herpesvirus
ttggatgctctgcgtgctgg

SEQ ID NO: 60641 - DNA, 20 bp, Human herpesvirus
gatgctctgcgtgctggagg

SEQ ID NO: 60642 - DNA, 20 bp, Human herpesvirus
ctggaactgaccgtgtggcg

SEQ ID NO: 60643 - DNA, 20 bp, Human herpesvirus
ctccgtgctccttcattgtc

SEQ ID NO: 60644 - DNA, 20 bp, Human herpesvirus
ccgacaatgaaggagcacgg

SEQ ID NO: 60645 - DNA, 20 bp, Human herpesvirus
acgtgcaggcgccacacggt

SEQ ID NO: 60646 - DNA, 20 bp, Human herpesvirus
cgtgcaggcgccacacggtc

SEQ ID NO: 60647 - DNA, 20 bp, Human herpesvirus
cctgctcttttgcgtgctgc

SEQ ID NO: 60648 - DNA, 20 bp, Human herpesvirus
tgcgtgctgctggaagcctg

SEQ ID NO: 60649 - DNA, 20 bp, Human herpesvirus
gcgtgctgctggaagcctgc

SEQ ID NO: 60650 - DNA, 20 bp, Human herpesvirus
cgtgctgctggaagcctgct

SEQ ID NO: 60651 - DNA, 20 bp, Human herpesvirus
cttaacctcggcctcggttg

SEQ ID NO: 60652 - DNA, 20 bp, Human herpesvirus
ttaaaaatccctttggggtc

SEQ ID NO: 60653 - DNA, 20 bp, Human herpesvirus
taaaaatccctttggggtcc

SEQ ID NO: 60654 - DNA, 20 bp, Human herpesvirus
aaaaatccctttggggtcct

SEQ ID NO: 60655 - DNA, 20 bp, Human herpesvirus
aaaatccctttggggtcctc

SEQ ID NO: 60656 - DNA, 20 bp, Human herpesvirus
ggggtcctcttgagtccctg

SEQ ID NO: 60657 - DNA, 20 bp, Human herpesvirus
tgttcggtctcccggattca

SEQ ID NO: 60658 - DNA, 20 bp, Human herpesvirus
ggtctcccggattcactgcc

SEQ ID NO: 60659 - DNA, 20 bp, Human herpesvirus
actgccatctctgaagggcc

SEQ ID NO: 60660 - DNA, 20 bp, Human herpesvirus
atcataggtggcatggccct

SEQ ID NO: 60661 - DNA, 20 bp, Human herpesvirus
agagatggcagtgaatccgg

SEQ ID NO: 60662 - DNA, 20 bp, Human herpesvirus
gagtgcaggtaaacgccaag

SEQ ID NO: 60663 - DNA, 20 bp, Human herpesvirus
gcctacgcacaagtggcttc

SEQ ID NO: 60664 - DNA, 20 bp, Human herpesvirus
ttaacgcgtaggggtgcggt

SEQ ID NO: 60665 - DNA, 20 bp, Human herpesvirus
agaagccacttgtgcgtagg

SEQ ID NO: 60666 - DNA, 20 bp, Human herpesvirus
tgcgtaggcgaagagaccgc

SEQ ID NO: 60667 - DNA, 20 bp, Human herpesvirus
tgtcagttccacggcgtgtt

SEQ ID NO: 60668 - DNA, 20 bp, Human herpesvirus
cacggcgtgttttgcctgta

SEQ ID NO: 60669 - DNA, 20 bp, Human herpesvirus
tgcctgtaccagtgtcgcca

SEQ ID NO: 60670 - DNA, 20 bp, Human herpesvirus
gcctgtaccagtgtcgccag

SEQ ID NO: 60671 - DNA, 20 bp, Human herpesvirus
cctgtaccagtgtcgccagt

SEQ ID NO: 60672 - DNA, 20 bp, Human herpesvirus
cgtaccagagtcccgagctc

SEQ ID NO: 60673 - DNA, 20 bp, Human herpesvirus
gcgcttcagtgcaccgtggg

SEQ ID NO: 60674 - DNA, 20 bp, Human herpesvirus
agtgcaccgtgggccctgac

SEQ ID NO: 60675 - DNA, 20 bp, Human herpesvirus
caggagaggtatttcccact

SEQ ID NO: 60676 - DNA, 20 bp, Human herpesvirus
cccactgggcggagttacat

SEQ ID NO: 60677 - DNA, 20 bp, Human herpesvirus
ccactgggcggagttacatg

SEQ ID NO: 60678 - DNA, 20 bp, Human herpesvirus
catgttatcagtgactggat

SEQ ID NO: 60679 - DNA, 20 bp, Human herpesvirus
tcagtgactggatgtgggca

SEQ ID NO: 60680 - DNA, 20 bp, Human herpesvirus
ctgaacacgcccgtgacctg

SEQ ID NO: 60681 - DNA, 20 bp, Human herpesvirus
gcgctgcgactgcagaatca

SEQ ID NO: 60682 - DNA, 20 bp, Human herpesvirus
acgatcgtctgattctgcag

SEQ ID NO: 60683 - DNA, 20 bp, Human herpesvirus
tgcagtcgcagcgccaactc

SEQ ID NO: 60684 - DNA, 20 bp, Human herpesvirus
agtaatagacgggacgcatt

SEQ ID NO: 60685 - DNA, 20 bp, Human herpesvirus
cgcaacatggtaaggcgacg

SEQ ID NO: 60686 - DNA, 20 bp, Human herpesvirus
ccatgttgcgcaattcaggc

SEQ ID NO: 60687 - DNA, 20 bp, Human herpesvirus
cgcaattcaggcatcggcag

SEQ ID NO: 60688 - DNA, 20 bp, Human herpesvirus
aggcatcggcagcctctacc

SEQ ID NO: 60689 - DNA, 20 bp, Human herpesvirus
ttctttgcggtccactctat

SEQ ID NO: 60690 - DNA, 20 bp, Human herpesvirus
ttaggatatccctaacttcg

SEQ ID NO: 60691 - DNA, 20 bp, Human herpesvirus
ggatatccctaacttcggag

SEQ ID NO: 60692 - DNA, 20 bp, Human herpesvirus
ggagcggagacggccggacg

SEQ ID NO: 60693 - DNA, 20 bp, Human herpesvirus
tgtgggagcgtccggccgtc

SEQ ID NO: 60694 - DNA, 20 bp, Human herpesvirus
gtgggagcgtccggccgtct

SEQ ID NO: 60695 - DNA, 20 bp, Human herpesvirus
ctcaaggggccgtgattact

SEQ ID NO: 60696 - DNA, 20 bp, Human herpesvirus
ctgcgacaacggtgccgcag

SEQ ID NO: 60697 - DNA, 20 bp, Human herpesvirus
caggcaactcccctccggta

SEQ ID NO: 60698 - DNA, 20 bp, Human herpesvirus
cctgcggcaccgttgtcgca

SEQ ID NO: 60699 - DNA, 20 bp, Human herpesvirus
tcgcagtaatcacggcccct

SEQ ID NO: 60700 - DNA, 20 bp, Human herpesvirus
ctcccggcgctcgcccaacc

SEQ ID NO: 60701 - DNA, 20 bp, Human herpesvirus
cgggcggtcatgacggagac

SEQ ID NO: 60702 - DNA, 20 bp, Human herpesvirus
gtctccgtcatgaccgcccg

SEQ ID NO: 60703 - DNA, 20 bp, Human herpesvirus
gcccgaggcttctggttggg

SEQ ID NO: 60704 - DNA, 20 bp, Human herpesvirus
tggttgggcgagcgccggga

SEQ ID NO: 60705 - DNA, 20 bp, Human herpesvirus
ggtgcagcgcgacactgtcc

SEQ ID NO: 60706 - DNA, 20 bp, Human herpesvirus
ttctgccgtattgtaggcgg

SEQ ID NO: 60707 - DNA, 20 bp, Human herpesvirus
tgccgtattgtaggcggtcg

SEQ ID NO: 60708 - DNA, 20 bp, Human herpesvirus
taggcggtcgcgtggtctgc

SEQ ID NO: 60709 - DNA, 20 bp, Human herpesvirus
taacatgatggtttcgcata

SEQ ID NO: 60710 - DNA, 20 bp, Human herpesvirus
cgcatacccgggcgcggggg

SEQ ID NO: 60711 - DNA, 20 bp, Human herpesvirus
gcatacccgggcgcgggggc

SEQ ID NO: 60712 - DNA, 20 bp, Human herpesvirus
aggttcgaagggatacaccc

SEQ ID NO: 60713 - DNA, 20 bp, Human herpesvirus
gaagggatacacccgctcac

SEQ ID NO: 60714 - DNA, 20 bp, Human herpesvirus
gccgctttgggggagcaatc

SEQ ID NO: 60715 - DNA, 20 bp, Human herpesvirus
gggggagcaatccctgtggc

SEQ ID NO: 60716 - DNA, 20 bp, Human herpesvirus
ggggagcaatccctgtggcg

SEQ ID NO: 60717 - DNA, 20 bp, Human herpesvirus
ccgcttgggcgtgcggcgga

SEQ ID NO: 60718 - DNA, 20 bp, Human herpesvirus
gtcggtgagttcagccaggg

SEQ ID NO: 60719 - DNA, 20 bp, Human herpesvirus
gcggatgcactttctccggg

SEQ ID NO: 60720 - DNA, 20 bp, Human herpesvirus
ctccgggagaccagacgcgc

SEQ ID NO: 60721 - DNA, 20 bp, Human herpesvirus
tccgggagaccagacgcgcc

SEQ ID NO: 60722 - DNA, 20 bp, Human herpesvirus
tccatggggagatcttcctg

SEQ ID NO: 60723 - DNA, 20 bp, Human herpesvirus
ccatggggagatcttcctgt

SEQ ID NO: 60724 - DNA, 20 bp, Human herpesvirus
tcgcgtcccagaggacccca

SEQ ID NO: 60725 - DNA, 20 bp, Human herpesvirus
actggtatccacacggagca

SEQ ID NO: 60726 - DNA, 20 bp, Human herpesvirus
tgttcagtcgttatatcgcc

SEQ ID NO: 60727 - DNA, 20 bp, Human herpesvirus
tccccctctcacaccagttg

SEQ ID NO: 60728 - DNA, 20 bp, Human herpesvirus
gtccctttgggccgctggag

SEQ ID NO: 60729 - DNA, 20 bp, Human herpesvirus
gggccgctggaggacgcctc

SEQ ID NO: 60730 - DNA, 20 bp, Human herpesvirus
ggccgctggaggacgcctct

SEQ ID NO: 60731 - DNA, 20 bp, Human herpesvirus
cgcggtgatgtgtgggggct

SEQ ID NO: 60732 - DNA, 20 bp, Human herpesvirus
atttccgccacgtcccgtct

SEQ ID NO: 60733 - DNA, 20 bp, Human herpesvirus
ccgccacgtcccgtctttcc

SEQ ID NO: 60734 - DNA, 20 bp, Human herpesvirus
cgccacgtcccgtctttccg

SEQ ID NO: 60735 - DNA, 20 bp, Human herpesvirus
aaggagcccacgttctcccg

SEQ ID NO: 60736 - DNA, 20 bp, Human herpesvirus
tcccgccacattataagcaa

SEQ ID NO: 60737 - DNA, 20 bp, Human herpesvirus
cttataatgtggcgggagaa

SEQ ID NO: 60738 - DNA, 20 bp, Human herpesvirus
taatgtggcgggagaacgtg

SEQ ID NO: 60739 - DNA, 20 bp, Human herpesvirus
aaccggccctgttggacgat

SEQ ID NO: 60740 - DNA, 20 bp, Human herpesvirus
tatcacccccagcacatcgc

SEQ ID NO: 60741 - DNA, 20 bp, Human herpesvirus
ggctccgttacctgcggtgc

SEQ ID NO: 60742 - DNA, 20 bp, Human herpesvirus
cctgcggtgctggcagatgc

SEQ ID NO: 60743 - DNA, 20 bp, Human herpesvirus
gcccaccacagacacctccc

SEQ ID NO: 60744 - DNA, 20 bp, Human herpesvirus
tctgcgggggggcttgtgtc

SEQ ID NO: 60745 - DNA, 20 bp, Human herpesvirus
ctgcgggggggcttgtgtct

SEQ ID NO: 60746 - DNA, 20 bp, Human herpesvirus
tgcgggggggcttgtgtctc

SEQ ID NO: 60747 - DNA, 20 bp, Human herpesvirus
tgtctctcgcgtgaggtgag

SEQ ID NO: 60748 - DNA, 20 bp, Human herpesvirus
aacgctcgaatcacgccgtg

SEQ ID NO: 60749 - DNA, 20 bp, Human herpesvirus
ccccaaggcgcaccgtagcc

SEQ ID NO: 60750 - DNA, 20 bp, Human herpesvirus
atctccggcgggatcctgat

SEQ ID NO: 60751 - DNA, 20 bp, Human herpesvirus
tctccggcgggatcctgatt

SEQ ID NO: 60752 - DNA, 20 bp, Human herpesvirus
cgcgggctacggtgcgcctt

SEQ ID NO: 60753 - DNA, 20 bp, Human herpesvirus
cgcacgagaccaggtccctc

SEQ ID NO: 60754 - DNA, 20 bp, Human herpesvirus
ataaggctcaaaaaacacag

SEQ ID NO: 60755 - DNA, 20 bp, Human herpesvirus
tttgagccttattaagtccc

SEQ ID NO: 60756 - DNA, 20 bp, Human herpesvirus
ttgagccttattaagtcccg

SEQ ID NO: 60757 - DNA, 20 bp, Human herpesvirus
tgagccttattaagtcccgc

SEQ ID NO: 60758 - DNA, 20 bp, Human herpesvirus
cgcctgcccagggagcagga

SEQ ID NO: 60759 - DNA, 20 bp, Human herpesvirus
gcatcgaggagctgtccggc

SEQ ID NO: 60760 - DNA, 20 bp, Human herpesvirus
ttatactcctgctccctggg

SEQ ID NO: 60761 - DNA, 20 bp, Human herpesvirus
tatactcctgctccctgggc

SEQ ID NO: 60762 - DNA, 20 bp, Human herpesvirus
atactcctgctccctgggca

SEQ ID NO: 60763 - DNA, 20 bp, Human herpesvirus
gggaggaagacgtggttacg

SEQ ID NO: 60764 - DNA, 20 bp, Human herpesvirus
cggggggtaagagtgccggt

SEQ ID NO: 60765 - DNA, 20 bp, Human herpesvirus
cgggagcgggtgaaggaatg

SEQ ID NO: 60766 - DNA, 20 bp, Human herpesvirus
cttcacccgctcccgcaaca

SEQ ID NO: 60767 - DNA, 20 bp, Human herpesvirus
acccgctcccgcaacacctt

SEQ ID NO: 60768 - DNA, 20 bp, Human herpesvirus
cagagacccctggggcactg

SEQ ID NO: 60769 - DNA, 20 bp, Human herpesvirus
agagacccctggggcactgg

SEQ ID NO: 60770 - DNA, 20 bp, Human herpesvirus
aggtgccccaggtacacttg

SEQ ID NO: 60771 - DNA, 20 bp, Human herpesvirus
tcagaggtgctgcgggcggc

SEQ ID NO: 60772 - DNA, 20 bp, Human herpesvirus
ccttcgacctttacgtccgg

SEQ ID NO: 60773 - DNA, 20 bp, Human herpesvirus
gacctttacgtccggggtga

SEQ ID NO: 60774 - DNA, 20 bp, Human herpesvirus
acgtccggggtgaccctgta

SEQ ID NO: 60775 - DNA, 20 bp, Human herpesvirus
cgtccggggtgaccctgtat

SEQ ID NO: 60776 - DNA, 20 bp, Human herpesvirus
acctcggcccagctggtaaa

SEQ ID NO: 60777 - DNA, 20 bp, Human herpesvirus
cttgcaggcgaagaggcact

SEQ ID NO: 60778 - DNA, 20 bp, Human herpesvirus
caggcgaagaggcactcctg

SEQ ID NO: 60779 - DNA, 20 bp, Human herpesvirus
gtggtcctccggactccacg

SEQ ID NO: 60780 - DNA, 20 bp, Human herpesvirus
gcctgcaaggaattctgccg

SEQ ID NO: 60781 - DNA, 20 bp, Human herpesvirus
tgccgggagctgggagtggc

SEQ ID NO: 60782 - DNA, 20 bp, Human herpesvirus
cagactaccacctggtgctg

SEQ ID NO: 60783 - DNA, 20 bp, Human herpesvirus
agactaccacctggtgctgc

SEQ ID NO: 60784 - DNA, 20 bp, Human herpesvirus
gcaagccgctgaaccagctt

SEQ ID NO: 60785 - DNA, 20 bp, Human herpesvirus
agggtctccaagatgcgcac

SEQ ID NO: 60786 - DNA, 20 bp, Human herpesvirus
tcggagctgtcgcgatagag

SEQ ID NO: 60787 - DNA, 20 bp, Human herpesvirus
gagaccctgaagctggttca

SEQ ID NO: 60788 - DNA, 20 bp, Human papillomavirus
ttgctttgcaaagagtatgg

SEQ ID NO: 60789 - DNA, 20 bp, Human papillomavirus
tgctttgcaaagagtatggt

SEQ ID NO: 60790 - DNA, 20 bp, Human papillomavirus
gctttgcaaagagtatggtt

SEQ ID NO: 60791 - DNA, 20 bp, Human papillomavirus
ctttgcaaagagtatggttt

SEQ ID NO: 60792 - DNA, 20 bp, Human papillomavirus
gcaaagagtatggtttggag

SEQ ID NO: 60793 - DNA, 20 bp, Human papillomavirus
agtgcggacaagcagaccta

SEQ ID NO: 60794 - DNA, 20 bp, Human papillomavirus
ttgaagacgctgactctagt

SEQ ID NO: 60795 - DNA, 20 bp, Human papillomavirus
aagacgctgactctagtgtg

SEQ ID NO: 60796 - DNA, 20 bp, Human papillomavirus
tggaggattccgaaggtacc

SEQ ID NO: 60797 - DNA, 20 bp, Human papillomavirus
ggaatcctccataacgctag

SEQ ID NO: 60798 - DNA, 20 bp, Human papillomavirus
ttggaacgccagaggaggta

SEQ ID NO: 60799 - DNA, 20 bp, Human papillomavirus
gaacgccagaggaggtaacg

SEQ ID NO: 60800 - DNA, 20 bp, Human papillomavirus
gatctgcctctccgtctccc

SEQ ID NO: 60801 - DNA, 20 bp, Human papillomavirus
acgctcctcctcctgatcct

SEQ ID NO: 60802 - DNA, 20 bp, Human papillomavirus
gctttcctcatcccccgtta

SEQ ID NO: 60803 - DNA, 20 bp, Human papillomavirus
tactggtacaagacggccat

SEQ ID NO: 60804 - DNA, 20 bp, Human papillomavirus
ttagacagacgttggtagga

SEQ ID NO: 60805 - DNA, 20 bp, Human papillomavirus
gacagacgttggtaggacat

SEQ ID NO: 60806 - DNA, 20 bp, Human papillomavirus
gtaggacatagcatggaaga

SEQ ID NO: 60807 - DNA, 20 bp, Human papillomavirus
gtcttccatgctatgtccta

SEQ ID NO: 60808 - DNA, 20 bp, Human papillomavirus
gtgtcgttcctagctgcctt

SEQ ID NO: 60809 - DNA, 20 bp, Human papillomavirus
tgtcgttcctagctgccttt

SEQ ID NO: 60810 - DNA, 20 bp, Human papillomavirus
ctagctgcctttaaattgtt

SEQ ID NO: 60811 - DNA, 20 bp, Human papillomavirus
aaattgttcctaaaaggcgt

SEQ ID NO: 60812 - DNA, 20 bp, Human papillomavirus
aattgttcctaaaaggcgtg

SEQ ID NO: 60813 - DNA, 20 bp, Human papillomavirus
gctgcagcttaagtgtccac

SEQ ID NO: 60814 - DNA, 20 bp, Human papillomavirus
ctgcagcttaagtgtccacc

SEQ ID NO: 60815 - DNA, 20 bp, Human papillomavirus
agtgtccacccctaatgata

SEQ ID NO: 60816 - DNA, 20 bp, Human papillomavirus
gcgcagcaggctgacagtgt

SEQ ID NO: 60817 - DNA, 20 bp, Human papillomavirus
cgcagcaggctgacagtgtt

SEQ ID NO: 60818 - DNA, 20 bp, Human papillomavirus
cagacattgatgcagagtgc

SEQ ID NO: 60819 - DNA, 20 bp, Human papillomavirus
gcttttgacacggtgagggc

SEQ ID NO: 60820 - DNA, 20 bp, Human papillomavirus
tgacacggtgagggcaggca

SEQ ID NO: 60821 - DNA, 20 bp, Human papillomavirus
gacacggtgagggcaggcac

SEQ ID NO: 60822 - DNA, 20 bp, Human papillomavirus
acacggtgagggcaggcaca

SEQ ID NO: 60823 - DNA, 20 bp, Human papillomavirus
gaactgctgtatccccagtc

SEQ ID NO: 60824 - DNA, 20 bp, Human papillomavirus
ctgctcctgttgattctgct

SEQ ID NO: 60825 - DNA, 20 bp, Human papillomavirus
attctgctgaggctgcgact

SEQ ID NO: 60826 - DNA, 20 bp, Human papillomavirus
tgctgaggctgcgactgggg

SEQ ID NO: 60827 - DNA, 20 bp, Human papillomavirus
taataggggatagtggttcg

SEQ ID NO: 60828 - DNA, 20 bp, Human papillomavirus
aacagcgtacagagttcctg

SEQ ID NO: 60829 - DNA, 20 bp, Human papillomavirus
ctgacaagagtcagtatacc

SEQ ID NO: 60830 - DNA, 20 bp, Human papillomavirus
atagcattgccagggtatat

SEQ ID NO: 60831 - DNA, 20 bp, Human papillomavirus
ccagggtatatgtctgcatt

SEQ ID NO: 60832 - DNA, 20 bp, Human papillomavirus
gtataatcctacatgcttgt

SEQ ID NO: 60833 - DNA, 20 bp, Human papillomavirus
aatgtctgttggtgattctt

SEQ ID NO: 60834 - DNA, 20 bp, Human papillomavirus
gtgattcttatcctaatcgc

SEQ ID NO: 60835 - DNA, 20 bp, Human papillomavirus
ttatcctaatcgccttttta

SEQ ID NO: 60836 - DNA, 20 bp, Human papillomavirus
tcctaatcgcctttttattg

SEQ ID NO: 60837 - DNA, 20 bp, Human papillomavirus
ttattgttgatgttttatgt

SEQ ID NO: 60838 - DNA, 20 bp, Human papillomavirus
actggtactggtggcttcga

SEQ ID NO: 60839 - DNA, 20 bp, Human papillomavirus
ctggtactggtggcttcgaa

SEQ ID NO: 60840 - DNA, 20 bp, Human papillomavirus
gaagtgacaacctccaccgt

SEQ ID NO: 60841 - DNA, 20 bp, Human papillomavirus
cagaccccgccgtcttggat

SEQ ID NO: 60842 - DNA, 20 bp, Human papillomavirus
gatatcaccccctcaggtac

SEQ ID NO: 60843 - DNA, 20 bp, Human papillomavirus
tatgatgtttatgctgattc

SEQ ID NO: 60844 - DNA, 20 bp, Human papillomavirus
atgctgattcggatgtcctt

SEQ ID NO: 60845 - DNA, 20 bp, Human papillomavirus
tgctgattcggatgtccttc

SEQ ID NO: 60846 - DNA, 20 bp, Human papillomavirus
ggatgtccttcagccattgc

SEQ ID NO: 60847 - DNA, 20 bp, Human papillomavirus
agccattgcttgatgagtta

SEQ ID NO: 60848 - DNA, 20 bp, Human papillomavirus
caaaggtgatcagtacggat

SEQ ID NO: 60849 - DNA, 20 bp, Human papillomavirus
aaaggtgatcagtacggatg

SEQ ID NO: 60850 - DNA, 20 bp, Human papillomavirus
gtccgcgtgacatagacatc

SEQ ID NO: 60851 - DNA, 20 bp, Human papillomavirus
gaaacaggtgttggaggtag

SEQ ID NO: 60852 - DNA, 20 bp, Human papillomavirus
aaacaggtgttggaggtagg

SEQ ID NO: 60853 - DNA, 20 bp, Human papillomavirus
aaacagggttcggtgccttg

SEQ ID NO: 60854 - DNA, 20 bp, Human papillomavirus
ggtgccttggattttgccac

SEQ ID NO: 60855 - DNA, 20 bp, Human papillomavirus
gattttgccactctgcagtc

SEQ ID NO: 60856 - DNA, 20 bp, Human papillomavirus
tgccactctgcagtcaaata

SEQ ID NO: 60857 - DNA, 20 bp, Human papillomavirus
gccactctgcagtcaaataa

SEQ ID NO: 60858 - DNA, 20 bp, Human papillomavirus
gcagttcatcttccaactgt

SEQ ID NO: 60859 - DNA, 20 bp, Human papillomavirus
cagttcatcttccaactgtg

SEQ ID NO: 60860 - DNA, 20 bp, Human papillomavirus
atcttccaactgtgcaagat

SEQ ID NO: 60861 - DNA, 20 bp, Human papillomavirus
caactgtgcaagataaccct

SEQ ID NO: 60862 - DNA, 20 bp, Human papillomavirus
ctcctgaaattatggcctat

SEQ ID NO: 60863 - DNA, 20 bp, Human papillomavirus
tgtgttctgtaactgtacgt

SEQ ID NO: 60864 - DNA, 20 bp, Human papillomavirus
tgtaactgtacgttctggtg

SEQ ID NO: 60865 - DNA, 20 bp, Human papillomavirus
tggtgcacagatttctgcac

SEQ ID NO: 60866 - DNA, 20 bp, Human papillomavirus
ctgcaccccatcgccttgtg

SEQ ID NO: 60867 - DNA, 20 bp, Human papillomavirus
tgcaccccatcgccttgtgt

SEQ ID NO: 60868 - DNA, 20 bp, Human papillomavirus type 134
cctggaactgcttaatgagc

SEQ ID NO: 60869 - DNA, 20 bp, Human papillomavirus type 134
atgagcagctgctgcaagaa

SEQ ID NO: 60870 - DNA, 20 bp, Human papillomavirus type 134
aattggcagatctaaaacga

SEQ ID NO: 60871 - DNA, 20 bp, Human papillomavirus type 134
gcagatctaaaacgaaagta

SEQ ID NO: 60872 - DNA, 20 bp, Human papillomavirus type 134
ctctggactcaaatactttc

SEQ ID NO: 60873 - DNA, 20 bp, Human papillomavirus type 134
tattggggttacacaggtag

SEQ ID NO: 60874 - DNA, 20 bp, Human papillomavirus type 134
gggttacacaggtagagtct

SEQ ID NO: 60875 - DNA, 20 bp, Human papillomavirus type 134
cacaggtagagtctgtctct

SEQ ID NO: 60876 - DNA, 20 bp, Human papillomavirus type 134
ccagacagtagacgatggcg

SEQ ID NO: 60877 - DNA, 20 bp, Human papillomavirus type 134
ttgcaaagtaaaaatagacg

SEQ ID NO: 60878 - DNA, 20 bp, Human papillomavirus type 134
tggttacagcctttaacaga

SEQ ID NO: 60879 - DNA, 20 bp, Human papillomavirus type 134
ggttacagcctttaacagac

SEQ ID NO: 60880 - DNA, 20 bp, Human papillomavirus type 134
gttacagcctttaacagaca

SEQ ID NO: 60881 - DNA, 20 bp, Human papillomavirus type 134
cagcctttaacagacagtaa

SEQ ID NO: 60882 - DNA, 20 bp, Human papillomavirus type 134
aacagacagtaaatttgggc

SEQ ID NO: 60883 - DNA, 20 bp, Human papillomavirus type 134
tattatgcaaggcagaaagg

SEQ ID NO: 60884 - DNA, 20 bp, Human papillomavirus type 134
tgcaaggcagaaaggaatat

SEQ ID NO: 60885 - DNA, 20 bp, Human papillomavirus type 134
catctttagctgtaagtgaa

SEQ ID NO: 60886 - DNA, 20 bp, Human papillomavirus type 134
agctgtaagtgaatttaaag

SEQ ID NO: 60887 - DNA, 20 bp, Human papillomavirus type 134
gctgtaagtgaatttaaagc

SEQ ID NO: 60888 - DNA, 20 bp, Human papillomavirus type 134
gttgcacaaaccggagaaac

SEQ ID NO: 60889 - DNA, 20 bp, Human papillomavirus type 134
cacaaaccggagaaacctcc

SEQ ID NO: 60890 - DNA, 20 bp, Human papillomavirus type 134
cctctgggtgttgatgagga

SEQ ID NO: 60891 - DNA, 20 bp, Human papillomavirus type 134
atgaggatgtccttcgactt

SEQ ID NO: 60892 - DNA, 20 bp, Human papillomavirus type 134
gacttccccctcgtcgcccc

SEQ ID NO: 60893 - DNA, 20 bp, Human papillomavirus type 134
ctgatcgtttgttgaagata

SEQ ID NO: 60894 - DNA, 20 bp, Human papillomavirus type 134
gttgaagatattcagtagtt

SEQ ID NO: 60895 - DNA, 20 bp, Human papillomavirus type 134
ttgaagatattcagtagttt

SEQ ID NO: 60896 - DNA, 20 bp, Human papillomavirus type 134
aagatattcagtagtttagt

SEQ ID NO: 60897 - DNA, 20 bp, Human papillomavirus type 134
agtagtttagtatactttgg

SEQ ID NO: 60898 - DNA, 20 bp, Human papillomavirus type 134
gacataactacagaaccaga

SEQ ID NO: 60899 - DNA, 20 bp, Human papillomavirus type 134
acataactacagaaccagac

SEQ ID NO: 60900 - DNA, 20 bp, Human papillomavirus type 134
tagacactgcaggagtatta

SEQ ID NO: 60901 - DNA, 20 bp, Human papillomavirus type 134
ctaccactacttatttctat

SEQ ID NO: 60902 - DNA, 20 bp, Human papillomavirus type 134
tttctattatgtctggttct

SEQ ID NO: 60903 - DNA, 20 bp, Human papillomavirus type 134
gaacaggatttaaatcagat

SEQ ID NO: 60904 - DNA, 20 bp, Human papillomavirus type 134
aacaggatttaaatcagata

SEQ ID NO: 60905 - DNA, 20 bp, Human papillomavirus type 134
aaatcagatagcaactgctg

SEQ ID NO: 60906 - DNA, 20 bp, Human papillomavirus type 134
aatcagatagcaactgctgc

SEQ ID NO: 60907 - DNA, 20 bp, Human papillomavirus type 134
tgctgacataataaaactag

SEQ ID NO: 60908 - DNA, 20 bp, Human papillomavirus type 134
tggtgaaggactctttgtgt

SEQ ID NO: 60909 - DNA, 20 bp, Human papillomavirus type 134
gtgtctcaccctcagggacg

SEQ ID NO: 60910 - DNA, 20 bp, Human papillomavirus type 134
tgtctcaccctcagggacga

SEQ ID NO: 60911 - DNA, 20 bp, Human papillomavirus type 134
ccagcaataataacaccagg

SEQ ID NO: 60912 - DNA, 20 bp, Human papillomavirus type 134
atatgctaggtctgcctgca

SEQ ID NO: 60913 - DNA, 20 bp, Human papillomavirus type 134
tgtgcaagaaacagaaatat

SEQ ID NO: 60914 - DNA, 20 bp, Human papillomavirus type 134
cacggcagtagtgatcgcct

SEQ ID NO: 60915 - DNA, 20 bp, Human papillomavirus type 134
taacagttggacatccatat

SEQ ID NO: 60916 - DNA, 20 bp, Human papillomavirus type 134
gacatccatattttccaata

SEQ ID NO: 60917 - DNA, 20 bp, Human papillomavirus type 134
ttggaaaatatggatgtcca

SEQ ID NO: 60918 - DNA, 20 bp, Human papillomavirus type 134
aggaattggaacaacaggtc

SEQ ID NO: 60919 - DNA, 20 bp, Human papillomavirus type 134
ggaattggaacaacaggtca

SEQ ID NO: 60920 - DNA, 20 bp, Human papillomavirus type 134
gaacaacaggtcaccccttg

SEQ ID NO: 60921 - DNA, 20 bp, Human papillomavirus type 134
ctaaataagttaaacgatac

SEQ ID NO: 60922 - DNA, 20 bp, Human papillomavirus type 134
aacgatacagagaatccaaa

SEQ ID NO: 60923 - DNA, 20 bp, Human papillomavirus type 134
gttaattcttacattgagga

SEQ ID NO: 60924 - DNA, 20 bp, Human papillomavirus type 134
attcttacattgaggatgga

SEQ ID NO: 60925 - DNA, 20 bp, Human papillomavirus type 134
ttacattgaggatggagaca

SEQ ID NO: 60926 - DNA, 20 bp, Human papillomavirus type 134
cattgaggatggagacatgt

SEQ ID NO: 60927 - DNA, 20 bp, Human papillomavirus type 134
aggatggagacatgtgtgat

SEQ ID NO: 60928 - DNA, 20 bp, Human papillomavirus type 134
atatgtgttacctggtcaag

SEQ ID NO: 60929 - DNA, 20 bp, Human papillomavirus type 134
tatgtgttacctggtcaagg

SEQ ID NO: 60930 - DNA, 20 bp, Human papillomavirus type 134
cctggtcaaggtactcaggc

SEQ ID NO: 60931 - DNA, 20 bp, Human papillomavirus type 134
cttcatcagtttactttcct

SEQ ID NO: 60932 - DNA, 20 bp, Human papillomavirus type 134
ttcatcagtttactttccta

SEQ ID NO: 60933 - DNA, 20 bp, Human papillomavirus type 134
gctaagtataacttttggga

SEQ ID NO: 60934 - DNA, 20 bp, Human papillomavirus type 134
ctaagtataacttttgggat

SEQ ID NO: 60935 - DNA, 20 bp, Human papillomavirus type 134
tgggatgtggatctatcaga

SEQ ID NO: 60936 - DNA, 20 bp, Human papillomavirus type 134
gggatgtggatctatcagac

SEQ ID NO: 60937 - DNA, 20 bp, Human papillomavirus type 134
ggatgtggatctatcagaca

SEQ ID NO: 60938 - DNA, 20 bp, Human papillomavirus type 134
taaactgtgaataataaatg

SEQ ID NO: 60939 - DNA, 20 bp, Human papillomavirus type 134
aaactgtgaataataaatgg

SEQ ID NO: 60940 - DNA, 20 bp, Human papillomavirus type 134
aactgtgaataataaatggt

SEQ ID NO: 60941 - DNA, 20 bp, Human papillomavirus type 134
tgtgttactgactcacaggg

SEQ ID NO: 60942 - DNA, 20 bp, Human papillomavirus type 134
ctgactcacagggtctttgg

SEQ ID NO: 60943 - DNA, 20 bp, Human papillomavirus type 137
ttattactgtttacgtgttt

SEQ ID NO: 60944 - DNA, 20 bp, Human papillomavirus type 137
ttactgtttacgtgttttaa

SEQ ID NO: 60945 - DNA, 20 bp, Human papillomavirus type 137
ctgtttacgtgttttaacat

SEQ ID NO: 60946 - DNA, 20 bp, Human papillomavirus type 137
acgtgttttaacattggtgg

SEQ ID NO: 60947 - DNA, 20 bp, Human papillomavirus type 137
cgtgttttaacattggtgga

SEQ ID NO: 60948 - DNA, 20 bp, Human papillomavirus type 137
ggaggaattatttgacgaaa

SEQ ID NO: 60949 - DNA, 20 bp, Human papillomavirus type 137
gaggaattatttgacgaaag

SEQ ID NO: 60950 - DNA, 20 bp, Human papillomavirus type 137
tttgacgaaagtactgatgg

SEQ ID NO: 60951 - DNA, 20 bp, Human papillomavirus type 137
gacgaaagtactgatgggtc

SEQ ID NO: 60952 - DNA, 20 bp, Human papillomavirus type 137
acgaaagtactgatgggtcc

SEQ ID NO: 60953 - DNA, 20 bp, Human papillomavirus type 137
caggacagtggcatagcaga

SEQ ID NO: 60954 - DNA, 20 bp, Human papillomavirus type 137
aggacagtggcatagcagaa

SEQ ID NO: 60955 - DNA, 20 bp, Human papillomavirus type 137
ttctgaacaggtagaaacta

SEQ ID NO: 60956 - DNA, 20 bp, Human papillomavirus type 137
tgaacaggtagaaactatag

SEQ ID NO: 60957 - DNA, 20 bp, Human papillomavirus type 137
tgaaaatggcgcagatgatg

SEQ ID NO: 60958 - DNA, 20 bp, Human papillomavirus type 137
ccagattgggttactaaaca

SEQ ID NO: 60959 - DNA, 20 bp, Human papillomavirus type 137
ggttactaaacaaacaatgg

SEQ ID NO: 60960 - DNA, 20 bp, Human papillomavirus type 137
ctaaacaaacaatggtgaat

SEQ ID NO: 60961 - DNA, 20 bp, Human papillomavirus type 137
gatctatcacaaatggtaca

SEQ ID NO: 60962 - DNA, 20 bp, Human papillomavirus type 137
atctatcacaaatggtacaa

SEQ ID NO: 60963 - DNA, 20 bp, Human papillomavirus type 137
caactgctgcagaagttgga

SEQ ID NO: 60964 - DNA, 20 bp, Human papillomavirus type 137
gaagcaatcatagaacagtt

SEQ ID NO: 60965 - DNA, 20 bp, Human papillomavirus type 137
aaggaactgttctatgattg

SEQ ID NO: 60966 - DNA, 20 bp, Human papillomavirus type 137
tatgattgcttccaacttct

SEQ ID NO: 60967 - DNA, 20 bp, Human papillomavirus type 137
cttccaacttctgcagcagt

SEQ ID NO: 60968 - DNA, 20 bp, Human papillomavirus type 137
tagtagcatttgacagcgat

SEQ ID NO: 60969 - DNA, 20 bp, Human papillomavirus type 137
agtagcatttgacagcgata

SEQ ID NO: 60970 - DNA, 20 bp, Human papillomavirus type 137
gtagcatttgacagcgataa

SEQ ID NO: 60971 - DNA, 20 bp, Human papillomavirus type 137
gacagcgataaacaaagaga

SEQ ID NO: 60972 - DNA, 20 bp, Human papillomavirus type 137
acagcgataaacaaagagat

SEQ ID NO: 60973 - DNA, 20 bp, Human papillomavirus type 137
ttactaaaagtgtttggaag

SEQ ID NO: 60974 - DNA, 20 bp, Human papillomavirus type 137
tactaaaagtgtttggaagt

SEQ ID NO: 60975 - DNA, 20 bp, Human papillomavirus type 137
actaaaagtgtttggaagtg

SEQ ID NO: 60976 - DNA, 20 bp, Human papillomavirus type 137
ctaaaagtgtttggaagtgt

SEQ ID NO: 60977 - DNA, 20 bp, Human papillomavirus type 137
ggaagtgtggtctattttgg

SEQ ID NO: 60978 - DNA, 20 bp, Human papillomavirus type 137
ccctgggttagcagcagata

SEQ ID NO: 60979 - DNA, 20 bp, Human papillomavirus type 137
cctgggttagcagcagataa

SEQ ID NO: 60980 - DNA, 20 bp, Human papillomavirus type 137
gcagcagataatgaaaatat

SEQ ID NO: 60981 - DNA, 20 bp, Human papillomavirus type 137
gtgaacacccaaatattatt

SEQ ID NO: 60982 - DNA, 20 bp, Human papillomavirus type 137
gggtgttcaccaacccctgt

SEQ ID NO: 60983 - DNA, 20 bp, Human papillomavirus type 137
ccatgtagatgcaaatctga

SEQ ID NO: 60984 - DNA, 20 bp, Human papillomavirus type 137
gtagatgcacagtcttttgg

SEQ ID NO: 60985 - DNA, 20 bp, Human papillomavirus type 137
tagatgcacagtcttttggt

SEQ ID NO: 60986 - DNA, 20 bp, Human papillomavirus type 137
tggtactcatgtgggttata

SEQ ID NO: 60987 - DNA, 20 bp, Human papillomavirus type 137
ggtactcatgtgggttatac

SEQ ID NO: 60988 - DNA, 20 bp, Human papillomavirus type 137
gaatttgaaaatcccgcctt

SEQ ID NO: 60989 - DNA, 20 bp, Human papillomavirus type 137
aatttgaaaatcccgccttt

SEQ ID NO: 60990 - DNA, 20 bp, Human papillomavirus type 137
gaaaatcccgcctttgagga

SEQ ID NO: 60991 - DNA, 20 bp, Human papillomavirus type 137
aaaatcccgcctttgaggag

SEQ ID NO: 60992 - DNA, 20 bp, Human papillomavirus type 137
gaggaggacgtcactatgga

SEQ ID NO: 60993 - DNA, 20 bp, Human papillomavirus type 137
tggtgccagatacaccttat

SEQ ID NO: 60994 - DNA, 20 bp, Human papillomavirus type 137
tattcctgtgcaacctcctg

SEQ ID NO: 60995 - DNA, 20 bp, Human papillomavirus type 137
ctgtgcaacctcctgatgga

SEQ ID NO: 60996 - DNA, 20 bp, Human papillomavirus type 137
tggtagatgacaatgattat

SEQ ID NO: 60997 - DNA, 20 bp, Human papillomavirus type 137
tcatctaccagaactccatc

SEQ ID NO: 60998 - DNA, 20 bp, Human papillomavirus type 137
cattcgagtactgaccgcct

SEQ ID NO: 60999 - DNA, 20 bp, Human papillomavirus type 137
gagtactgaccgccttttaa

SEQ ID NO: 61000 - DNA, 20 bp, Human papillomavirus type 137
taacagttggacatcctttc

SEQ ID NO: 61001 - DNA, 20 bp, Human papillomavirus type 137
aacagttggacatcctttct

SEQ ID NO: 61002 - DNA, 20 bp, Human papillomavirus type 137
acagttggacatcctttctt

SEQ ID NO: 61003 - DNA, 20 bp, Human papillomavirus type 137
gtataggtagtactggtcat

SEQ ID NO: 61004 - DNA, 20 bp, Human papillomavirus type 137
aacaaattgcaggatacaga

SEQ ID NO: 61005 - DNA, 20 bp, Human papillomavirus type 137
acaaattgcaggatacagaa

SEQ ID NO: 61006 - DNA, 20 bp, Human papillomavirus type 137
caggatacagaaaatccttc

SEQ ID NO: 61007 - DNA, 20 bp, Human papillomavirus type 137
tgtatataatggattaatca

SEQ ID NO: 61008 - DNA, 20 bp, Human papillomavirus type 137
gctcttctatttactttaca

SEQ ID NO: 61009 - DNA, 20 bp, Human papillomavirus type 137
tatttactttacaattccga

SEQ ID NO: 61010 - DNA, 20 bp, Human papillomavirus type 137
actttacaattccgagtggt

SEQ ID NO: 61011 - DNA, 20 bp, Human papillomavirus type 137
ctttacaattccgagtggtt

SEQ ID NO: 61012 - DNA, 20 bp, Human papillomavirus type 137
acaattccgagtggttcgtt

SEQ ID NO: 61013 - DNA, 20 bp, Human papillomavirus type 137
agatgagtgtgcaataaatg

SEQ ID NO: 61014 - DNA, 20 bp, Human papillomavirus type 137
acttgactcatgtggtctgc

SEQ ID NO: 61015 - DNA, 20 bp, Human papillomavirus type 137
actcatgtggtctgcatttt

SEQ ID NO: 61016 - DNA, 20 bp, Human papillomavirus type 137
ttgttaccccacccgacaat

SEQ ID NO: 61017 - DNA, 20 bp, Human papillomavirus type 137
tgttaccccacccgacaatt

SEQ ID NO: 61018 - DNA, 20 bp, Influenza B virus
aactgtacaaacattaaccc

SEQ ID NO: 61019 - DNA, 20 bp, Influenza B virus
accctattactcacatcagg

SEQ ID NO: 61020 - DNA, 20 bp, Influenza B virus
ctcacatcagggggagtatt

SEQ ID NO: 61021 - DNA, 20 bp, Influenza B virus
ttatcactatatgtgtcagc

SEQ ID NO: 61022 - DNA, 20 bp, Influenza B virus
tcactatatgtgtcagcctc

SEQ ID NO: 61023 - DNA, 20 bp, Influenza B virus
gccctcataggttcggagag

SEQ ID NO: 61024 - DNA, 20 bp, Influenza B virus
ggagagatcaaaggaaactc

SEQ ID NO: 61025 - DNA, 20 bp, Influenza B virus
ataataagagaaccttttgt

SEQ ID NO: 61026 - DNA, 20 bp, Influenza B virus
tgttgcttgtggaccaaaag

SEQ ID NO: 61027 - DNA, 20 bp, Influenza B virus
gttgcttgtggaccaaaaga

SEQ ID NO: 61028 - DNA, 20 bp, Influenza B virus
tccacatggcagcttggagc

SEQ ID NO: 61029 - DNA, 20 bp, Influenza B virus
ccacatggcagcttggagcg

SEQ ID NO: 61030 - DNA, 20 bp, Influenza B virus
cacatggcagcttggagcgg

SEQ ID NO: 61031 - DNA, 20 bp, Influenza B virus
gagcggatccgcatgccatg

SEQ ID NO: 61032 - DNA, 20 bp, Influenza B virus
atggtcctgacaatgatgca

SEQ ID NO: 61033 - DNA, 20 bp, Influenza B virus
caacaggaagagtggagcac

SEQ ID NO: 61034 - DNA, 20 bp, Influenza B virus
gccagcaataaaaccataga

SEQ ID NO: 61035 - DNA, 20 bp, Influenza B virus
tatggttttattgctggcga

SEQ ID NO: 61036 - DNA, 20 bp, Influenza B virus
tattgctggcgaacccgcat

SEQ ID NO: 61037 - DNA, 20 bp, Influenza B virus
attgctggcgaacccgcatg

SEQ ID NO: 61038 - DNA, 20 bp, Influenza B virus
cgaatctaatggagacaagt

SEQ ID NO: 61039 - DNA, 20 bp, Influenza B virus
gaggcatcaaaggaggattc

SEQ ID NO: 61040 - DNA, 20 bp, Influenza B virus
gtccatcaaagaatggcatc

SEQ ID NO: 61041 - DNA, 20 bp, Influenza B virus
caatcttagatgccattctt

SEQ ID NO: 61042 - DNA, 20 bp, Influenza B virus
gatgccattctttgatggac

SEQ ID NO: 61043 - DNA, 20 bp, Influenza B virus
tattgggatagagatggtac

SEQ ID NO: 61044 - DNA, 20 bp, Influenza B virus
ggatagagatggtacacgat

SEQ ID NO: 61045 - DNA, 20 bp, Influenza B virus
gcattcagctgcaacagcca

SEQ ID NO: 61046 - DNA, 20 bp, Influenza B virus
agctgcaacagccatttact

SEQ ID NO: 61047 - DNA, 20 bp, Influenza B virus
actgtttgatgggctcagga

SEQ ID NO: 61048 - DNA, 20 bp, Human papillomavirus type 49
ggcagcaacaccagaacgat

SEQ ID NO: 61049 - DNA, 20 bp, Human papillomavirus type 49
gcagcaacaccagaacgata

SEQ ID NO: 61050 - DNA, 20 bp, Human papillomavirus type 49
caatcgggcgcggtcacatt

SEQ ID NO: 61051 - DNA, 20 bp, Human papillomavirus type 49
aatcgggcgcggtcacatta

SEQ ID NO: 61052 - DNA, 20 bp, Human papillomavirus type 49
tacttagtcatctcttgtgg

SEQ ID NO: 61053 - DNA, 20 bp, Human papillomavirus type 49
cagagttatagaatgattgg

SEQ ID NO: 61054 - DNA, 20 bp, Human papillomavirus type 49
tagaatgattgggaaagaag

SEQ ID NO: 61055 - DNA, 20 bp, Human papillomavirus type 49
ggaaagaagttacaatacca

SEQ ID NO: 61056 - DNA, 20 bp, Human papillomavirus type 49
caataccagatataatacta

SEQ ID NO: 61057 - DNA, 20 bp, Human papillomavirus type 49
ggccagcccattgacctgca

SEQ ID NO: 61058 - DNA, 20 bp, Human papillomavirus type 49
ccaagaactgcttctggagg

SEQ ID NO: 61059 - DNA, 20 bp, Human papillomavirus type 49
caagaactgcttctggagga

SEQ ID NO: 61060 - DNA, 20 bp, Human papillomavirus type 49
tggaggaactgcaattcttg

SEQ ID NO: 61061 - DNA, 20 bp, Human papillomavirus type 49
ttgtgtcctcagtgtcgtga

SEQ ID NO: 61062 - DNA, 20 bp, Human papillomavirus type 49
tgtcctcagtgtcgtgaaga

SEQ ID NO: 61063 - DNA, 20 bp, Human papillomavirus type 49
gcgagatctgcttcgccagc

SEQ ID NO: 61064 - DNA, 20 bp, Human papillomavirus type 49
gccagcaggaatttgaggag

SEQ ID NO: 61065 - DNA, 20 bp, Human papillomavirus type 49
gaggagagcgcggagcaagt

SEQ ID NO: 61066 - DNA, 20 bp, Human papillomavirus type 49
aggagagcgcggagcaagta

SEQ ID NO: 61067 - DNA, 20 bp, Human papillomavirus type 49
aaacgaaagtatttcagtcc

SEQ ID NO: 61068 - DNA, 20 bp, Human papillomavirus type 49
gacctttctgaaatgataca

SEQ ID NO: 61069 - DNA, 20 bp, Human papillomavirus type 49
acctttctgaaatgatacaa

SEQ ID NO: 61070 - DNA, 20 bp, Human papillomavirus type 49
ctgaaatgatacaatgggcc

SEQ ID NO: 61071 - DNA, 20 bp, Human papillomavirus type 49
tgaaatgatacaatgggcct

SEQ ID NO: 61072 - DNA, 20 bp, Human papillomavirus type 49
atctgtgagatcgctatcat

SEQ ID NO: 61073 - DNA, 20 bp, Human papillomavirus type 49
ctgaccaaagctggaaatct

SEQ ID NO: 61074 - DNA, 20 bp, Human papillomavirus type 49
ttttgaaaggctttggacac

SEQ ID NO: 61075 - DNA, 20 bp, Human papillomavirus type 49
tttgaaaggctttggacaca

SEQ ID NO: 61076 - DNA, 20 bp, Human papillomavirus type 49
ttgaaaggctttggacacaa

SEQ ID NO: 61077 - DNA, 20 bp, Human papillomavirus type 49
tgaaaggctttggacacaat

SEQ ID NO: 61078 - DNA, 20 bp, Human papillomavirus type 49
gcatgatgctaactttgcaa

SEQ ID NO: 61079 - DNA, 20 bp, Human papillomavirus type 49
gcaaagttagcatcatgcca

SEQ ID NO: 61080 - DNA, 20 bp, Human papillomavirus type 49
caaagttagcatcatgccaa

SEQ ID NO: 61081 - DNA, 20 bp, Human papillomavirus type 49
gcatcatgccaatagcttgt

SEQ ID NO: 61082 - DNA, 20 bp, Human papillomavirus type 49
tttggctttggtttcagata

SEQ ID NO: 61083 - DNA, 20 bp, Human papillomavirus type 49
tgcaggtgcatattataagg

SEQ ID NO: 61084 - DNA, 20 bp, Human papillomavirus type 49
taaggatggaactatcaaac

SEQ ID NO: 61085 - DNA, 20 bp, Human papillomavirus type 49
tgttaccttcgctgatgatg

SEQ ID NO: 61086 - DNA, 20 bp, Human papillomavirus type 49
ccttcgctgatgatgctgtt

SEQ ID NO: 61087 - DNA, 20 bp, Human papillomavirus type 49
gctgatgatgctgttagata

SEQ ID NO: 61088 - DNA, 20 bp, Human papillomavirus type 49
acgacaccgtcgacgagaca

SEQ ID NO: 61089 - DNA, 20 bp, Human papillomavirus type 49
ctgtggtgctggtgggtgtc

SEQ ID NO: 61090 - DNA, 20 bp, Human papillomavirus type 49
cagatccagatccagatcca

SEQ ID NO: 61091 - DNA, 20 bp, Human papillomavirus type 49
cagaggatccagagggtccg

SEQ ID NO: 61092 - DNA, 20 bp, Human papillomavirus type 49
cagccccaagagaacccgca

SEQ ID NO: 61093 - DNA, 20 bp, Human papillomavirus type 49
tcttggggctggaatctctg

SEQ ID NO: 61094 - DNA, 20 bp, Human papillomavirus type 49
gggctggaatctctggaggt

SEQ ID NO: 61095 - DNA, 20 bp, Human papillomavirus type 49
gacgacttggaaggttactg

SEQ ID NO: 61096 - DNA, 20 bp, Human papillomavirus type 49
gaaggttactggaggaggct

SEQ ID NO: 61097 - DNA, 20 bp, Human papillomavirus type 49
ctggaggaggctagcgatcc

SEQ ID NO: 61098 - DNA, 20 bp, Human papillomavirus type 49
tgcgaggagacccaaatatt

SEQ ID NO: 61099 - DNA, 20 bp, Human papillomavirus type 49
gcgaggagacccaaatattt

SEQ ID NO: 61100 - DNA, 20 bp, Human papillomavirus type 49
ttgttactagtggttctggt

SEQ ID NO: 61101 - DNA, 20 bp, Human papillomavirus type 49
ttactagtggttctggtggt

SEQ ID NO: 61102 - DNA, 20 bp, Human papillomavirus type 49
ctagtggttctggtggtcaa

SEQ ID NO: 61103 - DNA, 20 bp, Human papillomavirus type 49
tggtggtcaaccaataggtg

SEQ ID NO: 61104 - DNA, 20 bp, Human papillomavirus type 49
caccagttgaaatagaatta

SEQ ID NO: 61105 - DNA, 20 bp, Human papillomavirus type 49
gctttgcctttgataatcct

SEQ ID NO: 61106 - DNA, 20 bp, Human papillomavirus type 49
gcctttgataatcctgtgtt

SEQ ID NO: 61107 - DNA, 20 bp, Human papillomavirus type 49
cctttgataatcctgtgttt

SEQ ID NO: 61108 - DNA, 20 bp, Human papillomavirus type 49
gataatcctgtgtttgaaga

SEQ ID NO: 61109 - DNA, 20 bp, Human papillomavirus type 49
ataatcctgtgtttgaagaa

SEQ ID NO: 61110 - DNA, 20 bp, Human papillomavirus type 49
tcactattaggggaacattc

SEQ ID NO: 61111 - DNA, 20 bp, Human papillomavirus type 49
ggggaacattctggtgatgc

SEQ ID NO: 61112 - DNA, 20 bp, Human papillomavirus type 49
tggtgatgctactattgtcc

SEQ ID NO: 61113 - DNA, 20 bp, Human papillomavirus type 49
tccaaggcccagtagaaagc

SEQ ID NO: 61114 - DNA, 20 bp, Human papillomavirus type 49
ctactgggccttggacaata

SEQ ID NO: 61115 - DNA, 20 bp, Human papillomavirus type 49
tctactcccagatctgatac

SEQ ID NO: 61116 - DNA, 20 bp, Human papillomavirus type 49
tatgtacaagatttggaagg

SEQ ID NO: 61117 - DNA, 20 bp, Human papillomavirus type 49
atgtacaagatttggaaggt

SEQ ID NO: 61118 - DNA, 20 bp, Human papillomavirus type 49
tgtacaagatttggaaggtt

SEQ ID NO: 61119 - DNA, 20 bp, Human papillomavirus type 49
ggaaggttatgctgtgtcat

SEQ ID NO: 61120 - DNA, 20 bp, Human papillomavirus type 49
aacacctgtggcaagggtac

SEQ ID NO: 61121 - DNA, 20 bp, Human papillomavirus type 49
agaggacagacatctactat

SEQ ID NO: 61122 - DNA, 20 bp, Human papillomavirus type 49
acaatcgatcactattagca

SEQ ID NO: 61123 - DNA, 20 bp, Human papillomavirus type 49
gcatgatagtagatgtctgt

SEQ ID NO: 61124 - DNA, 20 bp, Human papillomavirus type 49
atccgtgctttgtacccttg

SEQ ID NO: 61125 - DNA, 20 bp, Human papillomavirus type 49
gaaattggtcgtggccagcc

SEQ ID NO: 61126 - DNA, 20 bp, Human papillomavirus type 49
gtcgtggccagcctttaggt

SEQ ID NO: 61127 - DNA, 20 bp, Human papillomavirus type 49
aggtgttggtacaacaggac

SEQ ID NO: 61128 - DNA, 20 bp, Human papillomavirus type 49
ggtgttggtacaacaggaca

SEQ ID NO: 61129 - DNA, 20 bp, Human papillomavirus type 49
gtacaacaggacatccattg

SEQ ID NO: 61130 - DNA, 20 bp, Human papillomavirus type 49
tttgttagaggtggtaatgt

SEQ ID NO: 61131 - DNA, 20 bp, Human papillomavirus type 49
gttagaggtggtaatgtagg

SEQ ID NO: 61132 - DNA, 20 bp, Human papillomavirus type 49
ttagaggtggtaatgtaggg

SEQ ID NO: 61133 - DNA, 20 bp, Human papillomavirus type 49
gaggtggtaatgtaggggat

SEQ ID NO: 61134 - DNA, 20 bp, Human papillomavirus type 49
catattacctgcagcaagtc

SEQ ID NO: 61135 - DNA, 20 bp, Human papillomavirus type 49
tggactgtagatttaacaga

SEQ ID NO: 61136 - DNA, 20 bp, Human papillomavirus type 49
ggactgtagatttaacagaa

SEQ ID NO: 61137 - DNA, 20 bp, Human papillomavirus type 49
gactgtagatttaacagaaa

SEQ ID NO: 61138 - DNA, 20 bp, Human papillomavirus type 49
aacagaaaaactgtctttgg

SEQ ID NO: 61139 - DNA, 20 bp, Human papillomavirus type 49
acagaaaaactgtctttgga

SEQ ID NO: 61140 - DNA, 20 bp, Influenza A virus
gaatggaccaagcaatagtg

SEQ ID NO: 61141 - DNA, 20 bp, Influenza A virus
aaagcaaatttcagtgtgat

SEQ ID NO: 61142 - DNA, 20 bp, Influenza A virus
cagtgtgattttcaatcggc

SEQ ID NO: 61143 - DNA, 20 bp, Influenza A virus
agtgtgattttcaatcggct

SEQ ID NO: 61144 - DNA, 20 bp, Influenza A virus
tcaatcggcttgaagccctg

SEQ ID NO: 61145 - DNA, 20 bp, Influenza C virus
cgcaagagaaatggggaaat

SEQ ID NO: 61146 - DNA, 20 bp, Influenza C virus
ttactgttggggcactaatg

SEQ ID NO: 61147 - DNA, 20 bp, Influenza C virus
ctgttggggcactaatgact

SEQ ID NO: 61148 - DNA, 20 bp, Influenza C virus
gggcactaatgactgaatgt

SEQ ID NO: 61149 - DNA, 20 bp, Influenza C virus
cctgggaaaataaaagtggt

SEQ ID NO: 61150 - DNA, 20 bp, Influenza C virus
ggaagaaaaatggagagtta

SEQ ID NO: 61151 - DNA, 20 bp, Influenza C virus
attgctcaacctttaagaga

SEQ ID NO: 61152 - DNA, 20 bp, Influenza C virus
ctcaacctttaagagaagct

SEQ ID NO: 61153 - DNA, 20 bp, Influenza C virus
aagagaagctttaagagtac

SEQ ID NO: 61154 - DNA, 20 bp, Influenza C virus
agagaagctttaagagtaca

SEQ ID NO: 61155 - DNA, 20 bp, Human papillomavirus type 126
ttttgcctgcacctttgctt

SEQ ID NO: 61156 - DNA, 20 bp, Human papillomavirus type 126
tgcctgcacctttgctttgt

SEQ ID NO: 61157 - DNA, 20 bp, Human papillomavirus type 126
gcctgcacctttgctttgtg

SEQ ID NO: 61158 - DNA, 20 bp, Human papillomavirus type 126
cctgcacctttgctttgtga

SEQ ID NO: 61159 - DNA, 20 bp, Human papillomavirus type 126
gctttgtgaggagtcatcat

SEQ ID NO: 61160 - DNA, 20 bp, Human papillomavirus type 126
ctgagttaaaacgaaagtac

SEQ ID NO: 61161 - DNA, 20 bp, Human papillomavirus type 126
aaacgaaagtacaaaaaaag

SEQ ID NO: 61162 - DNA, 20 bp, Human papillomavirus type 126
tacggaacctacagttgctg

SEQ ID NO: 61163 - DNA, 20 bp, Human papillomavirus type 126
ctgctcttagtcctcgtttg

SEQ ID NO: 61164 - DNA, 20 bp, Human papillomavirus type 126
gtcctcgtttggaagcaata

SEQ ID NO: 61165 - DNA, 20 bp, Human papillomavirus type 126
atattggaaagtttggctaa

SEQ ID NO: 61166 - DNA, 20 bp, Human papillomavirus type 126
gaaagtttggctaaatccaa

SEQ ID NO: 61167 - DNA, 20 bp, Human papillomavirus type 126
ggctaaatccaagtatgcat

SEQ ID NO: 61168 - DNA, 20 bp, Human papillomavirus type 126
gctaaatccaagtatgcatc

SEQ ID NO: 61169 - DNA, 20 bp, Human papillomavirus type 126
gccgattgcagcgcagatcg

SEQ ID NO: 61170 - DNA, 20 bp, Human papillomavirus type 126
tatattatttgaaaaagatg

SEQ ID NO: 61171 - DNA, 20 bp, Human papillomavirus type 126
atattatttgaaaaagatgc

SEQ ID NO: 61172 - DNA, 20 bp, Human papillomavirus type 126
tattatttgaaaaagatgct

SEQ ID NO: 61173 - DNA, 20 bp, Human papillomavirus type 126
tttgaaaaagatgcttttag

SEQ ID NO: 61174 - DNA, 20 bp, Human papillomavirus type 126
gaaaaagatgcttttagata

SEQ ID NO: 61175 - DNA, 20 bp, Human papillomavirus type 126
cttgacactagcgtcactca

SEQ ID NO: 61176 - DNA, 20 bp, Human papillomavirus type 126
acactagcgtcactcacacc

SEQ ID NO: 61177 - DNA, 20 bp, Human papillomavirus type 126
gtctagggcatcacacacag

SEQ ID NO: 61178 - DNA, 20 bp, Human papillomavirus type 126
tctagggcatcacacacaga

SEQ ID NO: 61179 - DNA, 20 bp, Human papillomavirus type 126
ttggtctatctctccgccct

SEQ ID NO: 61180 - DNA, 20 bp, Human papillomavirus type 126
gtctatctctccgcccttca

SEQ ID NO: 61181 - DNA, 20 bp, Human papillomavirus type 126
agtgtcccagtttgaaaatc

SEQ ID NO: 61182 - DNA, 20 bp, Human papillomavirus type 126
gaaaatcccgcctttgatgc

SEQ ID NO: 61183 - DNA, 20 bp, Human papillomavirus type 126
aaaatcccgcctttgatgct

SEQ ID NO: 61184 - DNA, 20 bp, Human papillomavirus type 126
accatctggcataacattta

SEQ ID NO: 61185 - DNA, 20 bp, Human papillomavirus type 126
ccatctggcataacatttaa

SEQ ID NO: 61186 - DNA, 20 bp, Human papillomavirus type 126
aatgttatttctaacactga

SEQ ID NO: 61187 - DNA, 20 bp, Human papillomavirus type 126
atgttatttctaacactgac

SEQ ID NO: 61188 - DNA, 20 bp, Human papillomavirus type 126
tttctaacactgacaaagta

SEQ ID NO: 61189 - DNA, 20 bp, Human papillomavirus type 126
tacattcgcctatacaagat

SEQ ID NO: 61190 - DNA, 20 bp, Human papillomavirus type 126
gcctatacaagatggcgata

SEQ ID NO: 61191 - DNA, 20 bp, Human papillomavirus type 126
tataggcgaatgtataagtt

SEQ ID NO: 61192 - DNA, 20 bp, Human papillomavirus type 126
gataggagggcacgtaccct

SEQ ID NO: 61193 - DNA, 20 bp, Human papillomavirus type 126
ataggagggcacgtaccctt

SEQ ID NO: 61194 - DNA, 20 bp, Human papillomavirus type 126
tgtaaagatggagctgttgg

SEQ ID NO: 61195 - DNA, 20 bp, Human papillomavirus type 126
gtaaagatggagctgttggc

SEQ ID NO: 61196 - DNA, 20 bp, Human papillomavirus type 126
taaagatggagctgttggcg

SEQ ID NO: 61197 - DNA, 20 bp, Human papillomavirus type 126
gcgacagtatccctgaggat

SEQ ID NO: 61198 - DNA, 20 bp, Human papillomavirus type 126
atagtacatccagacacagg

SEQ ID NO: 61199 - DNA, 20 bp, Human papillomavirus type 126
ataaaatcactagctactat

SEQ ID NO: 61200 - DNA, 20 bp, Human papillomavirus type 126
taaaatcactagctactatc

SEQ ID NO: 61201 - DNA, 20 bp, Human papillomavirus type 126
aaatgggtctgcaggtggct

SEQ ID NO: 61202 - DNA, 20 bp, Human papillomavirus type 126
aatgggtctgcaggtggctt

SEQ ID NO: 61203 - DNA, 20 bp, Human papillomavirus type 126
tgttgagcgtctttaggaca

SEQ ID NO: 61204 - DNA, 20 bp, Human papillomavirus type 128
agtgtagacacatgctgtga

SEQ ID NO: 61205 - DNA, 20 bp, Human papillomavirus type 128
taaccgtcgagttagattag

SEQ ID NO: 61206 - DNA, 20 bp, Human papillomavirus type 128
gattagtagtatctgcaact

SEQ ID NO: 61207 - DNA, 20 bp, Human papillomavirus type 128
gtagtatctgcaactagcac

SEQ ID NO: 61208 - DNA, 20 bp, Human papillomavirus type 128
ttagatttcagcaactattg

SEQ ID NO: 61209 - DNA, 20 bp, Human papillomavirus type 128
cctggcactcttcaatgccc

SEQ ID NO: 61210 - DNA, 20 bp, Human papillomavirus type 128
aatgcccaagttacagagga

SEQ ID NO: 61211 - DNA, 20 bp, Human papillomavirus type 128
cagaggattcagatcgtgca

SEQ ID NO: 61212 - DNA, 20 bp, Human papillomavirus type 128
agatcgtgcagttttatttc

SEQ ID NO: 61213 - DNA, 20 bp, Human papillomavirus type 128
agaaataaaactgcacgatc

SEQ ID NO: 61214 - DNA, 20 bp, Human papillomavirus type 128
taatgaactatcacaggtag

SEQ ID NO: 61215 - DNA, 20 bp, Human papillomavirus type 128
aaaatggcgccgctattaat

SEQ ID NO: 61216 - DNA, 20 bp, Human papillomavirus type 128
atgacatacttaattgtaat

SEQ ID NO: 61217 - DNA, 20 bp, Human papillomavirus type 128
tgttattacaattaagtatg

SEQ ID NO: 61218 - DNA, 20 bp, Human papillomavirus type 128
gttattacaattaagtatgt

SEQ ID NO: 61219 - DNA, 20 bp, Human papillomavirus type 128
gattttaaaacattgtattg

SEQ ID NO: 61220 - DNA, 20 bp, Human papillomavirus type 128
taaaacattgtattgttaat

SEQ ID NO: 61221 - DNA, 20 bp, Human papillomavirus type 128
aaaacattgtattgttaatc

SEQ ID NO: 61222 - DNA, 20 bp, Human papillomavirus type 128
aaacattgtattgttaatca

SEQ ID NO: 61223 - DNA, 20 bp, Human papillomavirus type 128
tattgttaatcatcaaatgg

SEQ ID NO: 61224 - DNA, 20 bp, Human papillomavirus type 128
tctccagtctctgctgaaga

SEQ ID NO: 61225 - DNA, 20 bp, Human papillomavirus type 128
cgcgacatggtttatcgcga

SEQ ID NO: 61226 - DNA, 20 bp, Human papillomavirus type 128
atcgcgacttggaaggcttg

SEQ ID NO: 61227 - DNA, 20 bp, Human papillomavirus type 128
tcgcgacttggaaggcttga

SEQ ID NO: 61228 - DNA, 20 bp, Human papillomavirus type 128
gaaggcttgaagcagaagct

SEQ ID NO: 61229 - DNA, 20 bp, Human papillomavirus type 128
ggtctggtaaaggtactggt

SEQ ID NO: 61230 - DNA, 20 bp, Human papillomavirus type 128
ggtggtggaggaacagtttc

SEQ ID NO: 61231 - DNA, 20 bp, Human papillomavirus type 128
gtggtggaggaacagtttct

SEQ ID NO: 61232 - DNA, 20 bp, Human papillomavirus type 128
ctaggccaagtatacgtatt

SEQ ID NO: 61233 - DNA, 20 bp, Human papillomavirus type 128
taggccaagtatacgtattc

SEQ ID NO: 61234 - DNA, 20 bp, Human papillomavirus type 128
ttagctctggtactgggcct

SEQ ID NO: 61235 - DNA, 20 bp, Human papillomavirus type 128
gctctggtactgggcctaca

SEQ ID NO: 61236 - DNA, 20 bp, Human papillomavirus type 128
gatgttactacacagataga

SEQ ID NO: 61237 - DNA, 20 bp, Human papillomavirus type 128
ctacacagatagatttaaac

SEQ ID NO: 61238 - DNA, 20 bp, Human papillomavirus type 128
aaacacatttaataatataa

SEQ ID NO: 61239 - DNA, 20 bp, Human papillomavirus type 128
cagaggtgaccgccactcca

SEQ ID NO: 61240 - DNA, 20 bp, Human papillomavirus type 128
tagagatatcaattacctga

SEQ ID NO: 61241 - DNA, 20 bp, Human papillomavirus type 128
agagatatcaattacctgag

SEQ ID NO: 61242 - DNA, 20 bp, Human papillomavirus type 128
gagatatcaattacctgagt

SEQ ID NO: 61243 - DNA, 20 bp, Human papillomavirus type 128
cctgagtaggcctttttaca

SEQ ID NO: 61244 - DNA, 20 bp, Human papillomavirus type 128
aggtattggagctgttgggc

SEQ ID NO: 61245 - DNA, 20 bp, Human papillomavirus type 128
ggtattggagctgttgggca

SEQ ID NO: 61246 - DNA, 20 bp, Human papillomavirus type 128
gagctgttgggcatccgtta

SEQ ID NO: 61247 - DNA, 20 bp, Human papillomavirus type 128
ggcatccgttaatgaataaa

SEQ ID NO: 61248 - DNA, 20 bp, Human papillomavirus type 128
atgaataaatatggagattc

SEQ ID NO: 61249 - DNA, 20 bp, Human papillomavirus type 128
tggtgctgttaattttaaaa

SEQ ID NO: 61250 - DNA, 20 bp, Human papillomavirus type 128
ggtgctgttaattttaaaac

SEQ ID NO: 61251 - DNA, 20 bp, Human papillomavirus type 128
gtgctgttaattttaaaaca

SEQ ID NO: 61252 - DNA, 20 bp, Human papillomavirus type 128
attttaaaacattttctcaa

SEQ ID NO: 61253 - DNA, 20 bp, Human papillomavirus type 128
taaaacattttctcaagaca

SEQ ID NO: 61254 - DNA, 20 bp, Human papillomavirus type 128
gaagtcgaattagtctttcg

SEQ ID NO: 61255 - DNA, 20 bp, Human papillomavirus type 128
aagtcgaattagtctttcgt

SEQ ID NO: 61256 - DNA, 20 bp, Human papillomavirus type 128
gtctttcgtctttgtaaagt

SEQ ID NO: 61257 - DNA, 20 bp, Human papillomavirus type 128
cgtctttgtaaagtaccatt

SEQ ID NO: 61258 - DNA, 20 bp, Human papillomavirus type 128
gtctttgtaaagtaccatta

SEQ ID NO: 61259 - DNA, 20 bp, Human papillomavirus type 128
ccaggtgctatgccaaacca

SEQ ID NO: 61260 - DNA, 20 bp, Human papillomavirus type 128
caggtgctatgccaaaccat

SEQ ID NO: 61261 - DNA, 20 bp, Human papillomavirus type 128
aaataaaatgcagtgtttgc

SEQ ID NO: 61262 - DNA, 20 bp, Human papillomavirus type 128
gcaaaatactgactcatgtg

SEQ ID NO: 61263 - DNA, 20 bp, Human papillomavirus type 128
caaaatactgactcatgtgg

SEQ ID NO: 61264 - DNA, 20 bp, Human papillomavirus type 128
tcggtcgaggcaaggtgagt

SEQ ID NO: 61265 - DNA, 20 bp, Human papillomavirus type 128
cggtcgaggcaaggtgagta

SEQ ID NO: 61266 - DNA, 20 bp, Human papillomavirus type 128
ggtcgaggcaaggtgagtac

SEQ ID NO: 61267 - DNA, 20 bp, Human papillomavirus type 128
aaacaaactttgactgactc

SEQ ID NO: 61268 - DNA, 20 bp, Human papillomavirus type 128
gactgactcaaaatttggcg

SEQ ID NO: 61269 - DNA, 20 bp, Human papillomavirus type 144
tatatgtctggatttgttgg

SEQ ID NO: 61270 - DNA, 20 bp, Human papillomavirus type 144
gttggatgcagcagaaaagc

SEQ ID NO: 61271 - DNA, 20 bp, Human papillomavirus type 144
ttggatgcagcagaaaagca

SEQ ID NO: 61272 - DNA, 20 bp, Human papillomavirus type 144
gatgcagcagaaaagcaaga

SEQ ID NO: 61273 - DNA, 20 bp, Human papillomavirus type 144
ctagaggcaaaaggtttata

SEQ ID NO: 61274 - DNA, 20 bp, Human papillomavirus type 144
tacactccaccgactctgga

SEQ ID NO: 61275 - DNA, 20 bp, Human papillomavirus type 144
ttcgatttattgctcgaaga

SEQ ID NO: 61276 - DNA, 20 bp, Human papillomavirus type 144
gatttattgctcgaagaatt

SEQ ID NO: 61277 - DNA, 20 bp, Human papillomavirus type 144
attgctcgaagaattatcat

SEQ ID NO: 61278 - DNA, 20 bp, Human papillomavirus type 144
ttgctcgaagaattatcatt

SEQ ID NO: 61279 - DNA, 20 bp, Human papillomavirus type 144
ggagacagtggcatagagga

SEQ ID NO: 61280 - DNA, 20 bp, Human papillomavirus type 144
gagacagtggcatagaggaa

SEQ ID NO: 61281 - DNA, 20 bp, Human papillomavirus type 144
ttacacaggtagacactaac

SEQ ID NO: 61282 - DNA, 20 bp, Human papillomavirus type 144
cacaggtagacactaactca

SEQ ID NO: 61283 - DNA, 20 bp, Human papillomavirus type 144
acccagctcactactatttg

SEQ ID NO: 61284 - DNA, 20 bp, Human papillomavirus type 144
ctgaatggttagcaaagcaa

SEQ ID NO: 61285 - DNA, 20 bp, Human papillomavirus type 144
gcaaagcaagtattggtaga

SEQ ID NO: 61286 - DNA, 20 bp, Human papillomavirus type 144
gtagaacatcaatcagctgc

SEQ ID NO: 61287 - DNA, 20 bp, Human papillomavirus type 144
gaattagctacaatggtaca

SEQ ID NO: 61288 - DNA, 20 bp, Human papillomavirus type 144
aattagctacaatggtacag

SEQ ID NO: 61289 - DNA, 20 bp, Human papillomavirus type 144
catccggaggacttcaaacc

SEQ ID NO: 61290 - DNA, 20 bp, Human papillomavirus type 144
gaagtcctccggatggaact

SEQ ID NO: 61291 - DNA, 20 bp, Human papillomavirus type 144
aagtcctccggatggaactt

SEQ ID NO: 61292 - DNA, 20 bp, Human papillomavirus type 144
ctgctgggcctcggtgtcgg

SEQ ID NO: 61293 - DNA, 20 bp, Human papillomavirus type 144
tgctgggcctcggtgtcggt

SEQ ID NO: 61294 - DNA, 20 bp, Human papillomavirus type 144
gacgactacaagaagaagct

SEQ ID NO: 61295 - DNA, 20 bp, Human papillomavirus type 144
ctccagcatttaaggggatt

SEQ ID NO: 61296 - DNA, 20 bp, Human papillomavirus type 144
tccagcatttaaggggattt

SEQ ID NO: 61297 - DNA, 20 bp, Human papillomavirus type 144
aaggggatttgcaggacctt

SEQ ID NO: 61298 - DNA, 20 bp, Human papillomavirus type 144
aggggatttgcaggaccttt

SEQ ID NO: 61299 - DNA, 20 bp, Human papillomavirus type 144
ggtatagaccattgacacca

SEQ ID NO: 61300 - DNA, 20 bp, Human papillomavirus type 144
acaccatctacaccacgcgt

SEQ ID NO: 61301 - DNA, 20 bp, Human papillomavirus type 144
cctgaagggacaatagtaag

SEQ ID NO: 61302 - DNA, 20 bp, Human papillomavirus type 144
ctattgtcccttcaggtaat

SEQ ID NO: 61303 - DNA, 20 bp, Human papillomavirus type 144
tcccttcaggtaatacgcgt

SEQ ID NO: 61304 - DNA, 20 bp, Human papillomavirus type 144
gcttaccagaaagtacacct

SEQ ID NO: 61305 - DNA, 20 bp, Human papillomavirus type 144
ccagaaagtacacctactgt

SEQ ID NO: 61306 - DNA, 20 bp, Human papillomavirus type 144
gatatatctcctgcacaacc

SEQ ID NO: 61307 - DNA, 20 bp, Human papillomavirus type 144
aacacgaccctccaccacta

SEQ ID NO: 61308 - DNA, 20 bp, Human papillomavirus type 144
acacgaccctccaccactat

SEQ ID NO: 61309 - DNA, 20 bp, Human papillomavirus type 144
gaggatataagctctattaa

SEQ ID NO: 61310 - DNA, 20 bp, Human papillomavirus type 144
acccaccaaaaacaagcact

SEQ ID NO: 61311 - DNA, 20 bp, Human papillomavirus type 144
cacccgtcgaccgtaaaagt

SEQ ID NO: 61312 - DNA, 20 bp, Human papillomavirus type 144
cttgctctttgtgttagccg

SEQ ID NO: 61313 - DNA, 20 bp, Human papillomavirus type 144
ctctttgtgttagccgtggc

SEQ ID NO: 61314 - DNA, 20 bp, Human papillomavirus type 144
tgatcccaaacaaacacagc

SEQ ID NO: 61315 - DNA, 20 bp, Human papillomavirus type 144
gatcccaaacaaacacagct

SEQ ID NO: 61316 - DNA, 20 bp, Human papillomavirus type 144
atcccaaacaaacacagcta

SEQ ID NO: 61317 - DNA, 20 bp, Human papillomavirus type 144
atagtaggttgtacaccttc

SEQ ID NO: 61318 - DNA, 20 bp, Human papillomavirus type 144
tagtaggttgtacaccttca

SEQ ID NO: 61319 - DNA, 20 bp, Human papillomavirus type 144
ttcacagtacttgcaaatgg

SEQ ID NO: 61320 - DNA, 20 bp, Human papillomavirus type 144
acagtacttgcaaatggcct

SEQ ID NO: 61321 - DNA, 20 bp, Human papillomavirus type 144
caaatggcctgatttcttaa

SEQ ID NO: 61322 - DNA, 20 bp, Human papillomavirus type 144
cttaaaaatgactaaagata

SEQ ID NO: 61323 - DNA, 20 bp, Human papillomavirus type 144
ttaaaaatgactaaagatat

SEQ ID NO: 61324 - DNA, 20 bp, Human papillomavirus type 144
gaaaattgatatgactgagc

SEQ ID NO: 61325 - DNA, 20 bp, Human papillomavirus type 144
atatgactgagcgtttttct

SEQ ID NO: 61326 - DNA, 20 bp, Human papillomavirus type 144
ttctactgaattatcacagt

SEQ ID NO: 61327 - DNA, 20 bp, Human papillomavirus type 144
tctactgaattatcacagtt

SEQ ID NO: 61328 - DNA, 20 bp, Human papillomavirus type 144
ctactgaattatcacagttt

SEQ ID NO: 61329 - DNA, 20 bp, Human papillomavirus type 144
gtcaatatttaaaataccgc

SEQ ID NO: 61330 - DNA, 20 bp, Human papillomavirus type 144
aaaataccgcacccctgttt

SEQ ID NO: 61331 - DNA, 20 bp, Human papillomavirus type 144
aaataccgcacccctgttta

SEQ ID NO: 61332 - DNA, 20 bp, Human papillomavirus type 144
acctatgaacatccggacct

SEQ ID NO: 61333 - DNA, 20 bp, Human papillomavirus type 144
cctatgaacatccggacctc

SEQ ID NO: 61334 - DNA, 20 bp, Human papillomavirus type 144
tcggtacacggactgtgcca

SEQ ID NO: 61335 - DNA, 20 bp, Human papillomavirus type 144
taacaagaggtgactgactc

SEQ ID NO: 61336 - DNA, 20 bp, Human papillomavirus type 144
aacaagaggtgactgactca

SEQ ID NO: 61337 - DNA, 20 bp, Human papillomavirus type 144
acaagaggtgactgactcaa

SEQ ID NO: 61338 - DNA, 20 bp, Human papillomavirus type 144
ttggacagattgtgtatctg

SEQ ID NO: 61339 - DNA, 20 bp, Influenza A virus
tgaacagatggaaactgatg

SEQ ID NO: 61340 - DNA, 20 bp, Influenza A virus
gggcatccgtcgggaagatg

SEQ ID NO: 61341 - DNA, 20 bp, Influenza A virus
ccgacggatgccctaatctc

SEQ ID NO: 61342 - DNA, 20 bp, Influenza A virus
cattctggcgatccccatca

SEQ ID NO: 61343 - DNA, 20 bp, Influenza A virus
tggcgatccccatcagtttc

SEQ ID NO: 61344 - DNA, 20 bp, Influenza A virus
ttggcaagatctgcattgat

SEQ ID NO: 61345 - DNA, 20 bp, Influenza A virus
tggcaagatctgcattgata

SEQ ID NO: 61346 - DNA, 20 bp, Influenza A virus
ggcaagatctgcattgatat

SEQ ID NO: 61347 - DNA, 20 bp, Influenza A virus
gcaagatctgcattgatatt

SEQ ID NO: 61348 - DNA, 20 bp, Influenza A virus
atattgagagggtcagttgc

SEQ ID NO: 61349 - DNA, 20 bp, Influenza A virus
tgctgcatttgaagatttaa

SEQ ID NO: 61350 - DNA, 20 bp, Influenza A virus
gaagatttaagattgttaag

SEQ ID NO: 61351 - DNA, 20 bp, Influenza A virus
aagatttaagattgttaagc

SEQ ID NO: 61352 - DNA, 20 bp, Influenza A virus
aagattgttaagcttcatca

SEQ ID NO: 61353 - DNA, 20 bp, Influenza A virus
agattgttaagcttcatcag

SEQ ID NO: 61354 - DNA, 20 bp, Influenza A virus
gaaaagtcaaccatcatggc

SEQ ID NO: 61355 - DNA, 20 bp, Influenza A virus
aaaagtcaaccatcatggca

SEQ ID NO: 61356 - DNA, 20 bp, Influenza A virus
actggaaatacggagggaag

SEQ ID NO: 61357 - DNA, 20 bp, Influenza A virus
agacatgagggcagaaatca

SEQ ID NO: 61358 - DNA, 20 bp, Influenza A virus
ttatgatttctgccctcatg

SEQ ID NO: 61359 - DNA, 20 bp, Human papillomavirus type 30
caaatttgaaaatacaggcg

SEQ ID NO: 61360 - DNA, 20 bp, Human papillomavirus type 30
aaatttgaaaatacaggcga

SEQ ID NO: 61361 - DNA, 20 bp, Human papillomavirus type 30
gaaaatacaggcgagcgccc

SEQ ID NO: 61362 - DNA, 20 bp, Human papillomavirus type 30
aaaatacaggcgagcgccca

SEQ ID NO: 61363 - DNA, 20 bp, Human papillomavirus type 30
tcaaatttgaaagccatggg

SEQ ID NO: 61364 - DNA, 20 bp, Human papillomavirus type 30
tggaccttgtaccgcaaact

SEQ ID NO: 61365 - DNA, 20 bp, Human papillomavirus type 30
ggaccttgtaccgcaaactg

SEQ ID NO: 61366 - DNA, 20 bp, Human papillomavirus type 30
gaccttgtaccgcaaactga

SEQ ID NO: 61367 - DNA, 20 bp, Human papillomavirus type 30
taccgcaaactgaaattgac

SEQ ID NO: 61368 - DNA, 20 bp, Human papillomavirus type 30
acctgcattgctatgagcaa

SEQ ID NO: 61369 - DNA, 20 bp, Human papillomavirus type 30
ttgcatgcccaaaacacata

SEQ ID NO: 61370 - DNA, 20 bp, Human papillomavirus type 30
catgcccaaaacacatatgc

SEQ ID NO: 61371 - DNA, 20 bp, Human papillomavirus type 30
aaaacgaaagtatttaggca

SEQ ID NO: 61372 - DNA, 20 bp, Human papillomavirus type 30
aaacgaaagtatttaggcag

SEQ ID NO: 61373 - DNA, 20 bp, Human papillomavirus type 30
aggcagtccgttgggagaca

SEQ ID NO: 61374 - DNA, 20 bp, Human papillomavirus type 30
ctagattttaataattcttg

SEQ ID NO: 61375 - DNA, 20 bp, Human papillomavirus type 30
taataattcttgtatttgct

SEQ ID NO: 61376 - DNA, 20 bp, Human papillomavirus type 30
aataattcttgtatttgctg

SEQ ID NO: 61377 - DNA, 20 bp, Human papillomavirus type 30
ataattcttgtatttgctgt

SEQ ID NO: 61378 - DNA, 20 bp, Human papillomavirus type 30
ttgtatttgctgtggtggcg

SEQ ID NO: 61379 - DNA, 20 bp, Human papillomavirus type 30
gaactgtcgaaaatggtgca

SEQ ID NO: 61380 - DNA, 20 bp, Human papillomavirus type 30
aactgtcgaaaatggtgcaa

SEQ ID NO: 61381 - DNA, 20 bp, Human papillomavirus type 30
gataatgacgtaacagatga

SEQ ID NO: 61382 - DNA, 20 bp, Human papillomavirus type 30
ataatgacgtaacagatgac

SEQ ID NO: 61383 - DNA, 20 bp, Human papillomavirus type 30
cattttactatgcacagtta

SEQ ID NO: 61384 - DNA, 20 bp, Human papillomavirus type 30
tacagtttttaagatatcaa

SEQ ID NO: 61385 - DNA, 20 bp, Human papillomavirus type 30
ttaagatatcaaggggtcga

SEQ ID NO: 61386 - DNA, 20 bp, Human papillomavirus type 30
taagatatcaaggggtcgac

SEQ ID NO: 61387 - DNA, 20 bp, Human papillomavirus type 30
aagatatcaaggggtcgact

SEQ ID NO: 61388 - DNA, 20 bp, Human papillomavirus type 30
agatatcaaggggtcgactt

SEQ ID NO: 61389 - DNA, 20 bp, Human papillomavirus type 30
attgtcccgactctgtgtct

SEQ ID NO: 61390 - DNA, 20 bp, Human papillomavirus type 30
ttgtcccgactctgtgtcta

SEQ ID NO: 61391 - DNA, 20 bp, Human papillomavirus type 30
tcccgactctgtgtctagta

SEQ ID NO: 61392 - DNA, 20 bp, Human papillomavirus type 30
gatctgagggtactagacac

SEQ ID NO: 61393 - DNA, 20 bp, Human papillomavirus type 30
catttcccatatgcacttcc

SEQ ID NO: 61394 - DNA, 20 bp, Human papillomavirus type 30
tatattgcaaccattgtttt

SEQ ID NO: 61395 - DNA, 20 bp, Human papillomavirus type 30
caaccattgttttatttgtt

SEQ ID NO: 61396 - DNA, 20 bp, Human papillomavirus type 30
ttttatttgttagttttgtg

SEQ ID NO: 61397 - DNA, 20 bp, Human papillomavirus type 30
tatttgttagttttgtgttt

SEQ ID NO: 61398 - DNA, 20 bp, Human papillomavirus type 30
atttgttagttttgtgtttt

SEQ ID NO: 61399 - DNA, 20 bp, Human papillomavirus type 30
ttttgtaacatattacactt

SEQ ID NO: 61400 - DNA, 20 bp, Human papillomavirus type 30
tgtaacatattacacttttg

SEQ ID NO: 61401 - DNA, 20 bp, Human papillomavirus type 30
gtaacatattacacttttgc

SEQ ID NO: 61402 - DNA, 20 bp, Human papillomavirus type 30
taacatattacacttttgct

SEQ ID NO: 61403 - DNA, 20 bp, Human papillomavirus type 30
cacttttgctttgtgtaggg

SEQ ID NO: 61404 - DNA, 20 bp, Human papillomavirus type 30
taccaatccctcctttgttg

SEQ ID NO: 61405 - DNA, 20 bp, Human papillomavirus type 30
accaatccctcctttgttga

SEQ ID NO: 61406 - DNA, 20 bp, Human papillomavirus type 30
ccaatccctcctttgttgaa

SEQ ID NO: 61407 - DNA, 20 bp, Human papillomavirus type 30
gttgaacccccagttattga

SEQ ID NO: 61408 - DNA, 20 bp, Human papillomavirus type 30
ttgaacccccagttattgag

SEQ ID NO: 61409 - DNA, 20 bp, Human papillomavirus type 30
aaccttttcaccatcgggtg

SEQ ID NO: 61410 - DNA, 20 bp, Human papillomavirus type 30
accttttcaccatcgggtgt

SEQ ID NO: 61411 - DNA, 20 bp, Human papillomavirus type 30
tcaccatcgggtgtggcacc

SEQ ID NO: 61412 - DNA, 20 bp, Human papillomavirus type 30
caccatcgggtgtggcacct

SEQ ID NO: 61413 - DNA, 20 bp, Human papillomavirus type 30
accatcgggtgtggcacctg

SEQ ID NO: 61414 - DNA, 20 bp, Human papillomavirus type 30
gctttatggcctgtatactt

SEQ ID NO: 61415 - DNA, 20 bp, Human papillomavirus type 30
ctttatggcctgtatacttt

SEQ ID NO: 61416 - DNA, 20 bp, Human papillomavirus type 30
atggcctgtatactttttaa

SEQ ID NO: 61417 - DNA, 20 bp, Human papillomavirus type 30
tggcctgtatactttttaag

SEQ ID NO: 61418 - DNA, 20 bp, Human papillomavirus type 30
ttaaggcgtaggcgtcgtaa

SEQ ID NO: 61419 - DNA, 20 bp, Human papillomavirus type 30
gacatccatattattctatt

SEQ ID NO: 61420 - DNA, 20 bp, Human papillomavirus type 30
ttctatttctaaggctggta

SEQ ID NO: 61421 - DNA, 20 bp, Human papillomavirus type 30
tatttctaaggctggtaatt

SEQ ID NO: 61422 - DNA, 20 bp, Human papillomavirus type 30
ctaaggctggtaattccaaa

SEQ ID NO: 61423 - DNA, 20 bp, Human papillomavirus type 30
taaggctggtaattccaaaa

SEQ ID NO: 61424 - DNA, 20 bp, Human papillomavirus type 30
gttggggcaaccaggtattt

SEQ ID NO: 61425 - DNA, 20 bp, Human papillomavirus type 30
ttggggcaaccaggtatttg

SEQ ID NO: 61426 - DNA, 20 bp, Human papillomavirus type 30
gggcaaccaggtatttgtta

SEQ ID NO: 61427 - DNA, 20 bp, Human papillomavirus type 30
gttactgttgtggacaccac

SEQ ID NO: 61428 - DNA, 20 bp, Human papillomavirus type 30
ttactgttgtggacaccact

SEQ ID NO: 61429 - DNA, 20 bp, Human papillomavirus type 30
agggctggaatattggattg

SEQ ID NO: 61430 - DNA, 20 bp, Human papillomavirus type 30
gattgtcacccccagctgcc

SEQ ID NO: 61431 - DNA, 20 bp, Human papillomavirus type 30
tcacccccagctgccacaag

SEQ ID NO: 61432 - DNA, 20 bp, Human papillomavirus type 30
gaggacaaatacagatatgt

SEQ ID NO: 61433 - DNA, 20 bp, Human papillomavirus type 30
aaagccttgctataacctgt

SEQ ID NO: 61434 - DNA, 20 bp, Human papillomavirus type 30
ctctacctctacaccatcag

SEQ ID NO: 61435 - DNA, 20 bp, Human papillomavirus type 30
tttgtgtctgtgtatgtttc

SEQ ID NO: 61436 - DNA, 20 bp, Human papillomavirus type 30
gtgtctgtgtatgtttcctt

SEQ ID NO: 61437 - DNA, 20 bp, Human papillomavirus type 30
tgtctgtgtatgtttcctta

SEQ ID NO: 61438 - DNA, 20 bp, Human papillomavirus type 30
cgtttggctgatggtgtaga

SEQ ID NO: 61439 - DNA, 20 bp, Human papillomavirus type 30
aggtagcaatttaggtggcg

SEQ ID NO: 61440 - DNA, 20 bp, Human papillomavirus type 30
ggtagcaatttaggtggcgt

SEQ ID NO: 61441 - DNA, 20 bp, Human papillomavirus type 30
aggtggcgtccctatgtcct

SEQ ID NO: 61442 - DNA, 20 bp, Human papillomavirus type 30
ggtggcgtccctatgtcctc

SEQ ID NO: 61443 - DNA, 20 bp, Human papillomavirus type 30
ttggttgttgcacaccactg

SEQ ID NO: 61444 - DNA, 20 bp, Human papillomavirus type 30
ttagtcatatatgtatgctg

SEQ ID NO: 61445 - DNA, 20 bp, Human papillomavirus type 30
gtcatatatgtatgctgcca

SEQ ID NO: 61446 - DNA, 20 bp, Human papillomavirus type 30
tatcagcatactttactgct

SEQ ID NO: 61447 - DNA, 20 bp, Human papillomavirus type 30
atcagcatactttactgctg

SEQ ID NO: 61448 - DNA, 20 bp, Human papillomavirus type 30
tcagcatactttactgctgt

SEQ ID NO: 61449 - DNA, 20 bp, Human papillomavirus type 34
ggaaatgttttttcccaatc

SEQ ID NO: 61450 - DNA, 20 bp, Human papillomavirus type 34
tttcccaatcctgaggaacg

SEQ ID NO: 61451 - DNA, 20 bp, Human papillomavirus type 34
ttcccaatcctgaggaacgg

SEQ ID NO: 61452 - DNA, 20 bp, Human papillomavirus type 34
tcccaatcctgaggaacggc

SEQ ID NO: 61453 - DNA, 20 bp, Human papillomavirus type 34
cccaatcctgaggaacggcc

SEQ ID NO: 61454 - DNA, 20 bp, Human papillomavirus type 34
tgttagatctgaaaccaacg

SEQ ID NO: 61455 - DNA, 20 bp, Human papillomavirus type 34
gatctgaaaccaacgaccga

SEQ ID NO: 61456 - DNA, 20 bp, Human papillomavirus type 34
catgttacgagtcattagac

SEQ ID NO: 61457 - DNA, 20 bp, Human papillomavirus type 34
cgagtcattagacaactcag

SEQ ID NO: 61458 - DNA, 20 bp, Human papillomavirus type 34
gacaactcagaggatgagga

SEQ ID NO: 61459 - DNA, 20 bp, Human papillomavirus type 34
cagacgcctataacagaaga

SEQ ID NO: 61460 - DNA, 20 bp, Human papillomavirus type 34
aggtaattgggaagggaggt

SEQ ID NO: 61461 - DNA, 20 bp, Human papillomavirus type 34
ggaagggaggtgttcgggat

SEQ ID NO: 61462 - DNA, 20 bp, Human papillomavirus type 34
gggatggtttaatgtagaag

SEQ ID NO: 61463 - DNA, 20 bp, Human papillomavirus type 34
aatgtagaagccattgtaga

SEQ ID NO: 61464 - DNA, 20 bp, Human papillomavirus type 34
gaggactgtcaatttgacct

SEQ ID NO: 61465 - DNA, 20 bp, Human papillomavirus type 34
gacctatctcaaatggtaca

SEQ ID NO: 61466 - DNA, 20 bp, Human papillomavirus type 34
acctatctcaaatggtacag

SEQ ID NO: 61467 - DNA, 20 bp, Human papillomavirus type 34
gataatgacataacaaatga

SEQ ID NO: 61468 - DNA, 20 bp, Human papillomavirus type 34
ataatgacataacaaatgac

SEQ ID NO: 61469 - DNA, 20 bp, Human papillomavirus type 34
gctgatgcaaaaatggcatt

SEQ ID NO: 61470 - DNA, 20 bp, Human papillomavirus type 34
ttagatgatgcaacacctgc

SEQ ID NO: 61471 - DNA, 20 bp, Human papillomavirus type 34
gatgatgcaacacctgcatg

SEQ ID NO: 61472 - DNA, 20 bp, Human papillomavirus type 34
atagatatttaagaaatgca

SEQ ID NO: 61473 - DNA, 20 bp, Human papillomavirus type 34
aagaaatgcattagatggca

SEQ ID NO: 61474 - DNA, 20 bp, Human papillomavirus type 34
ccatttgacagtaatggaaa

SEQ ID NO: 61475 - DNA, 20 bp, Human papillomavirus type 34
catttgacagtaatggaaat

SEQ ID NO: 61476 - DNA, 20 bp, Human papillomavirus type 34
gacagtaatggaaatccact

SEQ ID NO: 61477 - DNA, 20 bp, Human papillomavirus type 34
acagtaatggaaatccacta

SEQ ID NO: 61478 - DNA, 20 bp, Human papillomavirus type 34
ctaatgaaaactggaaggca

SEQ ID NO: 61479 - DNA, 20 bp, Human papillomavirus type 34
accaacaagcggtgccaagc

SEQ ID NO: 61480 - DNA, 20 bp, Human papillomavirus type 34
cagtatcacgatccaaaggg

SEQ ID NO: 61481 - DNA, 20 bp, Human papillomavirus type 34
aactacaattagccctagaa

SEQ ID NO: 61482 - DNA, 20 bp, Human papillomavirus type 34
gccctagaaagtttaaatga

SEQ ID NO: 61483 - DNA, 20 bp, Human papillomavirus type 34
aaactttctagggctaattg

SEQ ID NO: 61484 - DNA, 20 bp, Human papillomavirus type 34
caaaggttgagggcaatact

SEQ ID NO: 61485 - DNA, 20 bp, Human papillomavirus type 34
agggcaatactttagctgac

SEQ ID NO: 61486 - DNA, 20 bp, Human papillomavirus type 34
agctgaccaaatattaaaat

SEQ ID NO: 61487 - DNA, 20 bp, Human papillomavirus type 34
gctgaccaaatattaaaata

SEQ ID NO: 61488 - DNA, 20 bp, Human papillomavirus type 34
aaatatggtagcattggggt

SEQ ID NO: 61489 - DNA, 20 bp, Human papillomavirus type 34
tattgaagctggtgtgccag

SEQ ID NO: 61490 - DNA, 20 bp, Human papillomavirus type 34
attgaagctggtgtgccagg

SEQ ID NO: 61491 - DNA, 20 bp, Human papillomavirus type 34
ttgaagctggtgtgccaggt

SEQ ID NO: 61492 - DNA, 20 bp, Human papillomavirus type 34
aagctggtgtgccaggtcct

SEQ ID NO: 61493 - DNA, 20 bp, Human papillomavirus type 34
tagttctggatttaatgtaa

SEQ ID NO: 61494 - DNA, 20 bp, Human papillomavirus type 34
cataatgctcctgactctga

SEQ ID NO: 61495 - DNA, 20 bp, Human papillomavirus type 34
tttagatattgtaaagttac

SEQ ID NO: 61496 - DNA, 20 bp, Human papillomavirus type 34
ttagatattgtaaagttaca

SEQ ID NO: 61497 - DNA, 20 bp, Human papillomavirus type 34
tagatattgtaaagttacat

SEQ ID NO: 61498 - DNA, 20 bp, Human papillomavirus type 34
agatattgtaaagttacata

SEQ ID NO: 61499 - DNA, 20 bp, Human papillomavirus type 34
catcctagcttgtatgtcat

SEQ ID NO: 61500 - DNA, 20 bp, Human papillomavirus type 34
tatgtcattccacgcaaacg

SEQ ID NO: 61501 - DNA, 20 bp, Human papillomavirus type 34
cacgcaaacgtaaacgtttg

SEQ ID NO: 61502 - DNA, 20 bp, Human papillomavirus type 34
gtcatatttttttgcagatg

SEQ ID NO: 61503 - DNA, 20 bp, Human papillomavirus type 34
tcatatttttttgcagatgt

SEQ ID NO: 61504 - DNA, 20 bp, Human papillomavirus type 34
tgtattgtaggctgtaagcc

SEQ ID NO: 61505 - DNA, 20 bp, Human papillomavirus type 34
taggctgtaagcctccctta

SEQ ID NO: 61506 - DNA, 20 bp, Human papillomavirus type 34
ggggaacattggggtacagg

SEQ ID NO: 61507 - DNA, 20 bp, Human papillomavirus type 34
gggtacaggcacaccatgtg

SEQ ID NO: 61508 - DNA, 20 bp, Human papillomavirus type 34
cccagcattttgggtaccac

SEQ ID NO: 61509 - DNA, 20 bp, Human papillomavirus type 34
tatgtggttttatattcgta

SEQ ID NO: 61510 - DNA, 20 bp, Human papillomavirus type 34
tatattcgtagggaacaaat

SEQ ID NO: 61511 - DNA, 20 bp, Human papillomavirus type 34
atattcgtagggaacaaatg

SEQ ID NO: 61512 - DNA, 20 bp, Human papillomavirus type 34
tattcgtagggaacaaatgt

SEQ ID NO: 61513 - DNA, 20 bp, Human papillomavirus type 34
gtagggaacaaatgtttgtt

SEQ ID NO: 61514 - DNA, 20 bp, Human papillomavirus type 34
tgttcattcgccattttata

SEQ ID NO: 61515 - DNA, 20 bp, Human papillomavirus type 34
gttcattcgccattttatat

SEQ ID NO: 61516 - DNA, 20 bp, Human papillomavirus type 34
ttcattcgccattttatata

SEQ ID NO: 61517 - DNA, 20 bp, Human papillomavirus type 34
attcgccattttatatattt

SEQ ID NO: 61518 - DNA, 20 bp, Human papillomavirus type 34
gccattttatatattttaaa

SEQ ID NO: 61519 - DNA, 20 bp, Influenza A virus
gttaccatgcaaacaactcg

SEQ ID NO: 61520 - DNA, 20 bp, Influenza A virus
ccatgcaaacaactcgacag

SEQ ID NO: 61521 - DNA, 20 bp, Influenza A virus
acacaataatggaaaagaac

SEQ ID NO: 61522 - DNA, 20 bp, Influenza A virus
ctgttacacatgcccaagac

SEQ ID NO: 61523 - DNA, 20 bp, Influenza A virus
cacatgcccaagacatactg

SEQ ID NO: 61524 - DNA, 20 bp, Influenza A virus
catagtggagaaggccagtc

SEQ ID NO: 61525 - DNA, 20 bp, Influenza A virus
cccaggggatttcaacgact

SEQ ID NO: 61526 - DNA, 20 bp, Influenza A virus
caacgactatgaagaactga

SEQ ID NO: 61527 - DNA, 20 bp, Influenza A virus
aacgactatgaagaactgaa

SEQ ID NO: 61528 - DNA, 20 bp, Influenza A virus
cagttcttcatagtcgttga

SEQ ID NO: 61529 - DNA, 20 bp, Influenza A virus
tagtactgtgggggattcac

SEQ ID NO: 61530 - DNA, 20 bp, Influenza A virus
agtactgtgggggattcacc

SEQ ID NO: 61531 - DNA, 20 bp, Influenza A virus
gtactgtgggggattcacca

SEQ ID NO: 61532 - DNA, 20 bp, Influenza A virus
accatcctaatgatgcggca

SEQ ID NO: 61533 - DNA, 20 bp, Influenza A virus
ggttttgatagagctttgtc

SEQ ID NO: 61534 - DNA, 20 bp, Influenza A virus
cattgctccagaatatgcat

SEQ ID NO: 61535 - DNA, 20 bp, Influenza A virus
attgctccagaatatgcata

SEQ ID NO: 61536 - DNA, 20 bp, Influenza A virus
ctccagaatatgcatacaaa

SEQ ID NO: 61537 - DNA, 20 bp, Influenza A virus
tcaagaaaggggactcagca

SEQ ID NO: 61538 - DNA, 20 bp, Influenza A virus
tgaaaagtgaattggaatat

SEQ ID NO: 61539 - DNA, 20 bp, Influenza A virus
ggagctatagcaggttttat

SEQ ID NO: 61540 - DNA, 20 bp, Influenza A virus
gagctatagcaggttttata

SEQ ID NO: 61541 - DNA, 20 bp, Influenza A virus
tatagagggaggatggcagg

SEQ ID NO: 61542 - DNA, 20 bp, Influenza A virus
atagagggaggatggcaggg

SEQ ID NO: 61543 - DNA, 20 bp, Influenza A virus
tagagggaggatggcaggga

SEQ ID NO: 61544 - DNA, 20 bp, Influenza A virus
ctagatgtctggacttataa

SEQ ID NO: 61545 - DNA, 20 bp, Influenza A virus
taatgctgaacttctggttc

SEQ ID NO: 61546 - DNA, 20 bp, Influenza A virus
tggttctcatggaaaatgag

SEQ ID NO: 61547 - DNA, 20 bp, Influenza A virus
tcatggaaaatgagagaact

SEQ ID NO: 61548 - DNA, 20 bp, Influenza A virus
catgactcaaatgtcaagaa

SEQ ID NO: 61549 - DNA, 20 bp, Influenza A virus
agaagaagcaagactaaaca

SEQ ID NO: 61550 - DNA, 20 bp, Influenza A virus
gaatcaatgggaacttacca

SEQ ID NO: 61551 - DNA, 20 bp, Influenza A virus
ccaaatactgtcaatttatt

SEQ ID NO: 61552 - DNA, 20 bp, Influenza A virus
attcaacagtggcgagttcc

SEQ ID NO: 61553 - DNA, 20 bp, Influenza A virus
ttcaacagtggcgagttccc

SEQ ID NO: 61554 - DNA, 20 bp, Influenza A virus
cgaacagatggagactgatg

SEQ ID NO: 61555 - DNA, 20 bp, Influenza A virus
ttccgacggatgctctgatt

SEQ ID NO: 61556 - DNA, 20 bp, Influenza A virus
tccgacggatgctctgattt

SEQ ID NO: 61557 - DNA, 20 bp, Influenza A virus
ccgacggatgctctgatttc

SEQ ID NO: 61558 - DNA, 20 bp, Influenza A virus
cgacggatgctctgatttca

SEQ ID NO: 61559 - DNA, 20 bp, Influenza A virus
atgacaaagaagaaataagg

SEQ ID NO: 61560 - DNA, 20 bp, Influenza A virus
tgacaaagaagaaataaggc

SEQ ID NO: 61561 - DNA, 20 bp, Influenza A virus
gccttatttcttctttgtca

SEQ ID NO: 61562 - DNA, 20 bp, Influenza A virus
tttcttctttgtcataaagg

SEQ ID NO: 61563 - DNA, 20 bp, Influenza A virus
cttctttgtcataaaggatg

SEQ ID NO: 61564 - DNA, 20 bp, Influenza A virus
gaacaatggtgatggaattg

SEQ ID NO: 61565 - DNA, 20 bp, Influenza A virus
gtcaggatgatcaaacgtgg

SEQ ID NO: 61566 - DNA, 20 bp, Influenza A virus
tcacccctccagaagttccg

SEQ ID NO: 61567 - DNA, 20 bp, Influenza A virus
cgatcattgatcccacgttt

SEQ ID NO: 61568 - DNA, 20 bp, Influenza A virus
atcccacgtttgatcatcct

SEQ ID NO: 61569 - DNA, 20 bp, Influenza A virus
tgccgcatttgaagatctaa

SEQ ID NO: 61570 - DNA, 20 bp, Influenza A virus
gaagatctaagagtattgag

SEQ ID NO: 61571 - DNA, 20 bp, Influenza A virus
aagatctaagagtattgagc

SEQ ID NO: 61572 - DNA, 20 bp, Influenza A virus
agcttcatcaaagggacgaa

SEQ ID NO: 61573 - DNA, 20 bp, Influenza A virus
atcaaagggacgaaggtggt

SEQ ID NO: 61574 - DNA, 20 bp, Human papillomavirus type 101
gccctttagtgctacctgca

SEQ ID NO: 61575 - DNA, 20 bp, Human papillomavirus type 101
agtgctacctgcaaacttat

SEQ ID NO: 61576 - DNA, 20 bp, Human papillomavirus type 101
gtgctacctgcaaacttatt

SEQ ID NO: 61577 - DNA, 20 bp, Human papillomavirus type 101
ttatgtgatgaattagtaac

SEQ ID NO: 61578 - DNA, 20 bp, Human papillomavirus type 101
tgtgatgaattagtaaccga

SEQ ID NO: 61579 - DNA, 20 bp, Human papillomavirus type 101
gagcccaagactgcaacagt

SEQ ID NO: 61580 - DNA, 20 bp, Human papillomavirus type 101
agcccaagactgcaacagtt

SEQ ID NO: 61581 - DNA, 20 bp, Human papillomavirus type 101
cgtgtatcgtcccaaggatc

SEQ ID NO: 61582 - DNA, 20 bp, Human papillomavirus type 101
tactggatccttgggacgat

SEQ ID NO: 61583 - DNA, 20 bp, Human papillomavirus type 101
actggatccttgggacgata

SEQ ID NO: 61584 - DNA, 20 bp, Human papillomavirus type 101
tgaatacctgcaaattataa

SEQ ID NO: 61585 - DNA, 20 bp, Human papillomavirus type 101
taaatccaagcatggggacg

SEQ ID NO: 61586 - DNA, 20 bp, Human papillomavirus type 101
cagtaatgatgttgtttcag

SEQ ID NO: 61587 - DNA, 20 bp, Human papillomavirus type 101
tttcagttttatgctgcaaa

SEQ ID NO: 61588 - DNA, 20 bp, Human papillomavirus type 101
cagttttatgctgcaaaatg

SEQ ID NO: 61589 - DNA, 20 bp, Human papillomavirus type 101
gtaaatagcagaagccaatt

SEQ ID NO: 61590 - DNA, 20 bp, Human papillomavirus type 101
taaatagcagaagccaattt

SEQ ID NO: 61591 - DNA, 20 bp, Human papillomavirus type 101
tggttgcaaccactagtaga

SEQ ID NO: 61592 - DNA, 20 bp, Human papillomavirus type 101
ggttgcaaccactagtagat

SEQ ID NO: 61593 - DNA, 20 bp, Human papillomavirus type 101
gttgcaaccactagtagatg

SEQ ID NO: 61594 - DNA, 20 bp, Human papillomavirus type 101
gacctgggcgatccagacga

SEQ ID NO: 61595 - DNA, 20 bp, Human papillomavirus type 101
cgatgctgtgcaagacaggc

SEQ ID NO: 61596 - DNA, 20 bp, Human papillomavirus type 101
gatgctgtgcaagacaggct

SEQ ID NO: 61597 - DNA, 20 bp, Human papillomavirus type 101
ataaatccccagtagcctgt

SEQ ID NO: 61598 - DNA, 20 bp, Human papillomavirus type 101
cacagcatcgaaacggtcga

SEQ ID NO: 61599 - DNA, 20 bp, Human papillomavirus type 101
tggaccgctatttattacca

SEQ ID NO: 61600 - DNA, 20 bp, Human papillomavirus type 101
attaccaagacgcacaggac

SEQ ID NO: 61601 - DNA, 20 bp, Human papillomavirus type 101
ttaccaagacgcacaggaca

SEQ ID NO: 61602 - DNA, 20 bp, Human papillomavirus type 101
ccaagacgcacaggacaatt

SEQ ID NO: 61603 - DNA, 20 bp, Human papillomavirus type 101
taccaattgtcctgtgcgtc

SEQ ID NO: 61604 - DNA, 20 bp, Human papillomavirus type 101
atcagtggggcaaggacatc

SEQ ID NO: 61605 - DNA, 20 bp, Human papillomavirus type 101
gcgacttgcaagattacaag

SEQ ID NO: 61606 - DNA, 20 bp, Human papillomavirus type 101
caagattacaagacgaggct

SEQ ID NO: 61607 - DNA, 20 bp, Human papillomavirus type 101
caagacgaggctagggatcc

SEQ ID NO: 61608 - DNA, 20 bp, Human papillomavirus type 101
ttaaagggcctgcaaatact

SEQ ID NO: 61609 - DNA, 20 bp, Human papillomavirus type 101
cagtaacaagcacacggcat

SEQ ID NO: 61610 - DNA, 20 bp, Human papillomavirus type 101
agtaacaagcacacggcatg

SEQ ID NO: 61611 - DNA, 20 bp, Human papillomavirus type 101
atccttcttacatatcggta

SEQ ID NO: 61612 - DNA, 20 bp, Human papillomavirus type 101
ttacatatcggtatatggcc

SEQ ID NO: 61613 - DNA, 20 bp, Human papillomavirus type 101
catatcggtatatggccatc

SEQ ID NO: 61614 - DNA, 20 bp, Human papillomavirus type 101
gtcagcaatctggggtggcc

SEQ ID NO: 61615 - DNA, 20 bp, Human papillomavirus type 101
ttgatggcttagcatctgct

SEQ ID NO: 61616 - DNA, 20 bp, Human papillomavirus type 101
atggcttagcatctgctaac

SEQ ID NO: 61617 - DNA, 20 bp, Human papillomavirus type 101
gcatctgctaacattaatgg

SEQ ID NO: 61618 - DNA, 20 bp, Human papillomavirus type 101
atggcagtgctgaaacatct

SEQ ID NO: 61619 - DNA, 20 bp, Human papillomavirus type 101
ccagatgtgtctgaacctcc

SEQ ID NO: 61620 - DNA, 20 bp, Human papillomavirus type 101
cagatgtgtctgaacctcct

SEQ ID NO: 61621 - DNA, 20 bp, Human papillomavirus type 101
ttgtggatggttttgatgca

SEQ ID NO: 61622 - DNA, 20 bp, Human papillomavirus type 101
tggatggttttgatgcattt

SEQ ID NO: 61623 - DNA, 20 bp, Human papillomavirus type 101
tgatgcatttgatacatttt

SEQ ID NO: 61624 - DNA, 20 bp, Human papillomavirus type 101
ctatggatcctaaacaaaca

SEQ ID NO: 61625 - DNA, 20 bp, Human papillomavirus type 101
tatggatcctaaacaaacac

SEQ ID NO: 61626 - DNA, 20 bp, Human papillomavirus type 101
tttgttgttggttgcacccc

SEQ ID NO: 61627 - DNA, 20 bp, Human papillomavirus type 101
gttgttggttgcaccccttg

SEQ ID NO: 61628 - DNA, 20 bp, Human papillomavirus type 101
ttgttggttgcaccccttgt

SEQ ID NO: 61629 - DNA, 20 bp, Human papillomavirus type 101
tattggtgctgagcaaggcc

SEQ ID NO: 61630 - DNA, 20 bp, Human papillomavirus type 101
attggtgctgagcaaggcca

SEQ ID NO: 61631 - DNA, 20 bp, Human papillomavirus type 101
ttggtgctgagcaaggccag

SEQ ID NO: 61632 - DNA, 20 bp, Human papillomavirus type 101
gtgctgagcaaggccaggac

SEQ ID NO: 61633 - DNA, 20 bp, Human papillomavirus type 101
atattttgctacacctagtg

SEQ ID NO: 61634 - DNA, 20 bp, Human papillomavirus type 101
ctacaatgtgtcccacagca

SEQ ID NO: 61635 - DNA, 20 bp, Human papillomavirus type 101
ttgggtggttgatttatcag

SEQ ID NO: 61636 - DNA, 20 bp, Human papillomavirus type 101
tgggtggttgatttatcaga

SEQ ID NO: 61637 - DNA, 20 bp, Human papillomavirus type 101
gggtggttgatttatcagac

SEQ ID NO: 61638 - DNA, 20 bp, Human papillomavirus type 101
ggtggttgatttatcagaca

SEQ ID NO: 61639 - DNA, 20 bp, Human papillomavirus type 101
ctggtacatttgctgccaat

SEQ ID NO: 61640 - DNA, 20 bp, Human papillomavirus type 101
gctgccaattttgccagcag

SEQ ID NO: 61641 - DNA, 20 bp, Human papillomavirus type 101
ctgccaattttgccagcagg

SEQ ID NO: 61642 - DNA, 20 bp, Human papillomavirus type 101
tgccagcaggtatgttcatg

SEQ ID NO: 61643 - DNA, 20 bp, Human papillomavirus type 101
gccagcaggtatgttcatgt

SEQ ID NO: 61644 - protein, 1442 aa, Unknown
  Microbial Source - Accession No. Ga0109381_1004188
MANQAAVTQRAYTLRLRGVDPQDQSWRDALWATHEAVNKGAKAFGDWLLTLRGGLDHALADAKVKGGKRKPDRDPTDEERKGRRILLALSWLSVESEKGAPDRHVVPHDLNKQSGSRSWKTVDALREILKGRGLDESEIESWVQDCSASLSAAIRDDAVWVNRSKAFDDAVKSIDCSLTRDEVWDMLDRFLGSRDAYLAPAKGAEDESAEAEQEDKAKDLVQKAGQWLSSRFGTGKGADFSRMAAVYEKIADWAGKARAGMTGDAAVAGLAAALSEFSPASNDLQGVFRLISGPGYKSATRKLLKQLPARPSVAQEDLENLRDSACDDAEKCKANTGSKRQRAYADAILKDVESVCGFTYLQEGGPARHSEFAVMLDHAARRVSLAHTWIKRAEAERRRFEEDARRMDKLPARVKQWLDAFCFERSERLKASGEKKTYRIRRRAVDGWKELVAAWSNADCKTAEDRIAAARALQDDPEIEKFGDIQLFEALADDEALCVWHKDGDLAKSPDPQPLIDYVLATDAEFKKRQFKVPAYRHPDALLHPVFCDFGNSRWDISFDVHKAVKTSERNRKNMMAQDPHALSMTLWTGSTVEPQRLRWQSKRLARDLALKGRQDANARPVTRADRLGRAAAGVFAHSAVRIAGIFAQEDWNGRLQAPRAQLDAIAARVARHGWDAKARQMRDHLRWLITFSAKLQLSGPWAGPEPSPWVEYTKTFPDDAPAKPFVSRKGDYAVRHQGNDARNGHAKLILSRLPGLRVLSVDLGHRYAAACAVWETLSAEQLKAACQAAGHEPPKDSDLYLYLKKKVKKQKKGKALEVEETTVYRRIGADVLPDGKPHPAPWARLDRQFLIKLQGEDTEARKASSAEVGAVQELERAVGREPPDQRSLRVDDLMSETVRTVRLALQRHGRRARIAFNLTASKRHLPDGREEVLTAEERVKLLADTLADWYALFTGKGWHDEWARQQWETHIAPLLQGSVLPQIPEDAEDVPKARRKYQDDLMERLSPLARSLAGNDSLCRKLHCLWATRWRENDVILRKRLRWLRDWILPRGRNAEGDPAIRHVGGLSLTRIATIKSLYQVQKAFHMRSEPEDPSRNNPSKGDDALLDFGRSILDVMEHMREQRVKQLASRIAEAALGIGRVKRLAGGKDPKRPRQRVDRPCHAVVIENLTHYRPEETRTRRENRQLMSWSSSKVSKYLAEACQLHGLHLREVQAGYTSRQDSRTGAPGVRCQDVPVSEFMQSPFWRKQVAQAEKKRAEGKGDARERFLCDLNEKWKGQPEADWKRAAAVRVPLKGGEIFVSADEKSPAAKGLQADLNAAANIGLRALTDPDWPGKWWYVPCDPTNFKPAKDKVAGSAAICLDKPLKNAPAAQDTDGPRKKRGKAEARSREVVNLWRDVSSQPISANDDWREFTPYWNEVQARVVNILRQSAGFARDQGER

SEQ ID NO: 61645 - protein, 1285 aa, Unknown
  Microbial Source - Accession No. Ga0212093_1006934
MEEKMLKSYDYFTKLYSLQKTLRFELKPIGKTLEHIKNSGIIESDETLEEQYAIVKNIIDKLHRKHIDEALSLVDFTKHLDTLKTFQELYLKRGKTDKEKEELEKLSADLRKLIVSYLKGNVKEKTQHNLNPIKERFEILFGKELFTNEEFFLLAENEKEKKAIQAFKGFTTYFKGFQENRKNMYSEEGNSTSIAYRIINENLPLFIENIARFQKVMSTIEKTTIKKLEQNLKTELKKHNLPGIFTIEYFNNVLTQEGISRYNTIIGGKTTHEGVKIQGLNEIINLYNQQSKDVKLPILKPLHKQILSEEYSTSFKIKAFENDNEVLKAIDTFWNEHIEKSIHPVTGNKFNILSKIENLCDQLQKYKDKDLEKLFIERKNLSTVSHQVYGQWNIIRDALRMHLEMNNKNIKEKDIDKYLDNDAFSWKEIKDSIKIYKEHVEDAKELNENGIIKYFSAMSINEEDDEKEYSISLIKNINEKYNNVKSILQEDRTGKSDLHQDKEKVGIIKEFLDSLKQLQWFLRLLYVTVPLDEKDYEFYNELEVYYEALLPLNSLYNKVRNYMTRKPYSVEKFKLNFNSPTLLDGWDKNKETANLSIILRKNGKYYLGIMNKENNTIFEYYPGTKSNDYYEKMIYKLLPGPNKMLPKVFFSKKGLEYYNPPKEILNIYEKGEFKKDKSGNFKKESLHTLIDFYKEAIAKNEDWEVFNFKFKNTKEYEDISQFYRDVEEQGYLITFEKVDANYVDKLVKEGKLYLFQIYNKDFSENKKSKGNPNLHTIYWKGLYDSENLKNVVYKLNGEAEVFYRKKSIDYPEEIYNHGHHKEELLGKFNYPIIKDRRYTQDKFLFHVPITMNFISKEEKRVNQLACEYLSATKEDVHIIGIDRGERHLLYLSLIDKEGNIKKQLSLNTIKNENYDKEIDYRVKLDEKEKKRDEARKNWDVIENIKELKEGYMSQVIHIIAKMMVEEKAILIMEDLNIGFKRGRFKVEKQVYQKFEKMLIDKLNYLVFKNKNPLEPGGSLNAYQLTSKFDSFKKLGKQSGFIFYVPSAYTSKIDPTTGFYNFIQVDVPNLEKGKEFFSKFEKIIYNTKEDYFEFHCKYGKFVSEPKNKDNDRKTKESLTYYNAIKDTVWVVCSTNHERYKIVRNKAGYYESHPVDVTKNLKDIFSQANINYNEGKDIKPIIIESNNAKLLKSIAEQLKLILAMRYNNGKHGDDEKDYILSPVKNKQGKFFCTLDGNQTLPINADANGAYNIALKGLLLIEKIKKQQGKIKDLYISNLEWFMFMMSR

SEQ ID NO: 61646 - protein, 1273 aa, Unknown
  Microbial Source - Accession No. GA0212092_1000015
MQDKTGWSSFTNKYSLSKTLRFELKPVGNTQKMLEDDGVFQKDRERQENYKKVKPFMDKLHREFIKEALNNLKLEGLTEYFEIFKKFRKDKNNKELKNAEKKLRQIIGRCYTETAQIWVEKYKEFGFKKKNIGFLFEEGVFELMKLKYGNDEASQIEKNGEVLSIFDGWKGFLGYFKKFFETRNNFYKDDGTSTAVSTRIINENLKIYLDNLIKYNKIKDKVDFKEADILQENKLNLSDFFNVESYAKYSLQKGIDYYNEILGGKTLKNGTKLKGLNEVINEYKQKNKSGELSKFKMLKKQILGEGEDRTLFEEIENEDELKDVLKDFFYNADPKITLFKTLLEDFFSNTEKYKDELDKIYFNTVAINGILHRWVDDSGVFQKYLFEVLKSNKLVKSNHYDKKEDSYKFPDFISFEHIKVALENCERDGLKDKFWKEKYYTKECLTENGLANLWQEFLEIYKCEFKKLYDYKTDDNDCYLQYRDNYKKYILDANFNPKEKSAKDIIKDYLDSVLSIYQLAKYFALEKKKVWTTDYETGDFYYEYIKFYEDTYEQIIKPYNLVRNYLTRKPINTAKKWKLNFDNAYLASGWDKDKEVSNLTVILRRDEQYYLAIMKKGKNKIFEKKFSCGEFEKMEYKQIAEASSDIHNLVLMNDGSCRRCIKMHDKRKYWPLDISIIKEKKSYAKENFVRRDFERFVNYMKKCSLLYWKEYDLKFSDTSTYKNINDFTNEIASQGYKLSFSAIPESYINEKNNNGELYLFQIYNKDFGIKTEGNKNLHTMYWESIFSEENRFRNFIVKLNGKAEIFYRPKSEQVEKEQRNFTREIIKNRRYTENKIYFHCPITLNRISRENVKKFNNGINNYIATNPNINILGVDRGEKHLVYYAIVDQDGKLIDAEDATGSFNTIGSTDYHRLLEEKAKDREKERKDWDLIRGIKDLKKGYISLVVRKIADLAIKYNAIIIFEDLNTRFKQIRGGMEKSVYQQLEKALINKLSFLVNKGEKDPEQAGHLLKAYQLAAPFQTFDKMGRQTGIIFYTQASYTSKIDPITGWRPNLYLKYRNIDDSKESIKKFKSILFNKEKNRFEFTYDLKDFVDFEEDKIPEKTEWTLCSSVERHKWNRHMNNNKGGYEVYKDLTENFYKLFDENNISMNKDIVDQVESISNGNFFRQFIYLFNLVCQIRNTDEKAEDVDKRDFILSPVEPFFDSRRAKDFKAYGDNLPKNGDENGAYNIARKGVLIIKKIKEYYNQNGSCDKLGWGDLSISHKEWDDFATNN

SEQ ID NO: 61647 - protein, 488 aa, Unknown
  Microbial Source - Accession No. GA0117933_1071983
VSVFLTAKLKVHNPSRRKRAVLDHALEEYTRAYAWLLGWAKDNLPLLEKKGQYRGRFTETAIRKALPPASAFNTYDLHSSARDSLLVDVAGALCSYFRLRDENPLTAFPTCRDPRPETYPDALEEFASVADDERDYNERRDRLSKVARGAVMPVYFARPDGVPRGRNFSLLCDPAARRYYAIVFLLPGRGGGALHGRGNLARMGWPQGHDAGEPPPRFHGKPSGALVLPLALGRWHAETFLDPCLRGEANVRSAFLSRADVDGRDADYYVHVTFEFSPPTIETETFLGVDRGISNLIALTVTDGEGRVLHQELHPGDDLVSFQKYVFTEYRRRQRRGRTLRGERVIARANEEVCHRLANVIADVAVRHRSQVVMERLKGFKEQRRDFGLLKRAPLQRIEQILEYKLPVRGLPPPRTVNPAYTSRECPRCGYGRDVRGKGINRPSQAQFRCERCGYETHADLNGSHNIARRWIDIRARPKLAASTLTTA

SEQ ID NO: 61648 - protein, 1059 aa, Unknown
  Microbial Source - Accession No. GA0212092_1024084
MADGKPPTFPRTYTMRLCPPDEGQADRNGLWDKLFATHYAVNAGARAFGEFLLDMRGGLSPDLSRMGLDRIKDDAKRRLALAGRRRMLALGWLSVEDDHGAGDHPHALPESSGQPLPRDVAEKLLRQILETKGVTDRATVDEWCDDCLGALTAAVRDDTVWVNRAESYRNLDSGPSPDQAFKILERLLGKNFLDLSLGKETRTRDRHRGQLGTDEGEDGEDKEEWRTTAASGNDPSENARQLICDLFGTGQKGDFRKTAGFAAKVKNWVNSLGDYKNCDQPSLENRIRETFRSVFSGGEYPSFPSKELKKSRPKPTSLYPQECVSGKKPGKLARRVRKLLVYLKVWDQMPGVEDGTIRDNRLHALVNEIDSACDEEIKKDRTDLKAPSWAPALLSRLEKASGIKLASRQQGSPSAGEFRILFAVLAARRLSQTQSWTRLNEMTRHEAQSDLDSAKSEIDRLDPKGKARGLLERWEDRRRQESGTRGEYRITRAAISALDDVLEAWATSTGPEERIGLLPEVQSRAEKFGDASFFEWLARTDNECLWKHASTGAISGEIITNWVKKREAEAAISLVKVPRYCHPDPFLHPVWCEFGNSKPDVRYFLRNELGQTNKRRKNSQHSEDLRNVELLLVNDRSGTVGMERLRWASDRLWKDLGVAATQSSDALARNDRLSRAALGLSTGSYRPIYPFTGQAKKWNARLQVDRNALEELRGLWDNRTRKWTDEGRRAHQVRWFLSFSPDLKASAGPWHRFVENNRDILNDLSTRPYKDKKTDELRVPLPWGKLNRKENRKGRAQLVLCRLPGLRVLSVDLGHRHAAACAVWETLSTAQINQLCYQHHQPPPGPSSLYHVYETSIPDTDGCTGEVRKLKRLKPKQFIYRRIGPDRVNGREHPAPWARLVRQFVIPLQGEKDEPRWPTEEEKRLAHTLRLTLELPESKVERPVRFDELMSGIIDMLERGIDRHKKASRVAYNLTAREIVEPGGKLVPVDGTDRYEVISSALKDWYSLASSPGLYSNFAREIWNAKCAGLKGGRPVPAETAADEPEKVSFSDLAKGLAE

SEQ ID NO: 61649 - protein, 1620 aa, Unknown
  Microbial Source - Accession No. GA0212093_1001507
MAPSRAKNSWSSKKANPSKPAARSSHTAKPRWPYWKSQAWKTNTPSAKWSRKKKARNSPRKCTSNRPLRRELIILESAVKIAQRWRLCSRNQECVICQRDKCLVVKENMSKNNDCMKCAALMLQKAREELACLITESERTTMSQQVKPPVTQRAYTLRLRGIDPSDTSWRKALWQTHEGVNKGAKAFGDWLLTLRGGLDHTLADTKVKGGKGKPDRDPTDEERKARRILLALSWLSVESKLGAPVGFIIASGTEAAEDRNRKVVAALEEILKSRNVATNEIDQWKNDCSASLSAAIRDDAVWVNRSKAFDEAVKSIGSSLTREEAWDMLERFFGSRDAYLAPAKGSEDESSETEQEDKAKDLVQKAGQWLSSRFGTGKGADFCRMANVYGKIAAWADNAQADTTGNDAINNLAAALNEYSPEPNDLKGVLGLISGPGYKSATRNLLNQLAAKATVTQQDFVSLKDKASNDAQKCKQNTGSKGPRPYSDAILKNVESVCGFTYLQDGGPARHSEFAVILDHAARRVSLAHTWIKRAEAERRKFEEDAKKIDQVPKAAKDWLDSFCLERSGASGALEPYRIRRRAVDGWKEVVAAWSKADCKTAEDRIAAARALQDDPEIDKFGDIQLFEALAEDDAVCVWHKDGDAAKPPDPQPLIDYALAAEAEFKKRHFKVPAYRHPDALLHPVFCDFGNSRWDICFDVHKNVQTPFPRALSLTLWTGSGMVSVPLCWQSKRLARDLALGQNAQNDGSSEVTRADRLGRAASNVTKSDEVKISGLFEQEDWNGRLQAPRQQLEAIAAVRDNLSLSDQERERRMSGMIDRIRWLVTFSAKLQPQGPWCEFAEKIQIGINPQYWPHADTNKDRKGHARLILSRLPGLRVLSVDLGHRYAAACAVWEAVNAEQINVACRAAGHREPKASDLYLHLKRKTTKQKKGDQVEFKETTIYRRIGADTLPDGTPHPAPWARLDRQFLIKLQGEEEGVRAASNEEIWAVHRLEVELGRTAPLIDRLVKAGWGQSGKQKTRLDALRNLGWAPANEVQGSDEMDEGEVHKPSLSVDELMSSAVRTMRLALKRHGDRARIAFAMTAAYKPMPGDRKYYFTEAKDASANEDATARNGKHIEFIQDALLLWYGLTSSRGWRDDAARQLWDDHIAKLSVYKAPEEIGEDASGVERKTKQKENREKLHDVAKALAQDVNLRKVLHNAWKKRWEKDDERWKKQLRWFKDWVFPRGKHASDPAIRKVGGLSLPRLATLIEFRRKVQVGFFTRLQPDGTRAETKEQFGQSALDTLEHLREQRVKQLASRIVEAALGIGRVRRPLGGKDPKRPDVRVDEPCHAIVIEDLTHYRPEETRTRRENRQLMTWSSSKVKDYLSEACQLHGLHLREVSASYTSRQDSRTGSPGIRCQDVPVKEFMRSPFWRKQVAQAEKKGDAHERFLCELNAMWKDKTVADWEKAGAVRVPLKGGEVFVSADRISPSAKGLQADLNAAANIGLRALTDPDWPGKWWYVPCEPASFRPAKDKVDGSAVVNPGQPLRQSAQAQSGDAAKDKKKRGNKGAGQSKEVVNLWRDISSSPLECIECGEWKEYAAYQNEVQYRVIRILEEQIKGRDRQPHEGSREDDIPF

SEQ ID NO: 61650 - protein, 377 aa, Unknown
  Microbial Source - Accession No. GA0212120_1000874
MAEGTEEVKLTVKAVILARDAGVKVLREEYNTYRKVLLSRVKEAVRTVVKDPELRVYAQQKWMVDKKLTEYLKNLPMHPMPFHRQSVWIERKDQGFYIHFKVKREGGEAVCYLLVPEKYRDLIAKACGKDNPMLGEVELIEDRKYGRFNVHLTLRLPKPEPYEPKGWLGVDVGWNKLATSILATCNPHLKFSNPTFHGKEFKTSIIQLRHMLKEAQRKGEAVRKWDSRLKNTIKYAVGAVAKEIVEKAKRLKAGVAMERLTFKSTSKGYLVPRYKLMIAVKTLCEREGVPFKLVPAQYTSVTCPKCGYRDERNRSNEWFKCLKCGYQTDADLAGAMNIALRAFDRRPDGGRNAVGYTPTAKSLLDYTSGRLGQPSSP

SEQ ID NO: 61651 - protein, 426 aa, Unknown
  Microbial Source - Accession No. GA0212125_1004414
MRRTIPILLPNDSDLVATIKLFTQIANEVSEMAFKLDKVKRWTLRRQFYSLLRQKYPTVNSRVLEYVLRVVTGCYTAKKRRKMKSKEPVRFKQEFALFDKRLFSFNGDCVTIWTIAGRKEFPFKLPPVSRFMELWERKEDIDSMVLKVRDGRVVAHVCLTIPDPPLRQFTYMVGVDLGAEYPLIAVRSDGVIFCPDYSVFHQKRKLFMQRRRELQKKLAEKRKYGENARSVVRRLKALSHKQRRFTKQFVRWVVKRFVDWAKDALIVMEKLRLPQGRKKKRAKALNRTLSLMPYGMVRKTIEEICEEQGLQVIFVPPAGTSQTCPACGQKGERPKRDLFVCPHCGYSEHADIVGARNVLRRGFEMLLRDGAEAGDKPAGLCQPCSSLPADEAGGGNPTVVPERVKGLQSTSKAKSATEGRLQPSLF

SEQ ID NO: 61652 - protein, 285 aa, Unknown
  Microbial Source - Accession No. GA 0212125_1006348
LHVPAKYHDLIEKACGKDNPVLGQVELVEDKKYGWVNCHITLRLPKPEPYEPLGWVGVDIGWNKLATSIACTCNPHIRFFNPTFHGKEFKTRIIQLRHLLKEYARKGKAWKKWDYRLKHTIKYAVGVVAKEIVTKAKKLKAGVAMESLTFKSTTKGYIVPRHKLMVAVKTLCEREGIPFKLVPAQYTSITCPKCGHINSKNRDGEWFKCLKCEYQTDADLVGAMNIALRALDSCPNGGQIDVGHAPRLKPMGLYAPEGGDVATPLRGMNDDLYKATRKTEKIEER

SEQ ID NO: 61653 - protein, 486 aa, Hydrogenivirga sp.
MNKVLKLTAKREKVKFKLLLLETGREEEVKFYELREALERFVRGVRVAYLKTLPDSLEGLEEKGRPNTRAVNSNELSKRFPPECAKVKLGSLELELGKDNIASSIRYTIEKDIRENLKREFKTIAIKSVPIIARVHTTKSHPYEKAFGEVFRIFEISEPDEKNRVSVRVGVKFFKQVEVEGKKATPVLVVEAVMRLKGRDYATANSYYNILKRIKEGEYKVAYAGLSYREGSGISLLLSYNLPDISEDDKRENILGIDLGQACPVYWSLITPELEKKKLTNGRHPRGQIEYPVNLEGAIRKLWRAKRNLLSSLRRIEEQTSLLSEGNRDLKGRLLRRKREVERSLKGMRRKEKNLMKKMDEFLANEVIRVALRERCRKIRMERLDGVDKTELYFPKWNYGQLQNLIEQRASLYGIEVERVNPRKTSQRCPSCGYVGQRREEVRPTRDLFRCPECGEESFADFVGAFNVGIGGWEAFKPKEALSSSS

SEQ ID NO: 61654 - protein, 376 aa, Rhodothermus marinus
MRTTFKYRLYRSKRDKHLIEQIEVAASIWNHSVALTRRYYRIYGKYPGANRLMKHIARLRRRNPYWQKLGSQAVQDVIQRLDRAYWRFFSDPKAGRPRFKKRERYSSFTLKQAGWKYPGGNRIRIGKHNYKFVLSRPIQGEIKTVTIKRDRVGRLWICFSVVTEEQPKPPAPHEAVMRPVGLDFGLKCFLTLSDGTKIQSPEFFRRGLQEVRKAHRALSRKQRGSNNYRKARVRLAKVYDRISNQRRDWFFKTAHALCERYDFIALEDLNIEGMKRRWGRKVSDLGFGEFVSILEHVARKRGVRVAKVARFFPSSRRCSCCGWVKENLSLADREWTCERCGTVHDRDENAAINICREGASSLGVGDVRPPEAAVAV

SEQ ID NO: 61655 - protein, 461 aa, Microcystis sp.
  misc_feature (35)..(37): Xaa can be any naturally occurring amino acid
  MISC_FEATURE (38)..(247): X = any amino acid
MMKLVQKHLIKFNHKNYSVIDKLGFLSKNLYNCAXXXXXXXXXXXXXXXXXXXXXXXXXXXXXXXXXXXXXXXXXXXXXXXXXXXXXXXXXXXXXXXXXXXXXXXXXXXXXXXXXXXXXXXXXXXXXXXXXXXXXXXXXXXXXXXXXXXXXXXXXXXXXXXXXXXXXXXXXXXXXXXXXXXXXXXXXXXXXXXXXXXXKVLEVRIIPKLGAYCLEIVYEQPSSSSQEGERYAFIDLGLNNLAAVTSNIPEFQPTLVCGKALKSCNQKYNKTLAKLKSELPSLQKTSKRIQGLTLKRNCQVDYYLHTASKYIIDKLLAHQINLLVIGHNQGWKQNINIGDRNNQSFVNIPHSRLIEQLTYKANLVGIEVKTTNESYTSKCSFLDLESIQKQKSYLGKRIKRGLFRSSSGYFYGADINGSLNIGRKVVGEAAFSGNPIERFVVNPVRVKAYKANSRCNICVQN

SEQ ID NO: 61656 - protein, 1271 aa, Leptospira sp.
MKNLANFTNLYSLQKTLRFELKPIGKTLDWIIKKDLLKQDEILAEDYKIVKKIIDRYHKDFIDLAFESAYLQKKSSDSFTAIMEASIQSYSELYFIKEKSDRDKKAMEEISGIMRKEIVECFTGKYSEVVKKKFGNLFKKELIKEDLLNFCEPDELPIIQKFADFTTYFTGFHENRENMYSNEEKATAIANRLIRENLPRYLDNLRIIRSIQGRYKDFGWKDLESNLKRIDKNLQYSDFLTENGFVYTFSQKGIDRYNLILGGQSVESGEKIQGLNELINLYRQKNQLDRRQLPNLKELYKQILSDRTRHSFVPEKFSSDKALLRSLLDFHKEVIQNKNLFEEKQVSLLQAIRETLTDLKSFDLDRIYLTNDTSLTQISNFVFGDWSKVKTILAIYFDENIANPKDRQRQSNSYLKAKENWLKKNYYSIHELNEAISVYGKHSDEELPNTKIEDYFSGLQTKDETKKPIDVLDAIVSKYADLESLLTKEYPEDKNLKSDKGSIEKIKNYLDSIKLLQNFLKPLKPKKVQDEKDLGFYNDLELYLESLESANSLYNKVRNYLTGKEYSDEKIKLNFKNSTLLDGWDENKETSNLSVIFRDTNNYYLGILDKQNNRIFESIPEIQSGEETIQKMVYKLLPGANNMLPKVFFSEKGLLKFNPSDEITSLYSEGRFKKGDKFSINSLHTLIDFYKKSLAVHEDWSVFNFKFDETSHYEDISQFYRQVESQGYKITFKPISKKYIDTLVEDGKLYLFQIYNKDFSQNKKGGGKPNLHTIYFKSLFEKENLKDVIVKLNGQAEVFFRKKSIHYDENITRYGHHSELLKGRFSYPILKDKRFTEDKFQFHFPITLNFKSGEIKQFNARVNSYLKHNKDVKIIGIDRGERHLLYLSLIDQDGKILRQESLNLIKNDQNFKAINYQEKLHKKEIERDQARKSWGSIENIKELKEGYLSQVVHTISKLMVEHNAIVVLEDLNFGFKRGRQKVERQVYQKFEKMLIEKLNFLVFKDKEMDEPGGILKAYQLTDNFVSFEKMGKQTGFVFYVPAWNTSKIDPKTGFVNFLHLNYENVNQAKELIGKFDQIRYNQDRDWFEFQVTTDQFFTKENAPDTRTWIICSTPTKRFYSKRTVNGSVSTIEIDVNQKLKELFNDCNYQDGEDLVDRILEKDSKDFFSKLIAYLRILTSLRQNNGEQGFEERDFILSPVVGSDGKFFNSLDASSQEPKDADANGAYHIALKGLMNLHVINETDDESLGKPSWKISNKDWLNFVWQRPSLKA

SEQ ID NO: 61657 - protein, 424 aa, Parageobacillus thermoglucosidasius
MKYTKVMRYQIIKPLNAEWDELGMVLRDIQKETRAALNKTIQLCWEYQGFSADYKQIHGQYPKLKDVLGYTSMHGYAYDRLKNEFSKIASSNLSQTIKRAVDKWNSDLKEILRGDRSIPNFRKDCPIDIVKQSTKIQKCNDGYVLSLGLINREYKNELGRKNGVFDVLIKANDKTQQTILERIINGDYTYTASQIINHKNKWFINLTYQFETKETALDPNNVMGVDLGIVYPVYIAFNNSLHRYHIKGGEIERFRRQVEKRKRELLNQGKYCGDGRKGHGYATRTKSIESISDKIARFRDTCNHKYSRFIVDMALKHKCGIIQMEDLTGISKESTFLKNWTYYDLQQKIEYKAREAGIQVIKIEPQYTSQRCSKCGYIDKENRQEQATFKCIECGFETNADYNAARNIAIPNIDKIIRKTLKMQ

SEQ ID NO: 61658 - protein, 464 aa, Synechococcus sp
LSGATTSSLQVRIAAQQPAGTADAPGKNVRAKSALNKAILDQGWYEFRCMLEYKLAWKGGRLIVVPPQNTSRTCPCCGHVSSDNRQTQAWFECVACGYENNAFRGSGPEAFRGSGPEAFLVGAINILARGIQLLRDEGQDTTDAAVGMRVGEPPVSARMACGSNCTGGRKQEPAETTAQGAIHAQRGRNLRPSGRGGCQHSLPSGSAQVRIKKQRSHPQAHFCLPVNPVRTLSATKAAFFSAYPRPINAVYRRVVEELLVELHLTTVNSTFVYDPFFALGLVTLYDGLMEAYHPPEQREAIFNALCKALHLKPEVLRKNARDLLELMGSGDPRQRLDLLCLKPEAEDVGGLKAILERMTQPPYAYSRVLAVGLYTAYEVVAKSLYEEPEERTRRFLENVVSKLPFSTERVRKDLELYRSSLDRMKQARAVVEEMVKAARRQQERRQSAASLPETSLGDPSKPGS

SEQ ID NO: 61659 - protein, 543 aa, Sulfurihydrogenibium azorense
MVNKNLKITSGRDNVEFYLIVDGEEIPLKKQDIRNLITEFLKDVRLAYIKFLPNIELIQTGKYFTVNINSKRLTNENLSNSLTKLIPKNYIELEINGSKVKLDYKKDYVATSILYSVAKDITGNLKEGKTVVIKNLQYLARIKPDKNTPYDKAFSQVIKEFEIVENGKTVECVITFSAFKNASIKVKFKMNLRKKNFAVNNSYYQILNRIKNQEYKVAYIGIGYREKKGAFLLISYKFEKQPETSQEQEKVMGVDLGQVYLIYYSITNSHSRGDISLSYSWKDKIIGIWNRKKHLQKSLMEIRNLKKQGINDESIEKRYEKIVKELNSVREYEKNFMETLNKQIATKLIDIAVKEKVKTIVLEDLSLSNEEKNSLAFPKWNYYQLQSFIENKAQENGIQVKKINPAYTSQRCPSCGFIAFYKEMVRPKREKFTCPVCGFSSNADYVASLNIAEENIEEKIKARLISDIEKIEKVDKNNKVFTLFAIRNRIVKDLLKEFFNTNNGSSKKLLKRLEISNKEAYNTLIRDLKQFKVEYLDKRISNV

SEQ ID NO: 61660 - protein, 312 aa, Microcystis panniformis
MTELHHALKMSPDYQALPAKVSQLVLKQVEKTFKSYQKAKEQYKKSPDKFTGEPKLPRYKDKEKGRNVLTYNYQAISKKALKQGLIKLSGTNLEFKTNLKKVLEVRIIPKLGAYCLEIVYEQPSSSSQEGERYAFIDLGLNNLAAVTSNIPEFQPTLVCGKALKSCNQKYNKTLAKLKSELPSLQKTSKRIQGLTLKRNCQVDYYLHTASKYIIDKLLAHQINLLVIGHNQGWKQNLNIGDRNNQSFVNIPHSRFIEQLTYKANLVGIEVKTTNESYTSKCSFLDLESIQKQKSYLGKRIKRGLFRSSSGYF

SEQ ID NO: 61661 - protein, 377 aa, Rhodothermaceae bacterium
MEARRTYKYRLYRSKRDKHLVRQIEIASEIWNWGVALTRRYYSIYGKHLGYYRLKRQLAKRKKRDMGRWYGLNSQAGQNVIERLDKSYQRFFSDPKAGRPGFKKRTKYPSFTLTQTGWKLPEGQHSNRLRIGKHNFKFVLSRPIEGEVKTVTIKRDRSGDLWVCFSVAQDARPSMPQTGSAVGVDFGLKDFLVLSDGQTVESPQHLRASLKEMARLQRDLSRKKKGSNNREKARRRVAKLHRRIADQRRDFHFKAARAVLERHDFIAIEDLNLDGMKRLWGRKVSDLGFYSFVEILEHLATRNGKRVVKVDRYFASSKTCHDCGWVNKDLTLADREWVCKGCGCVQQRDLNAAKNIRDRALSHVVGDVRPAGRAVAA

SEQ ID NO: 61662 - protein, 548 aa, Elizabethkingia sp.
IFYFQDLFFKINWKQGFVKEGLNKEEANTAILLKKDDLFYLGIMDKNHNKIFRNIPKIKSEKTFSKINYKLLPGASKMLPKVFFSAKSIGYYEPNKEIINIRNHSSHTKGGKPQDGFEKIDFNVQDCRKMIDFFKSSIEKHPEWKNFGFQFSDTQSYNTIDEFYKEIEAQGYNISYSDIPESYINQLVDEGKLYLFQIYNKDFSPYSKGTPNMHTLYWKALFTEENLSNVIYKLNGQAEIFYREKSIDDENIIVHKAKEAIGNKNPNAIKKQSTFEYDLVKDKRYTVDKFQFHVPISLNFKANGSNFINQEVLSFLKNNPDVNIIGIDRGERHLIYLSLINQKGEILSQESFNTIKDEHHEIETPYHQLLSIKEKERDEARKNWGTIENIKELKEGYLSQVVHKIAKMMVDHNTIILLEDLNFGFKRGRFKVEKQVYQKLEKMLIDKLNYLVFKDKKNPFEPGGLYNALQLTNKFTSFKDLGKQSGFLFYVPAWNTSKIDPTTGFVNLFNTKYESIEKAKKFFNNFQSILFNKKENHFEFTFNYNDFT

SEQ ID NO: 61663 - protein, 1442 aa, Syntrophaceae bacterium
  misc_feature (816)..(824): Xaa can be any naturally occurring amino acid
MPRQDKPPVTQRAYTLRLRGADPNDKSWRDALWWTHEAVNKGAKAFGDWLLTLRGGLDHALVTTKVKVGKGKPDRDPTDEERKARRILLALSWLSVESKLGAPAGFIIASGQEAAAARNGKVIAALEEILTSRNVAKNEIGDWKNDCSASLSAAIRDDAVWVNRSKAFDEAVKSVGCSLTREEAWDMLERFFGSREAYLAPVKGSEDESSETEQEEKAKDLVQKAGQWLSSRFGTGKGADFSRMAKVYQKIADWAAACSPNKTGTDAIACLAASLSEFNPASNDLQGVLDLISGPGYKSATRNLLTQIAAKATVTQEDLTKLNETAAADKGKCETNTGSKGQRPYSDAILKNVESVCGFTYLQDGGPARHSEYAVILDHAARRVSLSHTWIKRAEAERRKFEEDAKKIDQVPNAAKDWLDQFCLERSGVSGALEPYRIRRRAVDGWKEVVAAWSKSSCGTSADRIAAARALQDDPEIDKFGDIQLFEALAEDDAVCVWHKDGDAAKPPDPQPLIDYALAAEAEFKKRHFKVPAYRHPDSLLHPIFCDFGNSRWDICFDVHKNMQTPFPRALCLTLWTGSEMKPVPLCWQSKRLARDLALGENAQNAETREVTRADRLGHAAANVPKNLPVKISGLFEQADWNGRLQVPRQQLEAIATRIAKHGFDDKAKEMRDSLQWLVTFSAKLQPQGPWCGFAATNHLKIDPQYWPHADANKARKGQARLILCRLPGLRVLSVDLGHRYAAACAVWEALTAEQVKVACQAARHEEPKESDLYLHLKRKMTKQKKGNQVEVEKTTIYRRIGADTLPDGKAHPAPXXXXXXXXXASGWGAAEKQKARLDALEKLGWKPVEKAEAQEDADAEEEEMSFRPSLSIDELMLSAVRTMRLALKRHGDYARIAYAMTAAYKPMPGDRKYYFTEAKELSANDDEATRANKHIEFIQDALLLWYGLTSSRGWRDHVAKQLWDSHITRLSGYQAPEEVGEEATSVERKNKQKENRERLHAVAMALVENEDLRETLHDAWKTRWEKDDGQWKTHLRRFKDWILPRGKAANDPTIRKVGGLSLARLAVLTEFRRKVQVGFFTRLRPDGTRIEIREQFGQSALAALEQLREQRVKQLASRIAEAALGIGRMMRPKGGKDPKRPDVRVDEPCHAIVIEDLTHYRPEETRTRRENRQLMTWSSSKVKTYLAEACQLHGLHLREVSASYTSRQDSRTGAPGIRCQDVLLKEFMRSPFWRKQVEQAEAKQADNKGDSRERFLCALDAKWKGKTVADWEKAGVIRLPARGGEIFVSADPASPAAKGLQADLNAAANIGLRALTDPDWPGKWWYVPCEPGSCRPIKDKVDGSTAVKPDQALRQPAQAQSGDARDKKKRGKKGAGKSKEVVNFWHDISSSPLECIESGEWREYIAYQNDVQSRVIRVLEKQIKGLDKQPHDGSGDDDIPF

SEQ ID NO: 61664 - protein, 812 aa, Unknown
  TPA ASM bacteria DHGN01000237.1_o
LVGGNDPFEEQLRRFQRRSTMPRQDKPPVTQRAYTLRLRGADPNDKSWRDALWWTHEAVNKGAKAFGDWLLTLRGGLDHALVTTKVKVGKGKPDRDPTDEERKARRILLALSWLSVESKLGAPAGFIIASGQEAAAARNGKVIAALEEILTSRNVAKNEIGDWKNDCSASLSAAIRDDAVWVNRSKAFDEAVKSVGCSLTREEAWDMLERFFGSREAYLAPVKGSEDESSETEQEEKAKDLVQKAGQWLSSRFGTGKGADFSRMAKVYQKIADWAAACSPNKTGTDAIACLAASLSEFNPASNDLQGVLDLISGPGYKSATRNLLTQIAAKATVTQEDLTKLNETAAADKGKCETNTGSKGQRPYSDAILKNVESVCGFTYLQDGGPARHSEYAVILDHAARRVSLSHTWIKRAEAERRKFEEDAKKIDQVPNAAKDWLDQFCLERSGVSGALEPYRIRRRAVDGWKEVVAAWSKSSCGTSADRIAAARALQDDPEIDKFGDIQLFEALAEDDAVCVWHKDGDAAKPPDPQPLIDYALAAEAEFKKRHFKVPAYRHPDSLLHPIFCDFGNSRWDICFDVHKNMQTPFPRALCLTLWTGSEMKPVPLCWQSKRLARDLALGENAQNAETREVTRADRLGHAAANVPKNLPVKISGLFEQADWNGRLQVPRQQLEAIATRIAKHGFDDKAKEMRDSLQWLVTFSAKLQPQGPWCGFAATNHLKIDPQYWPHADANKARKGQARLILCRLPGLRVLSVDLGHRYAAACAVWEALTAEQVKVACQAARHEEPKESDLYLHLKRKMTKQKKGNQVEV

SEQ ID NO: 61665 - protein, 1465 aa, Thermomonas hydrothermalis
MSEKTTQRAYTLRLNRASGECAVCQNNSCDCWHDALWATHKAVNRGAKAFGDWLLTLRGGLCHTLVEMEVPAKGNNPPQRPTDQERRDRRVLLALSWLSVEDEHGAPKEFIVATGRDSADDRAKKVEEKLREILEKRDFQEHEIDAWLQDCGPSLKAHIREDAVWVNRRALFDAAVERIKTLTWEEAWDFLEPFFGTQYFAGIGDGKDKDDAEGPARQGEKAKDLVQKAGQWLSARFGIGTGADFMSMAEAYEKIAKWASQAQNGDNGKATIEKLACALRPSEPPTLDTVLKCISGPGHKSATREYLKTLDKKSTVTQEDLNQLRKLADEDARNCRKKVGKKGKKPWADEVLKDVENSCELTYLQDNSPARHREFSVMLDHAARRVSMAHSWIKKAEQRRRQFESDAQKLKNLQERAPSAVEWLDRFCESRSMTTGANTGSGYRIRKRAIEGWSYVVQAWAEASCDTEDKRIAAARKVQADPEIEKFGDIQLFEALAADEAICVWRDQEGTQNPSILIDYVTGKTAEHNQKRFKVPAYRHPDELRHPVFCDFGNSRWSIQFAIHKEIRDRDKGAKQDTRQLQNRHGLKMRLWNGRSMTDVNLHWSSKRLTADLALDQNPNPNPTEVTRADRLGRAASSAFDHVKIKNVFNEKEWNGRLQAPRAELDRIAKLEEQGKTEQAEKLRKRLRWYVSFSPCLSPSGPFIVYAGQHNIQPKRSGQYAPHAQANKGRARLAQLILSRLPDLRILSVDLGHRFAAACAVWETLSSDAFRREIQGLNVLAGGSGEGDLFLHVEMTGDDGKRRTVVYRRIGPDQLLDNTPHPAPWARLDRQFLIKLQGEDEGVREASNEELWTVHKLEVEVGRTVPLIDRMVRSGFGKTEKQKERLKKLRELGWISAMPNEPSAETDEKEGEIRSISRSVDELMSSALGTLRLALKRHGNRARIAFAMTADYKPMPGGQKYYFHEAKEASKNDDETKRRDNQIEFLQDALSLWHDLFSSPDWEDNEAKKLWQNHIATLPNYQTPEEISAELKRVERNKKRKENRDKLRTAAKALAENDQLRQHLHDTWKERWESDDQQWKERLRSLKDWIFPRGKAEDNPSIRHVGGLSITRINTISGLYQILKAFKMRPEPDDLRKNIPQKGDDELENFNRRLLEARDRLREQRVKQLASRIIEAALGVGRIKIPKNGKLPKRPRTTVDTPCHAVVIESLKTYRPDDLRTRRENRQLMQWSSAKVRKYLKEGCELYGLHFLEVPANYTSRQCSRTGLPGIRCDDVPTGDFLKAPWWRRAINTAREKNGGDAKDRFLVDLYDHLNNLQSKGEALPATVRVPRQGGNLFIAGAQLDDTNKERRAIQADLNAAANIGLRALLDPDWRGRWWYVPCKDGTSEPALDRIEGSTAFNDVRSLPTGDNSSRRAPREIENLWRDPSGDSLESGTWSPTRAYWDTVQSRVIELLRRHAGLPTS

SEQ ID NO: 61666 - protein, 1000 aa, Unknown
  Microbial Source - Accession No. Ga0063162_1014580
  misc_feature (963)..(963): Xaa can be any naturally occurring amino acid
MSQNPAPPVTQRAYTLRLRRGPGKCPACQKDACDCWRDALWATHEAVNRGAKAFGDWLLTLRGGLCHTLADIDVPAKGKKPARNPTKQEQRDRRVLLALSWLSVEDERGAPNGDGLRIATGKEPADKRGEAVKAALRNILGNRGVNASEADSWVKDCEASLAASIRDDAVWVNRSAAFDAACNGQNLRQAREDARTLLWYLLTDDYLVLPKANKKESEDTGEDQEEGQDEESAVDEAAEAVAKSAKGAGQRTRHLFSHIFGRQSTQGFGKPPCQLDLRDYWQGHLKPLIEAAGIPLSDPNVTAKKGAAPSPTELHREMFSKAASRLAQIWTKQKQQEVARQLRAAADDELKELESDQTYSKALDLLEAYCRERGQITGSLEEYRINPRAVEGWERVVAAWEGIKSSDPTEAQQRRIDEVKRLQDESDDKKFGDNNLFVSLAEPEYEPVWQHKGQATPSVLKTFVKGWKARSDAARLKVAAFRHPDPYSHPVFCQFGVSRPWIKHGRLDPKGNAGTVQMLLWTGSKADKVQISAVSKRFDAEIGSASESTVIAARQVARRHRLAVAAVSTSGAGVNTIRVAHVFDQQEVRSRERAVEHGIEDENGDDESQNARKKGPIWNGTLQADRQALKAIGKLASSQKAPQAYRCLQWRLTVALELQSSGPWYDYVRNATDQSPFQRTVRKDEDKGKKRKKGTKYLFLDGWPFEEVNNPLKVNRVDTLLLADKRSARGREAKIVLSRLPGLRVLSVDLGHRYAAACAVWEALPNAAFKGEVAGLKVRAGGPGEDDLYLHVEKPGDDGKTKTVIYRRIGPDSLPDGQFHPAPWARLDRQFLIRLQGEDEEAREASNEEIWKVHQLEAELGRTVPLIDRMEKGTFGQTEKQKQRLEALRGLGWTPATTNVPPGAAGEEEGETRIVSRSVDELMFAAVRTMRLALRRHGDRARIAFAMTGDHKPLPGGRKYYFXMTCSRRGAGKMMRPRSSGSKASPPCRDARRRRRSRKI

SEQ ID NO: 61667 - protein, 428 aa, Unknown
  Microbial Source -  Accession No. Ga0065719_107896
  misc_feature (231)..(231): Xaa can be any naturally occurring amino acid
  misc_feature (265)..(265): Xaa can be any naturally occurring amino acid
  misc_feature (277)..(277): Xaa can be any naturally occurring amino acid
  misc_feature (287)..(287): Xaa can be any naturally occurring amino acid
  misc_feature (298)..(298): Xaa can be any naturally occurring amino acid
MKRTVPIKLPADDSLVKTIQLFTQIANEVSKQVWELKTPIRNFVTLYKHCYHNLRTKYPHVNSRFIGYILRIVAGRYSPKNFRKLKEAVVFKRDFALLDKRLFTIKDGHITLWTIDGRKEFPFVLPKVGRFLELWKRKEDVDSITLKVRNGEVIGFLCLTIPESEPKDAKHFVGIDIGASYPLIAVRDDGAIFCPDYSTFHKKRQHFFELRRQLQRKLTEKRLAKKDAKSXIRALRRLSGRQRNFTKQFLRWVVCRLFDWAGDAXIIMENLHLPQGXKVKNAKALNXTLSLLPAGIIXQAIVNKAAELGLQVIFVPPAGTSQTCPRCQNKGKRPNRDLFVCPYCGYEEHADIVGARNILRKGLERFSQSGAETGDKPVGLCQPHESLPADEAGGGNSTIVLQKRLQSTLKKLPATEGRLQPSLFSTEN

SEQ ID NO: 61668 - protein, 428 aa, Unknown
  Microbial Source -  Accession No. Ga0065719_116807
MRRTVHIYLPMDEDLVATIRLFTQIANELSKKVWEMKEPIRHPLALRKRYYHALRAQYPQVASRVLEYIIKIVAGCYSPKKFRKLDNAVEFKKDFALFDKRLFKIEGDQIVLWTINGCKRYPFVLPKVGRFQKMWACKEDVDSITLQIKKERIVGHVCLTVPAGKPREVKHIVGIDIGASYPLIAVRDDGAVFCPDYSTFHKKRQHFFELRRQLQRKLTEKRLAKKDAKSVIRALRRLSGRQRNFTKQFLRWVIRRLFDWAGDAVIVMEKLHLPQGKKVKNAKALNRTLSLLPAGIIKQAIVDKATELGLRVIFVPPAGTSQTCPRCQNKGKRPKRDLFVCPYCGYEEHADIVGARNILRRGLERFSQSGAETGDKPVGLCQSHESLPADEAGGGNPIIVPPKRLQSTSKKLSATEGRLQPSLFFAEN

SEQ ID NO: 61669 - protein, 1497 aa, Unknown
  Microbial Source -  Accession No.  Ga0067045_1002454
MPQQTNLPDTQRAYTLRLREADPNDLSWRTALWKTHEAVNKGAKAFGEWLLTLRGGLDHTLADTQIKQKDPSGRNPADEKRKARRILLALSWLSVESEIGAPADYIIASGKEAAENRNRKVIASLEEILKSRNLAENEIEDWKADCSASLSAAIREDAVWVNRSKAFDDAVKLAGCSLTREEVWDMLERFLGSRDAYLAPVKGSEDESSETEQKDEAKDLVQKAGQWLSSRFGTGKGADFSRMAAVYGRIAAWAGKNKSNGSVTVDDLVKELQQHFDTTESKATAGINWIFELSSYPGHSPNPVHELLQNGPKLGRDKLDNLEKKANTRAESCRSKIGSKGQRAYADAILKDVEAVCGFTYRIDENGNAVSVADYSRYDDDYKWGPARHFEFAVILDHAARRVSLAHTWIKRAEAERRRFEEDAQRIANVPPPVKEWLDEFCRKRSQESGALEDYRIRRRAVDGWKEVVAAWSKADCKNAEDRIAAARALQDDPEIDKFGDIQLFEALAEDDAVCVWHKDGDAAKTPDPQLLIDYVLAAEAEFKKRHFKVPAYRHPDSLLHPVFCDFGKSRWDICFDIHKNPQTPFPRALCLTLWTGSEMKPVPLCWQSKRLARDLAIGQDIESDEAVEVTRADRLGRAASNVTKSDAVKISKLFEQKDWNGRLQAPRQQLEAIARYVEKHGWDQKAEKMRDRIQWLVTFSAKLQRKGPWYDFIKNSFDKTAFIRIHKRGEKKGTEYISQDGWPHEEANESRQGLARLILSRLPGLRVLSVDLGHRYAAACAVWETLSSKDMKKACQAAEHEEPKESDLYLHLKKKVKKQKKGKEVEVEETTIYRRIGTDTLPDGTSHPAPWARLDRQFLIKLQGEEEGVREASNEEIWKVHQLEVELGRTMPIIDRLVKAGWGSTEKQQARLEQLKRLGWTPTVVPEAEAGEDADEYAIRWPSLSVDELMSSAVRTMRLALKRHGDRARIAHYIITDEKTKPGGIKEKLDENGRIDLLQDALVMWHDLFSSRGWRDNAARQLWDDHIAKLSGYRAPEEIGEESSGSERRNKQKENREKLYDVAKALAQDVTLREALHDSWKNRWENDDEQWKRQLRWFKDWVLPRGKHASDPTIRKVGGLSLTRLATLTEFRRRVQVGFFTRLKPDGIRVETKEQFGQSALDALEHLREQRVKQLASRIVEAALGIGSEGGKGWNKRKRPQERIEDPRFAPCHAVVIEDLTHYRPEETRTRRENRQLMTWSSSKVKKYLSEACQLHGLHLREVSASYTSRQDSRTGAPGIRCQDVPVNEFMRSSFWRKQVAQAEKKEAEGKGDARERFLCSLNAKWKDKTVKDWEKAGVIRIPLNGGEIFVSADANSPVAQGIHADLNAAANIGLRALTDPDWPGKWWYVPCDPNSFMPIKDKVEGSAAVKPDQALRQSAQTQNGDAATDKKKGGRKRAGKAKEIVNLWRDISSSPLESIEVGEWREYAAYQNEVQYRVIRVLEEQIKGRDQANTR

SEQ ID NO: 61670 - protein, 1469 aa, Unknown
  Microbial Source -  Accession No. Ga0067045_1004962
MPQQDKPPVTQRAYTLRLRGSDPSDTSWRKALWQTHEGVNKGAKAFGDWLLTLRGGLDHTLADTKVKGGKGKPDRDPTDEERKARRILLALSWLSVESKIGAPAVYIIASGKEAAEDRNGKVVAVLEEILRSRNVAENEIGEWKNDCSASLSAAIRDDAVWVNRSKAFDEAVKSVGCSLTREEAWDMLERFFGSRDAYLAPAKGSEDESSETEQEDKAKDLVQKAGQWLSSRFGTGKGADFCRMADVYGKIAAWADKAQAGMTGNDAINNLAAALNESTLASNDLQGVLGLISGPGYKSATRNLLNQLATKTTVTQQDLASLKDKATKDAQKCNQNTGSKGRRPYSDAILKNVEAVCGFTYLQDGGSARHSEFAVMLDHAARRVSLAHTWIKRAEAERRKFEEDATKINNVPSAAKNWLDEFCRKRSETSGALEPYRIRRRAVDGWKEVVAAWSKSSCSTSADRIAAARALQDDPEIDKFGDIQLFETLAEDDAVCVWHKDGDAAKAPDPQPLIDYALAAEAEFKKRHFKVPMYRHPDALLHPIFCDFGCSRWSIKFSLHEAKKNAEKKRKKKDDVQQPDSPRSLWMTLWTGKEMKLVPLRWQSKRLARDLALGQDARKDGASEVTRGDRLGRAASNVTKSDDVKISGLFEQADWNGRLQAPRQQLEAIARRVNNHGWDETAKKMRDRLQWLVTFSARLQPQGPWCEFAEKLQLRINPQYWPHADTNKDRKGHARLILSRLPGLRVLSVDLGHRYAAACAVWEAVNAEQVRGVCQIAGHEEPKASDLYLHLKRKTTKQKKGKEVEVEKTTIYRRIGADTLPDGTPHPAPWARLDRQFLIKLHGEDEGTREASNEEIWAVHQMETVLGRSVPLIDRLIAAGWGCTEKQKARLEELNKLGWTSVPKAESSGEQEENEEADVYKPSLAVDELMSSAVRTMRLALKRHGDLARIAHYLITDEKTKPGGTKEKLDENGRVDLLQDALVMWHDLFSSRGWRDEAARQLWDEHVAKLSGYKAPEEIGEESSGPERKKKQKENREKLYDVAKAMAQDVILRETLHDAWKKRWKDDDERWKKQLRWFKDWVLPRGKHASDPTIRKVGGLSLPRLATLTEFRRKVQVGFFTRLQPDGTRAETKEQFGQSALDALEHLREQRVKQLASRIAEAALGIGRMRRPMGGKDPKRPDVRVDEPCQAIVIEDLTHYRPEETRTRRENRQLMTWSSSKVKKYLAEACQLHGLHLREVSASYTSRQDSRTGAPGIRCQDVPVDEFMRSLFWRKQVKQAEAKQSENKGDASERFLCDLNAKWKDKTVADWEKAGVIRVPLRGGEVFVSADPNSPAAKGLQADLNAAANIGLRALTDPDWPGKWWYVPCDPASFKPTPDKVKGSAAINLDMPLKDASVVSGDATMKKAGKAKSQSKEVVNLWRDVSSREVSTTDVAWEVYSAYQNQVQTRVVNILRRSACPKDNREKQS

SEQ ID NO: 61671 - protein, 888 aa, Unknown
  Microbial Source -  Accession No. Ga0068669_10235961
MFNKKKGYRLHLERIIYSGGEITRSIKYLLASHSDSQKNKELLNNFSQDLYNDDLKIRGCLNLNDLVNNNQIYNLADFWIDSLRAGVIWQSSASSLIDFIKRLNHQETIGEKIFNNANERIKRFFNSEKFIKEIILSEPKRISSKKQAFYNSLFDILKDEFKKQEKNEKIIIDNKAEQLIKEIVDAFYSNDGVFLMEGEEKQNKFWQENFNIDKNMIKKEKEDILKDVGDITAFIHPPLIILKGDVSQLIDERKKYFSEKDLEEILGLSDNFNAFSHYFNKFFLLLYQDKQEKIFECYQKIFSFSQEDRKRIKDALDFLLEKSKLLGLPKIVNSWSDYRSVFGGKIKSWFSNYLNREDKAKKQEKKIKEGLEKVNKFLLDFIQKNQVDSDLQQEIKFYYDKLNQFINSYQNQEFFHQQELFLLFSDLLAEYREKLNRFYQKYLSDKEKEEKKVDEFPLFKDLFEKYEGPISFYGKTKLEDNKKIIDLTFKTIKVGLNLIRRLLIDLYNSSDFKNSDNNNQERDLRRIFEFLLNKIPATKTFREKYLSILKDNFDQQTYKEMTLKPSRYTFVENIYSRENRKLIELPSKNFEELLSKIIKDLTDFSLSFKNDDLFVDIYLLSDLVELAKTLISLVINYSNKSQFDSYKNELIDDTYQKAKKYLETFKISFFNSKKEANYFYQTRVLSELKGAVALFSKKYYQAKYNIQILKSNEIFPLFVKFSDLLKKEEINDINKLKLIFKKPYRYLIALKKIKFKKNQQQSSVIHLDKKNKDLVLISPQDEDFLFKLTSSFYQLQFLDRFVYPVKKWLNVDITLSEWSFILEKKYKINWDFNSGKPEFSEIDSRLYLNIPFKIKAINQQKILKPKELFLGIDVGEYGVGYALVNFKD

SEQ ID NO: 61672 - protein, 1335 aa, Unknown
  Microbial Source - Accession No.  Ga0068707_1002163
MKSLAQFQNLYALQKTLRFELKPEGHTRETFNRWLEEIEKEQASENENIVYQDLLRAKKYEKIKIILDEYHKDFIEQALAYANLTELEKYEELYRKSNRTSEEEEEFENTKESLRKQIANIFIKNPNKTVQERWKFLFSKKLIQNELIVWVKGNYELLSEKLKNEFPDESSIISTIEDFKYFTTYFRNYHENRKNLYSNEDKFSTIAHRLIHENLPKFIDNIAIYQKAKAVLNINEVEKELGLPEDTLDKIFSLDFFSKALTQKGIDQYNYFLGGKTENEVKKIKGLNEFINLYNQQQQDKNQRLPFLKVLYKLPLFERTSTSFRFEPIENDRDLIERIGKFYYNDLKQYRDDSQGDTTDILSGINTLLRHVHDYRDGLYVNGGITLTQISQKIFGSWSYINNALAYFYDTYIDASGVDHQGERKPKKQKQIQEKTKWLKQKQFPVILVEKALSEYKSIETNEDLKTRISDTTLCDFFKRCGNDDNGQDLFDRIEARLREKNEEGYSLEDLLKKEFTTERKLMQDKTKTLLIKNFLDVIQGDKDDITAGLLHFVKCLIPRTEISEKNELFYSGMEKYLNILSEVTPLYNKARNYLTQKPYSIEKVKLNFENSTLLDGWDENEESDNSCVLLRKRGYYYLGIMNKKHNMIFDRKIYPKATEGEAYYEKMIYKLLPGAYKMLPKVFFSEKNIDYFKPSEEILRIRNTASYSKNGQPQEGYQKASFSIEDCRKYIDFFKKCIANHWDWQKFNFNFSPTEYYQSIDEFYREIERQGYKIDFVKIPESYINQLIKENKLYLFKIYNKDFSEKKKSKGKDNLHTLYWKMLFDEKNLKDVVLKLNGEAEVFFRQKSILYNEEIWNKGHHYSELKDRFSYPIISNKRYAEDKFFLHVPITLNFKADGINNVNNMVNEFIKDNRDIHIIGIDRGERHLLYVSVINQKGDIVEQCSLNEIVTEYNGKIFKKNYHEELDNLEKERDRARKDWQTIANIKELKEGYLSHVIHKISKLILKYNAIVVMEDLNSGFKRGRQKVEKQVYQNFEKQLIEKLNYLVLKESNVDEPGGVLRAYQLANKFETFKKLGKQSGIIFYVPAAYTSAIDPVTGYIQYLYPLKQADSVEKARKFYSQFKRISYNPHKQWFEFSFDYNDFNIIYHGKSSWTICTTNTERYMWNRLLNNGHGGEELVYVTNELELLFGEYNIIYGDGKDIKQQITDVQDIDVDRTAKQFYKRINELLNLTLKLRHNNGKKGADEEDYILSPVEPYFDSRFESRKPSMQQTLPINADANGAFNIARKGLLLLERLNQLGVEEFEKTKKSNNKKTQWLPHELWVEYAQNHTRK

SEQ ID NO: 61673 - protein, 1231 aa, Unknown
  Microbial Source -  Accession No. Ga0068707_1009867
WVSTNFGTGEKSDADLILKKLNILVAADLIRFAKQSKVSFIKEMCNLLGIQGEDVDALRTGIGWKTGRKSKGRLAIDSLPEQVTSESIQRLQQKFEEEVSDKQRKTRDVPGWMPSFRQAIEKECGMPFRGDRDHIGEFAVMLDHAARRVSQAHSWIKRAEAERRRFEEDAKKMKVVPEKTKEWLDFFCSERSDTSGALEPYRIRKRAVDGWKEVVAAWSKADCLTTEDRIAAARALQDDPEISKFGDIQLFEALAEEDAMCVWHKDGDPANAPDPQPLIYYALASEADFKKRQFKVPAYRHPDALKHPVFCDFGKSRWAIDYEIHRNAKTPSPRALTLTLWTGKEMKPVSLRWQSKRLAHDLNIKSDGRGEGASLVTRADRMGRAASGVSKDDEVEIAGLFETKEWNGRLQAPRCQLEDIARHVDKHGWDSKASVMLNAVQWLVTFSARLQPQEPWREYAKNNENVNLNLDKKNRQPHTDENKNRKGRHAKLVLSRLPGLRVLSVDLGHRYAAACAVWETLSIESFRKEIRGRTIIRGGKDAEALYCHTEHEENGNKHVTIYRRIGADKLPDGATHPAPWARLDRQFLIKLQGEGEEAREASNEEIWAVHRMESELGRAVPLIDRLVAAGWGRTEKQAERLEALKRLGWEPPLATAPVVEDASGEDADAYRPSLAVDELMSSAVRTLRLALKRHGDRARIAYAMTATYKSMPGDRKYYFTKAEELSSNDDQATREEKHIEFILDALVLWQSLISSRGWRDEAAKLLWDKHIAKLPVYEAPEELGEDITSVERKKKRDNNREKLYGVAKALVQDRPLRNELHDAWNKRWEQDDARWREWLRWSRDWILPRGRQAGDHSIRKVGGLSLNRLATLTEFRRKVQVGYYTRLRPDGTRKEIGEAFGQKVLDDLEQMREQRVKQLASRIVEAALGIGSEDRAHWEGGKRPRQRIDDRRFAPCHAVVIENLTHYRPEETRTRRENRQLMTWSSSKIKKYLKEACQLHGLHLCEVTASYTSRQDSRTGAPGIRCQDVAVREFMLSPFWRKQVKRAEAKQAENKGDSRERFLCELNAKWKNKTEVEWRNAGVVRIPLRGGAVFVSADRRSPASKGIQADLNAAANIGLRALIDPDWPGKWWYVPCFSSSFIPTDESTKGSEAITGKPLKERPTDDTGKMATRKRSGRSSRSSGGVVNLWRDVSSLPVSADKGPWEEYQPYWNKVQERVVRILHDNMVDSG

SEQ ID NO: 61674 - protein, 850 aa, Unknown
  Microbial Source -  Accession No. Ga0068707_1024093
WSDYRSVFGGKIKSWFSNYLNREDKAKKQEKKIKEGLDKVNKFLLNFIQKNQIDPDLQQEIKFYYDKLNQFINSYQNQEFFHQQELFLLFSDLLAEYREKLNRFYQKYLSDKEKEEKKVDEFPLFKDLFEKYEGPISFYGKTKLEDNKKIIDLTFKTIKVGLNLIRRLLLDLYNSFDFKNSDNNNQERDLRRIFELLLNKIPATKTFREKYLSILKDNFDQKTYKDITLKPSQYTFEENIYSRENRKLIELPSKNFEELLSKIIKDLTDFSLSFKNDDLFADIYLLSDLVELAKTLISLLINYSNKSQFDSYKNELIDDTYQKAKKYLETFKISFFNSKKEANYFYQTRVLSELKGAVALFSKKYYQAKYNIQILKSNEIFPLFVKFSDLLKKEEINDINKLKLIFKKPYRYLIALKKIKFKKNQQQSSVIHLDKKNKDLVLISPQDEDFLFKLTSSFYQLQFLDRFVYPVKKWLDVDITLSEWSFILEKKYKINWDFNNGKPEFSEIDSRLYLNIPFKIKAINQQKILKPKELFLGIDVGEYGVGYALVNFKDEEIKIIKSGFIRSKNIASIRDKYRLLQDRSKKGVYFSSTNVVQEVRENAIGEIRNQIHDILIKNNADLIYEYNISNFETGSGRITKIYDSIKKSDVYAENEADKSVIQHVWGIKKSIASHLSAYGSSYTCSNCGRSIFSFSENDICSSKVIKRDGNIITIQTPKGEVFAYSKDKKFNVGYSFSQEKSKEEMKNLFMKIVKAYARPPLLKSEVFLAQKKLDKEFLEKFKKERGNSAIFVCPFVDCQSLADADIQAAFIMALRGYLKKKKGKDINYLEESLNYLQNFKGKINFSNLLN

SEQ ID NO: 61675 - protein, 377 aa, Unknown
  Microbial Source -  Accession No. Ga0071330_1110381
VRKTIRIQLPKDADLLATMRLFREIANEVSKMAWEIREQLKGKFDLRRQCYPLLRSRYTHVNSRVLEYIIRVVNGCYSKKKRRKLSEPVVFRRNFALFDKRLFKFGDGNITLWTIAGRKNFPFTFAPVKRFKEYWEKKVDVDSITLKESDRCIVGFVCLTVPEPPFKVSHHFVGIDIGAECPLVAVRDDGAIFFPDFSKFHKKRKQFLQRRRYLQSKLAAQRLLGKDAHNTIRELKRLSGKQRRFTKQFLNWVINRLFNWMGDAVIVMERLKLPQGKKVKNAKALNRTLSLMPSGIIKQVILEKAKERGLRVIFVNPAGTSQTCPKCGGKGERVSRDLFRCHVCGFSCHADIVGAKNILKRGFERVVKQGAETGDEP

SEQ ID NO: 61676 - protein, 270 aa, Unknown
  Microbial Source -  Accession No. a0072682_101461
LKNLPLHPMPFHNQSVWIENKNGKFWIHFKTKQGETVCYLQVPAKYRSLIEKASGEKNPILGQVEIVEDQKYGWINCHITLRLPKPEPYEPRGWIGVDVGWNKLATSILATCNPHLRFSNPSIHGKDFKTRIIQLKYLLKQYARKGKAWKKWDYRLKHTIKYAVGSVAKEIVSKAKNLKAGVAMEKLTFKSTTKGYLVPRYKLMIAVKTLCERKGIPFMVVPAQNTSVTCPYCGYKDKKNRNGERFKCLNCGYQADADIAAAMNIAKRAL

SEQ ID NO: 61677 - protein, 456 aa, Unknown
  Microbial Source - Accession No.  Ga0073928_10004924
MKIIRTYKFRLRPTAAQAARMSSWCAAVRHVYNAALQQREWYGRAVGTDPHGRDSRFNSFRQGRELKDIRAAFKWIEDAPADILMAAVRDLDKAFDAFFASRARYPTPRRADQNNSFALPVFVQGKARPKGYFVNVVFGQDSVRLPKFGRVRWVRHRKIRGRPKTANVVREGDRWFICISSEIEIADRSPAAAAVGIDFGVAIPLATSDGETLSLARTAPRIAQREKRLRRELARCKRGSRRRSARKRRLSEHTRRTAARRKGRLHAITTDLARKYGLIVIEDLRVANMTASAKGTVDEPGSNVRAKAGLNRSLLDLSLHAFRALLTYKVAARGGTLIAVNPRNTSRTCAACAHVDKDSRRSQAIFVCVACGHEANADINAAKIILARGISQSSATVLGRRKAPSEPRQRPATPKSCGSPAMGRDQHSKFRGESAVSAAESAGCSSSGCGPRRCRW

SEQ ID NO: 61678 - protein, 968 aa, Unknown
  Microbial Source -  Accession No. Ga0073932_1022770
MLKSYDYFTKLYSLQKTLRFELKPIGKTLEHIKNSGIIESDETLEEQYAIVKNIIDKLHRKHIDEALSLVDFTKHLDTLKTFQELYLKRGKTDKEKEELEKLSADLRKLIVSYLKGNVKEKTQHNLNPIKERFEILFGKELFTNEEFFLLAENEKEKKAIQAFKGFTTYFKGFQENRKNMYSEEGNSTSIAYRIINENLPLFIENIARFQKVMSTIEKTTIKKLEQNLKTELKKHNLPGIFTIEYFNNVLTQEGISRYNTIIGGKTTHEGVKIQGLNEIINLYNQQSKDVKLPILKPLHKQILSEEYSTSFKIKAFENDNEVLKAIDTFWNEHIEKSIHPVTGNKFNILSKIENLCDQLQKYKDKDLEKLFIERKNLSTVSHQVYGQWNIIRDALRMHLEMNNKNIKEKDIDKYLDNDAFSWKEIKDSIKIYKEHVEDAKELDENGIIKYFSAMSINEEDDEKEYSISLIKNINEKYNNVKSILQEDRTGKSDLHQDKEKVGIIKEFLDSLKQLQWFLRLLYVTVPLDEKDYEFYNELEVYYEALLPLNSLYNKVRNYMTRKPYSVEKFKLNFNSPTLLDGWDKNKETANLSIILRKNGKYYLGIMNKENNTIFEYYPGTKSNDYYEKMIYKLLPGPNKMLPKVFFSKKGLEYYNPPKEILNIYEKGEFKKDKSGNFKKESLHTLIDFYKEAIAKNEDWEVFNFKFKNTKEYEDISQFYRDVEEQGYLITFEKVDANYVDKLVKEGKLYLFQIYNKDFSENKKSKGNPNLHTIYWKGLYDSENLKNVVYKLNGEAEVFYRKKSIDYPEEIYNHGHHKEELLGKFNYPIIKDRRYTQDKFLFHVPITMNFISKEEKRVNQLACEYLSATKEDVHIIGIDRGERHLLYLSLIDKEGNIKKQLSLNTIKNENYDKEIDYRVKLDEKEKKRDEARKNWDVIENIKELKEGYMSQVIHIIAKMMVEEKAILIM

SEQ ID NO: 61679 - protein, 759 aa, Unknown
  Microbial Source -  Accession No. Ga0079044_1002244
MPRRRPRVPRHTRSRKRGASERPTRRFRAAMTGPAARRRIGGGDERACAEAWYRRLGDRPRYGPEAIRRKSLRRGVVSATPCRLHTAPAEKPATRRRGVADAHRKCDNVTMGPPAEAPGPRRDTAHSTEEEIASMRVYRYGAKLRGPLDPVAEEQVELANRFWNELVDMHRKYGELLQKAQEEASPALAALRAEMAALAEEKIRLRGLIKKSRQKARGNVPADPAIKEQLRAVSQRIKELKPIVKMEKEKAKTASSDERHRLSEQQKLEKKRLRQKYAALGLYWSNYNAVLQGFDTAVKRELETQGRLRVRKHAPSGAAVWTVRIQHPTGAREYTWADATRGDPSKPFSIIMPDSEREEFTTHDGRTLSRRRLPVARLRVRAERAKTPDGTWVEFGGHHIDVPFYMHRQPPPTARVVMARLVRKRIADCYEYHLCITVDEPPAPKRSGTAAGVDLGWRRLPDGAVRVAYVAGEDGAKGALAVPQSTLDRLAHAERLQGIRDSALEGIRSDFVAWAKPLLGNPALPDFVAAALAGDREHGIPPLASWRSPRRFARLTGQLVRWAADHPNQAAALPDWPAWNRRIQSWNRQDKPLWRTLSFLRVKAIAHRNEQYRIFAKRLAERYAYIVLEDMDIQDMNRKPQAEQAPETSQQKLRHLARAAAPAAVRSAIENASWRWGSTFVKVDPANTTRRHAPCGNLVEQNYAESVMVYCPECKVWYDQDENAAVNLLLRIRENPPPAPTNPKPANGSRWQRAKAKAR

SEQ ID NO: 61680 - protein, 348 aa, Unknown
  Microbial Source -  Accession No. Ga0079639_1009487
VEETIKLTVRAVIPPRDVGLRKLMREYKAYKKALIPKVKQAVRHVIKDRNLRIYAQQKWMVDKKLNEYLKNLPFHPMPFHNQSVWIENKDGKFWIHFKTKEGEAVCYLHVPAKYRDLIEKACGEDNPVLGQVELIEDKKYGWVNCHICLRLPKPEPYKPKGWIGVDTGWNKLATSIACTCNPHILFFKPTFHGKKFKKQIIQLRHLLKQYARKGKAWKKWDYRLKNTIKYAVGVVAKEIVSKAKKLKTGVAMEQLTFQSTTKGYLVPRYKLMIAVKTLCEREGVPFKLVPAQYTSITCPKCGFVDEKNRNGEWFKCTKCGYQTDADLAGAMNIAERALTATQMEGRMA

SEQ ID NO: 61681 - protein, 527 aa, Unknown
  Microbial Source -  Accession No. Ga0099914_10727
NFDNLLELINLQKGYLFQIYNKDFSEYSKGKPNMHTMYWRALFDEENLKDVVYKLNGEAELFYRKKSIDDDKKIIHKANEKLANKNPLNPKRESKFSFHVPITMNFKADGNDYINQDVLKFLKNNPDVNIIGLDRGERHLIYLTLINQKGEILDGLQFSLNEILNTYKNSKGENVELKTSYHTLLDAKEKERDEARKTWKSIENIKELKEGYISQVVHIIAKMMVEFNAIVVMEDLNFGFKRGRFKVEKQVYQKLEKMLIDKLNYLVFKDVEESKSGGLYNALQLTNKFTSFKEMGKQSGFLFYVPAWNTSKIDPTTGFVNLFDTRYESIEKAQQFFKKFKSIQYNSQKQYFEFAFDYSEFTNRAEGSKTNWKVCTQGDRIITFRNPESNNQWINKKVNLSQEFEDFFGKHNVIYGNGENFQPQIEAQTTKEFFEKLLQLFKLTVQMRNSKSDEDYLISPVINKTGEFYDSREANDTLPKDADANGAYHIAKKGLWVLEQINETEDYKKLKLAISNKEWLQFVQKNN

SEQ ID NO: 61682 - protein, 956 aa, Unknown
  Microbial Source -  Accession No. Ga010790_149349
MPQQDKPPVTQRAYTLRLRGADPSDTSWRKALWQTHEGVNKGAKAFGDWLLTLRGGLDHTLADTKVKGGKGKPDRDPTDEERKARRVLLALSWLSVESKLGAPVDYIIASGKDAAEDRNGKVVAALEEILKSRNLADNEIGEWKNDCSASLSAAIRDDAVWVNRSKAFDDAVNSIGCSLTREEAWDMLERFLGSRDAYLTPVKGSEDESSATEQEEKAKDLVQKAGQWLSSRFGTGKGADFSRMAAVYGKIAAWAGAHSPNKDAIASLATALSEFTPASNDLQGVLGLISGPGYKSATRNLLTQIADKTIVTQEDLKKLNETAAADRGKCETNTGSKGQRAYSDAILKDVESVCGFTYRVDENGNAVSVSNYSLYGDDYNWGSARHSEFAVILDHAARRVSLAHTWIKRAEAERRRFEDDAQRMANVPGPVKEWLDSFCLERSGMSGGLEPYRIRRRAVDGWKEVVTAWSKSSCSTSADRIAAARALQDDPEIDKFGDIQLFEALAEDDAVCVWHKEGDAAKAPDPQPLIDYALAAEAEFKKRHFKVPAYRHPDALLHPIFCDFGKSRWDICFDVHKNAQTPFPRALCLTLWTGNGMVSVPLCWQSKRLAHDLALGQDVQNDGSSEVARADRLGRAASNVTKSDEVKISGLFEQADWNGRLQAPRQQLEAIAVVRDNLSLSDQERERRMSGMMDRIRWLVTFSAKLQPQGPWCEFAEKLQLRINPQYWPHADTNKDRKGHARLILSRLPGLRVLSVDLGHRYAAACAVWEAVNAEQVKKACQVAGHEAPKASDLYLHLKRKATKQKKGNQVVVEETTIYRRIGADTLPGGTQHPAPWARLDRQFLIKLQGEEEGVREASNEEVLKVYQLEAELGRTAPIIDRLVKAGWGQSGKQRTRLEALRELGWKPASEAAGVSDGMDADEGEVRKPSLSVDELMSSAVRTMRLALKRHGDRAR

SEQ ID NO: 61683 - protein, 540 aa, Unknown
  Microbial Source -  Accession No. Ga102924_1013089
MPFGNAARASRAYEYGVRFTAGEDLALLALREKVRLWNCLVAVDHDLRERRDALIGAYLTDHPPIDDTPVAAKAARKAAFADAGVKAALAELDREGQERSRLLGHESPLWWCNRDAVRTTWLQHRRDPEPSRFHSARRAEGTLIVRRSGGWTVASLLRGGDRFIGLGAVDPLGWSHSVRAERRRRCRVPLTLRIGSTPDREPIAVELTLFFHRPLPEGGNVQEVRLAATPLADTVRWTAVFVVALPEADAAPEPTAPAGTRAALDLGWRARPAGLRTAVWHDAGRWGELSLPEKDFAAQLGKVDDLRSIRDQHLNVAKAALAAWVKRQPSLPEWLGESTKTLGQWRSQGRLAGLVRRWARQRFEGDADIWPELAAWQAQDRHLWLWQEHLRDQVLHRRRECYRVFAADLARRYREVVLESVDWSKLARQGKELPPLARWHRVVAAPSILEEAIEHAVGREGGIVRRAEPAYTTMLCHVCGSIEAVDGVALYHVCVACREGGVHTRWDIDVNATRNLLANRPAAGKGGGFATDGPEERAGA

SEQ ID NO: 61684 - protein, 712 aa, Unknown
  Microbial Source - Accession No.  Ga0103818_10095
LEPHSPVLLLRPCPDLGRTGNRARLGGQPREPGRRRRPLQSFRREPVERNGEVSAPVQPEPVPSRRSLARLHPGDPDGARSRAVPDGLRRRTCRPGHPPHDGMVLPVVGEKPNNQGDQMDHVVEKDPTGDPIGLQFVVRQYGLLDPLDWDQDCQEHLWRENKFWNTLVELEKKHRDAYFRLTGSDPELKEIEDALSALMEEKEARIAEKKALRQAARKKAGVDTSAQDLRIEEIRPEIRRLSGLAKETRKKTRERMKPEIDALERTRREDVKIARNASGLWWGNYNAVCASYETARVRAMRTGGDLRFHSFDGTGRFTCQIQGGMTVSEFFSGDRNSVVSADPVSPDAFYHPSRGARRRAARTTLRITVYTTKDENGKYVRRILSFPMILHREIPSDVLIKQVVVTRKRVGATFRWTVTLTGTRSGSPRIVPGIPGLCGIDLGWRLVPEGLRVATIADDKGVRHIVLPEKMLRRMDHVEDLKSRIDLERDRIVTWLRAHWWGIVETFPEPIRERFVGHIRSLKVSPRKLAGSILAWRDDHGDFRPDLLAALEAWRKTNKRLTQEMDNLREKLSAQRTDLYRNEALRIVREHSCVALEDFDLREVVKLETPEGEKTDQPAAARANRVRAAVSDLRNWIGIQAAKTGTEIVKIPAADTTRACRQCLHVNVRSRPEELVWTCDACGAVWDQDENAARNLLMAAEMRQENAKKVSA

SEQ ID NO: 61685 - protein, 394 aa, Unknown
  Microbial Source -  Accession No. Ga0105154_1006902
LAGEEKLKLTVKCVIPPRDIGLQKLMREYSVYKKVLIPRVKQAVRQVIKDKTITVYAQQKWMIDKKLNEYLKNLPLHPMPFHNQSVYIEKKDGKFWIHFKTKRGEAVCYLHVPAKYHDLIEKACGKDNPVLGQVELVEDKKYGWVNCHITLRLPKPEPYEPLGWVGVDIGWNKLATSIACTCNPHIRFFNPTFHGKEFKTRIIQLRHLLKEYARKGKAWKKWDYRLKHTIKYAVGVVAKEIVTKAKKLKAGVAMESLTFKSTTKGYIVPRHKLMVAVKTLCEREGIPFKLVPAQYTSITCPKCGHINSKNRDGEWFKCLKCEYQTDADLVGAMNIALRALDSCPNGGQIDVGHAPRLKPMGLYAPEGGDVATPLRGMNDDLYKATRKTEKIEER

SEQ ID NO: 61686 - protein, 380 aa, Unknown
  Microbial Source -  Accession No. Ga105158_1004615
MEETIKLTVRAVIPPRDLGLRKLMREYTAYKKVLIPKIKQAVRRVIKDKSIRVYAQQKWMVDKKLSEYLKNLPFHPMPFHNQSVWIEDKDGKFWIHFKTKEGEAICYLHVPLKYHSLIEQACGEGNPTLGQVELVEDKKYGWVNCHICLRLPKPKSYEPKGWVGVDVGWNKLATSILATTNPHLTFSNPTFHGKQFKTRIIQLRYLLKQYARKGKAWKKWDFRLKNTIKYAVGTVAKEIVSKAKRLKAGVAMEILTFKSTTKGYIIPRYKLMIAVKTLCEREGVPFKLVPAQYTSITCPKCGYADDENRNNERFKCLKCGYKADADIVGAMNIALKALDGTADEAVNGMGLAPMPKTLRLYAERGGHVASPLRAMTDDPL

SEQ ID NO: 61687 - protein, 824 aa, Unknown
  Microbial Source -  Accession No. Ga0114945_10008792
VRASRIRIPRWTSGRLDHSSVRSSDEESVPWGGEGCQGGVDGARRFRYLLDSVCRTTHRSEHLPKGGRNHGSTCQTAAVGSRPNAPARPRIARADAPSRAPRARPARSALQGRAARHPCAARIPDALRAARRSVVPTLRRRIGSRARVCSGVRTQAACRHHRHRGGVVMRPWWQREHAERADADGQSSLVVEAPLHEPSRWKRRVLEHCSVLVSNATAALLAFIRERLVVTPDVEDATKIASADLAFEVGKEHASRIAALLAQVKHDRETGERLPFSNAYRFTACEPVPGTDRFRVVARLADGTWRERKLKRGGVRRTHGINCIHATTGFQQLLATYAAPKLLHVVPPALRAGVCQEVAQQVLSYLGQLESSKVRGDVAFPTVEDRDPVRRRQAYEDAIDALVADLTPFSYAKLRDKFPGEYAADDPRGDRLIVDDPRWFAVTTTPDPHPIPLLFSQGSAVRLLEGSTSFDAGVSKRNRHRGSSTASESVRQSRPDAVQRKGTTGLRQWYAAIPLLDADDDALRAIAAAAHERSGRQLDLALHPLPLDGGVRWRRRERDVLVPLSGDRKRLERILRNPNLHIAWSRLVQKRTGWVLQLTVRIPMQPAVEHRRVLGVSFGIDAVATWSLVDEDGVELEHGALAPNEQILTFLREKRQLEWDQEKGRWIGKQRFAMQLESIAHGVANTLLAIAEEHHAVLAVEDVSWVKKAGPNHAQNVLFTAWNFGQLRRILSYKSPMVGRGDPVTVSDYVVSYTCPTCGACRKPKQKPDHADTWRDGDTLSCRSCGFQGVLSPSDRARRVTANGLTIWQDRWQRSDERNGTETS

SEQ ID NO: 61688 - protein, 867 aa, Unknown
  Microbial Source -  Accession No. Ga011614_1003707
DYFSITEIEVALWNYRTENDLLKDLEEEQHLIANYFNSYFKTTVNDKEYDLVANVTAKYSCIKGLLEQDYPEDKKLNQETKEIDDIKAFLDALMLVLHFVKPLMLPHDSTLEKDQSFYNTIAPYYEELQYLISLYNKVRNFASQKAYSVEKYKLNFENSTLLAGWDVNKEPDNTSVLFRKENDYFLGVMDKKHNGIFKKTPKSKTQDTYSKVNYKLLPGASKMLPKVFFSRSNIAFYNPSEEIITIRNHSTHTKGGTPQTGFEKKDFNLSDCRKMIDFFKDSIAKHPDWKQFGFNFSDTDSYDSIDGFYREVEAQGYTISYTEIDETYIHQLVDEGKLYLFQIYNKDFSEFSKGKPNMHTLYWKALFDSENLRDVVYKLNGQAEIFYRKSSIKKDKIIVHKANEKVANKNPLNTKKESLFTYDLVKDKRFTVDKFQFHVPITLNFKASGNDYINQEVLSFLRQNPDVNIIGLDRGERHLIYLSLINQKGEILQQFSLNDIINEYKGITHKTAYKTLLEKKEKERADARENWGTIESIKELKEGYISQVVHKIAKMMVEYNAIVVMEDLNMGFKRGRFAVEKQVYQKLEKMLIDKLNYLVFKDKAPNEAGGLYNALQLANKFESFQKMGKQSGFLFYVPAWNTSKIDPTTGFVNLFYTKYESIEKAQKFFEKFDSIHFNTKEQYFEFAFDYDNFTERATGTQTQWTVCTQGERILTFRNPSANNQWDNKEIKLTEQFEDLLGKHNISYGSGTCIKAQVATQSGKDFLKGMMDLFKLTLQMRNSITNSEVDYLISPVRNAQGSFYDSRNADATLPKDADANGAYHIAKKGLMWLHQIHEFEGNDWRKLDLDKTNKGWLNFVQPKNKTNE

SEQ ID NO: 61689 - protein, 1089 aa, Unknown
  Microbial Source -  Accession No. Ga116143_10029534
MPQQAKPPVTQRAYTLRLRGAGPSDISWRKALWQTHEGVNKGAKAFGDWLLTLRGGLDHTLADTKVKGGKGKPDRDPTDEERKARRVLLALSWLSVESKLGAPEGYIIASGEEAAEDRNGKVVTVLEELLKSRNVPNNEISEWKNDCSASLSAAIRDDAVWVNRSKAFDDAVKSVGCSLTREEAWDMLERFFGSRDAYLAPVKGSEDESSETEQEDKAKDLVQKAGQWLSSRFGTGKGADFCRMADVYGKIAAWADNAQADTTGNDAINNLAAALNESTLASNDLQGVLGLISGPGYKSATRNLLNQLATKTIVTQQDLANLKDKAIKDAQKCNQNTGSKGKRPYSDAILKNVEAVCGFTYLQDGGSARHSEFAVILDHAARRVSLAHTWIKRAEAERRRFEEDTQRLANVPGPVKDWLDSFCSERSGTSGALEPYRIRRRAVDGWKEVVTAWSKSSCSTSADRIAAARALQDDPEIDKFGDIQLFEALAEDDAVCVWHKEGDAAKAPDPQPLIDYALAAEAEFKKRHFKVPAYRHPDALLHPIFCDFGKSRWDICFDVHKNAQTPFPRALCLTLWTGNGMVSVPLCWQSKRLAHDLALGQDVQNDGSSEVARADRLGRAASNVTKSDEVKISGLFEQADWNGRLQAPRQQLEAIAVVRDNLSLSDQERERRMSGMMDRIRWLVTFSAKLQPQGPWCEFAEKLQLRINPQYWPHADTNKDRKGHARLILSRLPGLRVLSVDLGHRYAAACAVWEAVAKGDFEKECSNAKGKGAEIHYGPDGCKPEDAIYAHLVWPEKASNSATKKAKTEGRDKFHPVTIYRRIGADTLPDGTQHPAPWARLDRQFLIRLQGEEEGVREASNEEVWKVHQMEAELGRTAPIIDRLVKAGWGQSGKQRTRLEALRELGWKPASEAAGVSDDMDADEGDDRKPSLSVDELMSSAVRTMRLALKRHGDRARIAHYLITDEKTKPGGTKEKLDENGRVDLLQDALVMWHDLFSSRGWRDDAARQLWDEHVAKLSGYKAPEEIGEEFSGPERKKKQKENREKLHDVAKAMAQDVTIREALHDAWKKRWKDDDERWKKQLRWFKDW

SEQ ID NO: 61690 - protein, 1236 aa, Unknown
  Microbial Source -  Accession No. Ga116146_1004071
MMMSQKEKPATTQRAYTLRLRGVNPNDNSWRHALWQTHEAVNKGAKVFGDWLLTLRGGLDHSLVAADNSDRIPTDEERKARRILLALSWLSVESERGAPEKYIVASGKEASTDRDIKVIAALEEILKKRKLSDDEIKGWIDDCKASLSAAIRDDAVWVNRSKAFDDARVGRASFRSHAVWVNRSKAFDDAVNVKRIGDSLTREEVWDMLDYFFVSAEAYLKPIKISGDESTDTEKEEKAKDLVQKAGQWLSGRFGSGKGADFPRMAKVYEKIVQWADQAEADTAGGEAISNLVEALKEFKPASEDLDGVLGLISGRGYKSATRNYLQQIHTKSNITKEDLDNLKKKADEDRKKCLGKSGSKGQRPYADAILDDVERDCVFTYRVAENGEHVSVLDYSKYKEGCKWGTSSHQEFSVMLDHAARRVSLAHTWIKRAEAERRKFEEDAKKKDFVPKSASKWLDQFCEERSEASGALEPYRIRRKALDGWKDVVEAWSDKSCKTNTDRIEAARALQHQIDKFGDIQLFEALAADDARCVWHKDGNETASPDPQPLIDYVLAAEAEFNKQRFKVPAYRHPDALLHPVFCDFGNSRWSIDFSIREATTELNKAKKKLQKTEEAFTKATNVFVTDRENGKKREKLEKAKKELTDARQEVKRLSSARRLSMTLWTGIVLENKFPLCWQSKRLVQDLALSQKEQKCEATEVTRADRFGRAASNVTKSDDVEISGLFEQKDWNGRLQAPRQQLEAIAKVRDNDSLPTEERDRRICKMKDRIRWLVTFSAKLQPMGPWCDFAEKHRELELKIDPQYWPHAEENKKRKGQARLILSRLPGLRVLSVDLGHRYAAACAVWETVDSRQVEDACKDANHERPKSEDLYLHLTKRKNAGNDVEKTIIYRRIGADNLPNGTPHPAPWARLDRQFLIKLQGEEEGARMASDEEIWAVHQMEAAFGRSVLLIDRLVASGWGSSDEQKARLEKLKGLGWTPAKQPSSNYESDLDQGEFFKPSLSIDELMYSAVRMMRLALKRHGDRARIAFAMTAEYKTMPGDRRYYFAESKELSVEDNQEVRDSKRVEFIRDALVLWYDLAYSQGWRDNKARQLWDEYIAKLPEYGAFDEKIEESAAQGDKKRNEEIKEKLNNVPRVLANNESLRKDLHDAWQCRWEEDDDQWKKQLRWFKDWILPRGKAAKDPAIRGVGGLSLTRLATLTEFRRKVQVGFFTRLRPDGTRQKPRKGLGKALWMH

SEQ ID NO: 61691 - protein, 1496 aa, Unknown
  Microbial Source -  Accession No. Ga116159_1001590
MADDLSTQRAYTLRLQGTDPEDQSWRDALWMTHEAVNAGGRAFGDWLLTLRGGIAHELADTPVKGKKDITDELRKNRRILLALSWLSVESRRGAPDKFIVAGGEEPAGSRNEKVLQALKEILKRRGLSAEESESWMSDCRASLSAAIRDDAVWVNRSAAFDDAQVRIGASLTREDIWDMLDPFFGSREAYLTPAKKKKEDEDSSEGTGEEKAKDLVQKAGQWLSSRFGTGKGANFAAMAEVYSKISEWAGTAQEGVSGKEGIKNLADALAAFSPVSQNLEGVLKLISGPGYKSATRDLLGELDSLPVVSRDHLSALHEKAAEDTVKCKESTGTKGRRPYADAILNDVEKRCGFTYLTDSDNRSVSILDTSEFPSDYKWGTARHSEFAVILDHAARRISVAHSWIKLAEAERDRCEEDAAKVYDLPDKVKEWLDTFCSNRSDISGAQGEGYRIRRKAIEGWKEVVASWGRSSCITAEDRVAAARALQDDPEIDKFGDIQLFEILAQDEALCVWHKDGDVAKSPDAQMLIDYVLASDAESKKRRFKVPAYRHPDALLHPIFCDFGNSRWDITYDIHGARGKKKAKRGSKKEEAMPRGVAMKLWTGSDVLSVSLRWQSKKLAADLALDQEAEEVTDTAAVSRADRLGRAAAGIDRGAGVTIAGLFEEAHWNGRLQAPRQQLEAIAAVRDNQKLSSEERERRIAFMKDRIRWLVTFSAKLRPQGPWHSYAPTQGLQSDPKYWPHSEINKKRKGQAKLILSRLPGLRILSVDLGHRFAAACAVWETMSSEAIQEACRLANHQLPAPADLYLHLKRTVQKNLIDGEKTVEESTVYRRIGADRLPDGTAHPAPWARLDRQFLIKLQGEEKVREASNEEVWQVHLMESALGLSFPLIDRLVYAGWGGTEKQAARLEALREKGWKPTGTPADQDEEGGGYKPSLAVDELMFSAVRTLRLALKYHGDRARIAFALTADYKPMPGDTRYYFSEAKDRSSGADAAEREAKHKDYLLDMLLLWHDLAFSRKWRDEEAKELWNLHIAALPGYQAPAAPIQEEAGQGRKKAREEARAKMTPAAEALLADGTLREKLHGLWKERWEKDDAQWKKHLRWMKDGILPRGGRAATPSIRYVGGLSLTRLATLTEFRRKVQVGFYTRLFPSGEKREIKEAFGQTALDALERLREQRVKQLASRIAEAALGAGRVSRTALKQDPKRPEARVDAACHAVIIENLEHYRPEETRTRRENRGLMNWASSKVKKYLSEACQLHGLFLREVPAGYTSRQDSRTGAPGMRCQDVTVKTFLNSPFWQKQCVQAQKNKSTARDRFLCALKEAVAQGGMEEEKKMGPIRVPVPGGEVFVSADAASPAAKGLQADLNAAANIGLRALLDPDWPGKWWYVPCDRKTAYPAKEKVEGSAAVDVKQALPFVLPEEKENKGKTKGGKKGKGEVMNLWRDVSAEPLMTGQWLDYTAYRKEVENRVIQVLTAQLKARNPLRFGNLGDEEEIPY

SEQ ID NO: 61692 - protein, 1563 aa, Unknown
  Microbial Source -  Accession No. Ga116160_1008286
MSITNKPSVTPRAYTLRLRRAPGECVLCRKNDCNCWRENLWQTHEAVNKGAKAFGDWLLTLRGGLEHTLADNKVKGGKGKPDRDPTDDERKARRILLALSWLSVESKIGAPPEFIVASGQDVAKNRNGKVFRALEEILKTRRMAKKNIEEWKNDCSASLSAAIRKDAVWVNRSKAFDRAVKSIGASLTREEAWDMLERFFGSRVAYLTPIQSFENESSDAAEQEEKGKDLIQKAGQWLSSRFGAGKGADFRRMANVYNMIARWADKAHADMDGNQAINSLASALSIFTPASNNLKGVLDLISGPGYKSATRNLLSQFSDKTSVSRQDLFNLRDKAKNDARKCNQRSGSKGQRPYSEAILKNVESVCGFTYLQEKGPARHSEFAVMLDHAARRVSLAHTWIKRAEAERSKFEEDAKKANQVSKAAKNWLDLFCIERSVMSSALEQYRIRRRAVDGWKEVVAAWGKRSCNNLNDRIAEARALQEMDKFGDIQLFEALAEDDAVCVWHEDGDATKAPAHQQLIDYVLATEAEFKKRHFKVPAYCHSDSLVHPVFCDFGNSRWDIDFSIREAASCLEKAQTACTNKQAVVDKIEKIIKKPSGKVEKKSRLIEKLKKAKSEYEEARRELVRLNSKRGMTMTLFNGSDVKKTALGWQSKRLAADLALHTDDDSTNNIRVSRANRLGRAASNVIGSDGVKISGLFEQADWNGRLQAPRKQLEDIGKRVAKYGWDIKAQKMRDNLQWLVSFSAKLQPNGPWCDFASANDLKLDQKNGEIIIASQNSKNDWRGLAYPFWHSSNEKGRKGMAKHNLSRLSGLRVLSVDLGHRYAAACAVWEAINTKELKKVCRAAQHDAPKASDLYLHLKQKVKKEKNGNLVEMNKITVYRRIGAETLSDGMQHPAPWARLDRQFLIKLQGEEEGIREASNEEVWKVNQLESELGRTAPVIDRLVKAGWGQSDRQKTRLNALHNLGWTPASGAEVSDRTDENECEVCKPSLSVDELMSSAVRTMRLALKRHGDRARIAFAMSAECKPMPGDRRYFFTEAKELSVNDDQATRGNKHIEFIQDALMLWHGLASLRGWRDDVAKQLWDNYIANLSGYKAIKEISEDVSDAERKKKQKENREKLHDVAEALVKDARLRRVLHNVWKKRWEQDDKWWKERLRWLKDWILPRGQAANGPAIRKVGGLSLTRLATLTEFRRKVQVGFYMRLKPDGTSVEIKERFGQRTLDALENLREQRVKQLASRLTEAALGIGRMKRFRGEKDAKRPRERVDKPCHAIVIEDLTHYRPEETRTRRENRQIMTWSSSRVKKYLSEACQLHGLHLREVPAGYTSRQDSRTGAPGIRCQDISVKEFMRSYFWRKQVKNAQEKLAEDKGNSRERYLCKLAAMWTDKAAVGWEKGGNVRVPLKGGEIFVSADRRSPAAKGIQADLNAAANIGLRALTDPDWPGKWWYVPCDPASFKPVRDKVGGCAAVNPDTTLWQSAQVQSCDTDNNKKKQGKKDARNANGVVNLWRDISSSPLECIGSGEWKEYAAYQNDVQCRVIRILEEQIKERGWHLHDGSKEDEIPF

SEQ ID NO: 61693 - protein, 1570 aa, Unknown
  Microbial Source - Accession No.  Ga0116161_1004008
MMMSQKEKPATTQRAYTLRLRGVNPNDNSWRHALWQTHEAVNKGAKVFGDWLLTLRGGLDHSLVAADNSDRIPTDEERKARRILLALSWLSVESERGAPEKYIVASGKEASTDRDIKVIAALEEILKKRKLSDDEIKGWIDDCKASLSAAIRDDAVWVNRSKAFDDARVGRASFRSHAVWVNRSKAFDDAVNVKRIGDSLTREEVWDMLDYFFVSAEAYLKPIKISGDESTDTEKEEKAKDLVQKAGQWLSGRFGSGKGADFPRMAKVYEKIVQWADQAEADTAGGEAISNLVEALKEFKPASEDLDGVLGLISGRGYKSATRNYLQQIHTKSNITKEDLDNLKKKADEDRKKCLGKSGSKGQRPYADAILDDVERDCVFTYRVAENGEHVSVLDYSKYKEGCKWGTSSHQEFSVMLDHAARRVSLAHTWIKRAEAERRKFEEDAKKKDFVPKSASKWLDQFCEERSEASGALEPYRIRRKALDGWKDVVEAWSDKSCKTNTDRIEAARALQHQIDKFGDIQLFEALAADDARCVWHKDGNETASPDPQPLIDYVLAAEAEFNKQRFKVPAYRHPDALLHPVFCDFGNSRWSIDFSIREATTELNKAKKKLQKTEEAFTKATNVFVTDRENGKKREKLEKAKKELTDARQEVKRLSSARRLSMTLWTGIVLENKFPLCWQSKRLVQDLALSQKEQKCEATEVTRADRFGRAASNVTKSDDVEISGLFEQKDWNGRLQAPRQQLEAIAKVRDNDSLPTEERDRRICKMKDRIRWLVTFSAKLQPMGPWCDFAEKHRELELKIDPQYWPHAEENKKRKGQARLILSRLPGLRVLSVDLGHRYAAACAVWETVDSRQVEDACKDANHERPKSEDLYLHLTKRKNAGNDVEKTIIYRRIGADNLPNGTPHPAPWARLDRQFLIKLQGEEEGARMASDEEIWAVHQMEAAFGRSVLLIDRLVASGWGSSDEQKARLEKLKGLGWTPAKQPSSNYESDLDQGEFFKPSLSIDELMYSAVRMMRLALKRHGDRARIAFAMTAEYKTMPGDRRYYFAESKELSVEDNQEVRDSKRVEFIRDALVLWYDLAYSQGWRDNKARQLWDEYIAKLPEYGAFDEKIEESAAQGDKKRNEEIKEKLNNVPRVLANNESLRKDLHDAWQCRWEEDDDQWKKQLRWFKDWILPRGKAAKDPAIRGVGGLSLTRLATLTEFRRKVQVGFFTRLRPDGTRAETKEGFGQSTLDALENLREQRVKQLTSRIVEAALGVGRVKRPAGGKDPKRPDKRVDEPCHAIIIENLTNYRPEETRTRRENRQLMSWSSSKVQKYLSEACQLHGLHLREVSASYTSRQDSRTGAPGMRCQDVPVAEFMRSPFWRKQVKQAQENVSKNKGNKRERYLCDLNEMWGHKQPADWKEAGDVRIPLNGGEIFVSADSTSPAAKGLQADLNAAANIGLRALIEPDWEGKWWYVPCDAAGLPVKDHVEGSQVSGLNQALRQPEQAQTNEANTETKKRKSGRGKSREVINLWHDISSSELNDREWKDYNAYWNGVQYRVVSNLNQQMNGRNKKRQVDLGDDDVPF

SEQ ID NO: 61694 - protein, 1519 aa, Unknown
  Microbial Source -  Accession No. Ga116167_1006930
MPQQDNPPVTQRAYTLRLRGADPSDISWRNALWQTHEAVNKGAKAFGDWLLTLRGGLDHTLADAKVKGGKGNPDRDPTDEERKVRRILLALSWLSVESKLGAPQNYIIASGTEAAEDRNGKVVAALEEILKSRNLAENEIDKWKKDCSASLSAAIRDDAVWVNRSRAFDDAVESVGCSLTREEVWDMLERFFGSRAAYLAPAKVTEDESSEEEQEEKAKDLVQKAGQWLSSRFGTGKGADFFRMAAVYGKIAAWAVNAQAGTTGNQAINKLAADLSEFTPASNDLKGVLGLISGPGYKSATRNLLTQIDDKPIVTQEDLKKLNKTAAADRGKCETNTGSKGQRAYSDAILKDVESVCGFTYRVDENGNAVSVSNYSLYGDDYNWGSARHSEFAVILDHAARRVSLAHTWIKRAEAERRRFEDDAQRMANVPGPVKAWLDSFCSERSATSGALEPYRIRRRAVDGWKEVVTAWSKSSCSTSADRIAAARALQDDPEIDKFGDIQLFEALAEDDAVCVWHKEGDAAKAPDPQPLIDYALAAEAEFKKRHFKVPAYRHPDALLHPIFCDFGKSRWDICFDVHKNAQTPFPRALCLTLWTGSGMEPVPLCWQSKRLACDLALGNNPRNAGASAVTRADRLGRAASNVTKNDQVKISGLFEQEDWNGRLQAPRQQLEEIARYVEKHGWDQKAKKMRDGIQWLVTFSAKLQPQGPWLDYAKTNVLKLDQKNGDIVVAPSNSKNEWRGLAYPFWHSDNQDGRKGLAKHCLSRLPGLRVLSVDLGHRYAAACAVWEAVEKGDFEKECSKAKEKGAEIHYGPDRYKPEVAIYAHLVWPEKASNSATKKAKTEGRDKFHPVTIYRRIGADTLPDGPPHPAPWARLDRQFLIKLQGEEEEVREASNEEIWKVHQLESELGRRVPLIDRLVNAGWGWSDKQKARLEALCAWGWKRASEAGFSGGTDADEGEVRRPSLSVDELMSSAVRTMRLALKHHGDRARIAHYLITDEKTKPGGVKEKLDENGRVELLQDALIMWHDLFSSRGWRDDAAGQLWNDYVAKLSGYNAPEETDEESSGPERRKKQKENREKLYDAAKALAQDVTLRKALHDAWKKRWKDDDERWKKQLRWFKDWVLPRGKHASDPAIRKVGGLSLPRLATLTEFRRKVQVGFFTRLQPDGTRAETKEQFGQSALDALEHLREQRVKQLASRIAEAALGIGRMRRPMEGKDPKRPDVRVDAPCHAIVIEDLTHYRPEETRTRRENRQLMTWSSSKVKKYLAEACQLHGLHLREVSASYTSRQDSRTGAPGIRCQDVPVDEFMRSPFWRKQVKQAEAKQAENKGDARDRFLCNLNAMWKDKTVADWEKAGVIRIPLNGGEIFVSADCTSPAAKGLQADLNAAANIGLRALTDPDWPGKWWYVPCDPASFKPIKDKVEGSKAVNPDKPLPHSTQKQDGNAAKDTKKRGNKGAGKSKEVVNLWCDISSFPLQDKSREWKEYAAYQNEVQCRILEEQIKGRDKQPHEGSKEDDISF

SEQ ID NO: 61695 - protein, 1558 aa, Unknown
  Microbial Source -  Accession No. Ga00116184_1002336
MTKKNKPSVTQRAYTLRLRRAPGECVFCQKNDCHCWNEHLWKTHEAVNKGAKAFGDWLLTLRGGLDHTLADAKVKGGKGKPDRDPTDEERKARRVLLALSWLSVESKLGAPPEFIVASGHDVAKNGNEKVFEALEEILKSRKIAKNEIKEWKDNCSASLGAAIQEDDAVWVNRSKAFDKAKVNDLKGLTRKYAQNAIMHFFGPEHDYFALPGGGNDDDDNDDADSSRLVANEGPEYRTLARQWISTNFGTGKKSNNERIIEILRKLVASDLNRFACHPKSEIIKEMCKIVNCSSPDLDKLCVAIGWITGRKSTGRLAIENLPACPNKTDIEKMKQKLADEADEKDSASGMREVPSWIALLRLSIEQACSIPFVGKRNHIGEFAVMLDHAARRVSIAHSWIKRAEAERRKFEVETKKVNIVPVAAKKWLDLFCMERTVMSGALAQYRIRRRAVNGWKEVVAAWGKSSCINLDDRIAVARALQFDPEIKIDKIGDIQLFEALAEDDAACVWHEEGDATKATAHQPLIDYVIATEAEFKKRHFKVPAYCHPDAFMHPIFCDFGNSRWDIDFSVREAAIYLEKAKTRCTKKQAVVNKVELILRKSSGNIAKEDQLIDKLKTAKRELEDAERELERLNSKHGMTMTLFDGKAVKKTELAWRSKRLAADLALHTDDDSTKLIEVSRANRLGRAASNVTGRDGVKISGLFEQADWNGRLQAPRKQLEAIAKRVADNRWDTKAKKMRDSLQWLVSFSAKLQPNGPWCDFASANNIKLDQKNGEIILASQNSKNDWRGLAYPFWHSSNEEGRKGMAKHNLSRLAGLRVLSVDLGHRYAAACAVWEAISTDKVRKACRAAGHEPPKASDLYLHLKQKVKKVEKGGQTEVNKTTIYRRIGADKLPNGMPHSAPWARLDRQFLIRLQGEEQGVREASNKEIWEVHQLEAEIGRTAPIIDQLVKGGWGESEKQKKRLKVLRTLGWKPINKDVGDVSSPSLSIDEMMFFAVRTMRLGLKRHADRARIAFAMTAAYNTMPGGRRYYFNEPKELSANDNKAERDNKRVEFIQDALMLWHSLAFSNGWQDDAASQLWDGLIAKLPGYKIPEEIGEEDSGAERRKKMKENRKNLYDVAVALAKDAKLRKALHEAWKKRWEGDDKQWQKRLRWFKDWILPRGKAAQDSAIRKVGGLSLTRLATLTEFRRKVQVGFFTRLKPDGTSEKNKERFGQRTLDALENMREQRVKQLASRIAESALGIGRMKRFRGEKDVKRPRERVDEPCHAIVIENLTQYRPKETRTRRENCLLMTWSSSKVKKYLTESCQLHGIHLREVSASYTSLQDSRTGSPGIRCQDLSVKEFMRSKYWRKQVEQAEKKPAEGKGDSRMRFLCELNKRWKDKRGEWEKAGVIRIPLKGGEIFVSAESKSPAAMGLQADLNAAANIGLRALTDPDWPGKWWYVPCDRASFKPVREKVDGSAAVNPDKQLRQPAHVHSSDIDKIITKRGRKNVGKANGIVNLWRDISSSSLECVKSGEWKEIAAYQNDVQCRVIRNIKEKKKGRDKQPQKGSKEADIPF

SEQ ID NO: 61696 - protein, 1102 aa, Unknown
  Microbial Source -  Accession No. Ga0116185_1015740
MPKQDKPPVTQRAYTLRLRGADPNDQSWSDALWQTHEAVNKGAKEFGDWLLTLRGGLDHTLADTKVKGGKGKPDRDPTDEERKARRILLALSWLSVESSLGAPADFIIASGAEASEDRNGKVVAALEDILKTRGVGQNEIKNWKIDCSASLSAAIRDDAVWVNRSKAFDNAVNSIGCSLTREEAWDMLERFLGSRDAYLTPVKGSEDESSATEQEEKAKDLVQKAGQWLSSRFGTGKGADFSRMAAEYGKIAAWADAHSPNKPGTDAIASLATALSEFTPASNDLQGVLGLISGPGYKSATRNLLTQIAAKTIVTQEDLKKLNETAAADKGKCETNTGSKGQRAYSDAILKDVESVCGFTYRVDENGNAVSVSNYSLYGDDYNWGSARHSEFAVILDHAARRVSLAHTWIKRAEAERRRFEEDAQRMANVPGPVKEWLDSFCLERSGMSGALEPYRIRRRALDGWKEVVAAWGKNSCSTSADRIAAARALQDDPEIDKFGDIQLFEALAEDDAVCVWHKDGDAAKAPDPQPLIDYAFAAEAEFKKRRFKVPAYRHPDALLHPIFCDFGKSRWGICFDVHKNVQTPFPRALCLTLWTGSEMKPVPLCWQSKRLACDLALGNNARNAGASAVTRANRLGRAASNVTKNDEVKIAGLFEQADWNGRLQAPRQQFEAIAAVRDNLSLSAQEREQRMSGMTDRIRWLVTFSARLQPQGPWCEFAEQNQLRIDPQYWPHADANKSRKGQARLILSRLPGLRVLSVDLGHRYAAACAVWEAISTEEARSACQAAGHEEPKESDLYLHLKKTAKKQKKTREVVVEETTIYRRIGADTLPDGVPHPAPWARLDRQFLIRLQGEEEGVREASNEEIWAIHQLEAALGRPVPFIDCLVASGWGGSDKQKARLKELKHLGWKPAEKPESGDESVAGEESNAYRPSLSVDELMSSAVRTMRLALKRHGDRARIAHYLITDEKTKPGGTKEKLDENGRVDLLQDALVMWHDLFSSRGWRDDAARQLWDEHVAKLSGYKAPEEIGEEFSGPERKKKQKENREKLHDVAKAMAQDVTIREALHDAWKKRWKDDDERWKKQLRWFKDWVLPRGKHASDP

SEQ ID NO: 61697 - protein, 1123 aa, Unknown
  Microbial Source -  Accession No. Ga0116188_1022712
GRAFGDWLLTLRGGIAHELADTPVKGKKDITDELRKNRRILLALSWLSVESRRGAPDKFIVAGGEEPAGSRNEKVLQALKEILKRRGLGAEESESWMSDCRASLSAAIRDDAVWVNRSAAFDDAQVRIGASLTREDIWDMLDPFFGSREAYLTPAKKKKEDEDSSEGTGEEKAKDLVQKAGQWLSSRFGTGKGANFAAMAEVYSKISEWAGTAQEGVSGKEGIKNLADALAAFSPVSQNLEGVLKLISGPGYKSATRNLLGELDSLPVVSRDHLSALHEKAAEDTVKCKESTGTKGRRPYADAILNDVEKRCGFTYLTDSDNRSVSILDTSEFPSDYKWGTARHSEFAVILDHAARRISVAHSWIKLAEAERDRCEEDAAKVYDLPDKVKEWLDTFCSNRSDISGAQGEGYRIRRKAIEGWKEVVASWGRSSCITAEDRVAAARALQDDPEIDKFGDIQLFEILAQDEALCVWHKDGDVAKSPDAQMLIDYVLASDAESKKRRFKVPAYRHPDALLHPIFCDFGNSRWDITYDIHGARGKKKAKRGSKKEEAMPRGVAMKLWTGSDVLSVSLRWQSKKLAADLALDQEAEEVTDTAAVSRADRLGRAAAGIDRGAGVTIAGLFEEAHWNGRLQAPRQQLEAIAAVRDNQKLSSEERERRIAFMKDRIRWLVTFSAKLRPQGPWHSYAPTQGLQSDPKYWPHSEINKKRKGQAKLILSRLPGLRILSVDLGHRFAAACAVWETMSSEAIQEACRLANHQLPAPADLYLHLKRTVQKNLIDGEKTVEESTVYRRIGADRLPDGTAHPAPWARLDRQFLIKLQGEEKVREASNEEVWQVHLMESALGLSFPLIDRLVYAGWGGTEKQAARLEALREKGWKPTGTPADQDEEGGGYKPSLAVDELMFSAVRTLRLALKYHGDRARIAFALTADYKPMPGDTRYYFSEAKDRSSGADAAEREAKHKDYLLDMLLLWHDLAFSRKWRDEEAKELWNLHIAALPGYQAPAAPIQEEAGQGRKKAREEARAKMTPAAEALLADGTLREKLHGLWKERWEKDDAQWKKHLRWMKDGILPRGGRAATPSIRYVGGLSLTRLATLTEFRRKVQVGFYTRLFPSGEKREIKEAFG

SEQ ID NO: 61698 - protein, 1240 aa, Unknown
  Microbial Source -  Accession No. Ga0116210_1003377
MKIKGYRLHKERIKFTSGTTIRSIKLPIKEFSLNEDKKELILKIKKQVKNDDLLLKGDVNLNDYAQKGFRGNPSYNFFDFWVDSLRAGVIWKKTTNELIDFVNGKLSKKDIIGEILIKASDKFLKYFDIANQDLKNFFKLSEVRANKNKQSLSRSLVSYLKQDYKKKKDKYDYEIINSDAQNLINFIVNSFFDNQSLLKLKGPQKQNQFWLKNFGIDKTKLKQFRPQGELGNISFVIVPQLISIDKDINIVDLIEKRIHFLERLNLNNDNEIKSILGLENNFSALSNYLGIIFKKLYQGEIEEIFQALVFIYKDLEDYKNVAFKSLNFLKEKAKLLSPEPSLEFISNWADYRSLLGGKIESWLSNYLRRKKEINQQINDFFNGLDLTKKFLIENKNYKKELKDNDLDSILKIIKEINQFGNKDLNNKKNYEIFDSFLSILKSDLNLFYQKYLIDEKNEIKVDEFSPFEAIYKKIYKPVSFYGEIKRENNDKNLRLVLPIIKTGLEFSKLMINELTENFSFNDDDDAEIFFRKLLNFYHQKILTKSINSNDFKNFFIDILVHYISEEDKKNIFKKNRVFYKSDYSKGTQSLFKLINTEFSQEFKKLIFKIKDFLASFENDYILINKDLLLDWIETFKNLSSILIKFSINNDFDSKIFEPLLKNYLKIKIYYDVFNPPDFDKNLFTKLWQQFFLSEFKGAAILYSKKTYLARYVSQFIGSENKIKIFFYSSNQDLLEKINDFENIDNDVSKNLVNKRKYLISFDENLKLSTKRKLETDVCLIKLSKNLNQFKKVYIKKESFDNLFEITSSYYQLQFLDRLFYKPKDWRNVDIKLSEWNLILEQDYEINWKLEANKAEFIKKENSKKNKLYINIPFEISSKNLVIKFKQLDNNRFAYPICGIDVGEYGLAYCLIKVGGNQTNIIDKGFFEDKNIANIKDKFAKIQERSRKGIFNETDSTIVQVRENAIGALRNQIHDLVVKYNASPVYEYSISNFETGSGRTTKIYNSVKRSDVFEEGSEVSVFLKTQIWGIKKTIGRNVSSYASSYTCINCKRSLYELNFQKKHLENGEVIIVVQKRQGNIIYFQINNNLIICGYSDKNKFVNNYQLKTRQDLDDFNKALKDFTRPPVKSNSEVLVKFANDLTMKKLKKEDKELSFIDVFRKRRGNSSIFVCPFDDCHFVADADIQAAFIMAIRGYIKFLKGANNNNQNNDKNRQKIDYFKETLIFLKKLQLQEDIFYPSID

SEQ ID NO: 61699 - protein, 663 aa, Unknown
  Microbial Source -  Accession No. Ga0123519_10000481
MGRNRGADRAAMGDHARGRDAVGDLAQLRLTRRSAPRSADQRRIAMATRNCRYGLLAPVEGRDEVMRQLRVAHEVYNTLVQYERERRKAVADATRETDAEVARLEAEVEGLLSRLADLRAAIQAARAGGGDNARLAEAQAEARECRRLLGEAKGALRETKRVARQNPALRERLEAIKAEHHRRQLALYHEVVEVGKRLYWPSWNDTKAAVEQAAKKTKNGDLRFRRWTGEGSLYTQVQGKQPVCETATSRWVRIDPVPPEAHDPATPRGERRRLCRTRFYLRIGSTGPREDPVFAVFPMVYHRPLPEGAVICGARIVRRKNADREYWQAVVTVDLPDEAAQKSGPRVCALDIGWRDRRPGGSDEPPPLRVAAWYDGDRTGEVLVDPSVFERCAKADAIRSTRDRMLDDLRAWLCEARKDLPEHLAEALAGCGLWRAAGKFARLRGLLSSGDVPAEVRDRFLAWYHRDRHLWQYEHGMRLNAIRDRDNAYRIAAKRFAQEYDVLIVEATGTPQKERDPKAPAAMDLRPLIKEPDPEDAPPRDQQRERKENKAHHQRFIAAAGTFRRYLLEAAAKYGTRVVMVPCEQTTLECWVCGAKYEFDRWPLMHECESCGTTWDQDQNAARNLFARGAVAAKGPGPLEVQGKPRLPRWHKRHKAYREGGAG

SEQ ID NO: 61700 - protein, 792 aa, Unknown
  Microbial Source -  Accession No. Ga012519_10002165
MATKSFEAKIVCKPDEKYTAEQKKQFLWFTHQVFNDGVRKVIPYVFKMKRGELGPEFQAIYYAITSSQDAIGKLEAVINPDWTSGKIGKSDPNKWKELLKYQELEKGFRQRLKEEGIKSTKKFRKELEDEKKKLAKEIGQKDIWADAAAILRNKNLLLFNRDELLPNLPSEFRRKIYEMTIQLIHGHQELVANWEDEHAEWLIEKDKWEEEHPEYMNVRPIFEKFEKEQGKVKGSRIRWLAYLDFLSSKPELANWRGKAKETIPLTKEERAGFRKPGQHFAAFFNKNPELQELDRLHKEYQEKFARTQSKRTPHPDGFKHRPTFTLPDAMRHPVWYSFKGATDPTKGSTYRNLDLENCTLDLKVLTAMEGEGRNPGGMIQYAFEPDERIKGFRYVGTTEKGKRAKGYIYYDPILEKERPAKIQGIKLVFRPPRPDGTAYLIFSCQIEDEKPKIKIWKDKEEESPGEITKRKKTEVYPPELITLAIDFGQRHLGAITICKNNNGRPEPIRFIPAYPKRRKDRESKPVSAWLAKIPGLTFNAVGMHEKEISAGMSRRFQDPKSIRQAGEKEGRKSKGQHIPETETPWAHLREHIANMKEDHYKKAANLIIRTALQNGAQVILIENLRNYRPMLERTNLENRRRMQWAVRQTAKFLEDTARPLGLIVRQVSSAYTSRFCSSCGHPGARVSLPGQKNWEKFYAEKYGKERKMIAVAGGQFFCCPACKKIINADINASLNMHKVFYQNFIWPGKIDKKDTKNFIWQGKNYNWDQIADDVQSFLDQKAGIKKEDDIPY

SEQ ID NO: 61701 - protein, 1481 aa, Unknown
  Microbial Source -  Accession No. Ga0123519_10002912
MPKQNKPPVTQRAYTLRLRGTDLNDQSWRDALWKTHEAINKGAKAFGDRLLTLRGGLDHSLVDTKVKGGKGNPDRDPTDEERKTRRILLALSWLSVESKLGAPENFIVASGEESAQDRNNKVIAALEEILKSRGVAENEIDQWKKDCSASLSAAIREDAVWVNRSKAFDEAVKSVAFSLTRDEVWDMLERFFKSPTAYLDPAKGSEHEYSETEKEEKAKDIVQNAGQWLSSRFGTGKGADFSRMAEVYEKIAVWAGNAQAGTTWNEAIRNLAAALSKFSPKTNDLQGVDGLISGTGHKSRTKNLLKVLAAKSEVTIQDLEILKNNAAEDARKCFQKKGSKGHLPYSDAILRDVESVCGFTYLQNGGPARHFEFAVMLGHAARRVSLAHTWIKRAEAERRRFEEDAKKMDNVPVKTKEWLDEFIRERSGFSGALEPYQIRRRAVDGWKEVVAAWSKAVCKTAEDRIAAARALQDDPEIDKFGDIQLFEALAADDALCVWHNEGNATNAPDPQPLIDYVLAAEAEFKKRHFKVPAYRHPDPLLHPVFCDFGKSSWDIKFAVHSFSKKRGRSNNRMTESNDLHAFSMTLWTGVRMQPVSLYWQSKRLARDLAFGKYVRNEGAIAVTRADRLGRAASNTSNNDLVTIAGLFEQEYWNGRLEAPRRQLEAIARYVEKHGWDDQAEKMRDQIKWFVTFSAKLQPQGPWCAFAQKLRLSINPQYWPFADANKKRKAHAKLILSRLPGLRVLSVDLGHRYAAACAVWEALSSEEVLQACRAVGHEDPKESDLYLHLKKKVTKQKKGNPVEVEETTIYRRIGADKLPDGTPHPAPWARLDRQFLIKLQGEEEGVRQASNEEIWQVHQLEAALGRSKPLINRLISSGWGITKNQQSRIEALKKLGWCPPEQPESGDVSDADEEEITYKPPLSVDELMSSAVRTMRLALKRHGDRARIAHYLITDEKTKPGGVKEKLDANGRTEMLQDALVLWHDLFSSRSWRDDAAKQLWDEHIIKLTGDKLPEEIGEDASESERGKKKKENREKLHDAAKALAEDESLRKTLHDLWKTRWEEDDRQWKKHLRWFSDWVLPRGKAADDPAIRKVGGLSLTRLATLTEFRRKVQVGFFTRLHPDGTRAETKEQFGLSTLDALERMREQRVKQLASRIAEAALGIGSQDKRHWEGGNRPRRRINDPRFAPCHAVVIEDLTHYRPEETRTRRENRQLMTWSSSKVKKYLAEACQLYGLHFREIFAGYTSVQDSRTGAPGIRCQDVPVKEFMRSPFWRKQVKQAETKLSENKGDARERFLCSLNAMWKDKAVTDWERAGVVRLPLKGGEVFVSADPLSPAARGLQADLNAAANIGLRALTDSDWPGKWWYVPCESSSLRPVKEKVEGSPAVNPTQALPQSAQKQSDGAGAKKKRKGSGTGKPKEVVNLWRDVSSSPLDDPNAGEWKEYTAYQNEVQWRVVRILEEELKGRFQRLYEGAKEDGIPF

SEQ ID NO: 61702 - protein, 1338 aa, Unknown
  Microbial Source -  Accession No.  Ga0123519_10003344
MNKKSSNSTGYRLHKDRILFSGGEIMRTIKYPLVVEKNNLNSEEIVEKIRQAIINDDRVIRSDINLNDYIEYTKKGNRLYTLIDFWQDCLRAGVIWQPSTSFLLYLINKLYSKPKAIELIENAKPDISRFFDVDKFSKCFILPGEIREGKILKTFKRELIEALKGEFKKGKKEKIKDEDDYLEKFVEKDARKLIREIADCFFSNDILVTHDLKEGKKEYQDRLWEEKFGIKKGKLLENFKLPDHLRNFKNISFFIIPELSDKSKNFDELIELRRKWLLERKICVREDGDYLENEKKLDEELRNLVGLSDNCNPLSNFLGTVFCELLVPNNLNEDNALEKFYDVFTIVEPKIAELNIKDQIMGSLEFLRLRAKQLGSPNLVNFSKSQNLKANESIKLDGWSLYRQNFGSKMQSWFTSYIERNKLLEDSLKNFKEKIKKAQNFIKNLKNISEEPQQEEEAQQEKEEIVELFEKIFSSLEKVNRENFEVFDSLLSSLRKRLNFFYQQYLYNEAKEGDDVKKHKILGPIFKNIEKPIAFYGETQRKKNEKFVEDTIPILEEGTVFLTTLISNLLDSFSPKQVFPDVRKKDETEEIIYRKELQFFWNKLKDLAVNSKEFEKEYQDIIESAVDESELSKLKELFVNKKKNGSKYNKYTFYKSKYTKGSIEEIKLKGSKEEYLLRFEKLIKSLTNFLTQFNRNKLLQDKDLLLDWVELAKNIVSVLIRFSTNTEFSLNEIKAQSQFKKAKNYLELFKLKKAKKKEFGFIIQSFILSEIKGAATLYSKRKYIASYSVQIVGSNNKFKLFYQPLDSSINISGGPKDFVTKKHKYLIVFQDLKNVKNKDATENRINLLRLNKERKIPLVAYKDDLVSKSLLLSSSPYQLQFLDKYLYRPRGWENIDIKLNEWSFVVEEAYDIEWDLNSKTPKLIPSPKSNRNKLYLAIPFTLKGNVKEPPLDKIVLKSETKKDHSRDKNRLNYPILGVDVGEYGVAWCLTKFDYNQDFSLRDIDIQGKGFIEDRNIGKIKDYFAEIQQKSRKGAYDEDDTTIAKVRENAIGKLRNAIHSILTGSLEGASPVYEDAISNFETGSGKTIKIYNSVKRADTEFKSEADKAEHSLVWGKKDRNQETKYIGRNVSAYASSYTCVNCLHTLFKVKKEDLSNIKILEKDGRIVTMSSPYGPDKKVRGYLSEKEKYEIGYQFKESEEDLKAFRKIVRDFARPPVNKNSEVLEKYAKEILAGNKIEEFRKKRGNSAIFVCPFCQFKADADIQAAFMMAMRGYLRFSGIVPSKENSKNNPQESEDKSLKNSKKQSETGDTFLTKTAEYLQQLRFEIKEKIKEAVKVDF

SEQ ID NO: 61703 - protein, 1520 aa, Unknown
  Microbial Source -  Accession No. Ga0123519_10003852
MAYQNGKEQPTVTNQRAYTLRLSGTNDQDSIWRNRLWHTHEAVNKGAKTFGDWLLTMRGGLCHTLAEADVPGKGNKPARHPTPQEIRSRRVVLALSWLSVESQHGAPERHLVSHDLDIATGERKNWKTVEALREILHGRCLCKELIDEWANDCRDSLSATIREDAVWVNRSKAFDLAAKKIGASLTREELWDFLQPFFANKHGYLQMDTVAGVTNGDSETDAEEAKEDSSEEKAKDLSQKAGQWLSSRFGTGTGADFSRFSKVYEVLAARCGSVAVGVSGVEAIRILAGTLADFSPGSNDIEGMLGLMSGPGYKSATRNILQKINTLQTVSQQDLDRLREASEKDALQSKQKVGGKGSRPYANAILQDVEAACGICYAGTGESPARHWQYAVILDHAARRVSMAHSWIKRAEEQRSKFEIEKDKLDHVPKDALAWLDAFCARRSSESGASDAYRIRRSAVDGWKQVVAAWAALPPKPENQGSELLSDAESARIQAARELQDTVEKFGDIQLFEALSLTGAKCVWQPDGRPDAQPLLDYVAGTDAISKKQRFKVPAYRHPDALLHPVFCDFGNSRWNINYAIHRAPEKLTPAQQLLEKKKAEIDKAELTLAKAGDAAKQANISEKINGLRAAFIQQQEKVAWLNSRHAMTMSLWDGTHIEDTPLIWQSKRFGSDIGQPVEAQPLPVSRADRFGRAVALAQDNVPVIPSGLFDLSDWNGRLQAPRRQLEAIAAIRDSAKLSVNEKQQLVAKRIQSIRWLLTFSAKLQSHGPFIAYAAQHGFDWRYGAHGPENKSRQGLAKLILCRLPGLRILSVDLGHRYAAACAVWETLNAGQIQKACLDAGKEAPGPCTLYLHLKQIANGKEKKTIFRRIAADTLPDGSPHPAPWARLDRQFLIKLQGEDRDARLATSEEIAAVEQMENELGVVRQLKRKGRELLVDELMSDALRTLRLGLRRHGVRARIAFNLTANKRIRPGGKEEVLDQEGRVLLLTETLLAWYELYTAERWTDEPARELWNRHIQPLLGATILQNTVNQEDTPSAAKRRKLREETSGKLKHVAEEIAKNDSLCRQLHVLWSAQWQTEDVIWRTRLRMMRRWLLPRGVKRNAQLRISIRDVGGLSLTRIASFKSLYQVQKAYQMRPHPEDPRLNIPERGDSRLENFGQRVLDAMERMRENRVKQLASRIAEAALGIGGETGISSKDGSQKKRPTERSSDPRFAPCHAVVIEDLTHYRPDETQTRRENRQLMSWSSSKVKKYLGEACELNGLYLREVSPAYTSRQDSRTGAPGLRCNDVTVVEFNNSPFWRKQVGAAEKNQKEGNKGDARERYLLSIEEGIRGAANDRDIFRIPVKGGEIFVSACITDGGNNAKKNAPPGLQADLNAAANIGLRAIFDPDWEGRWWYIPCDAATLCPDAKKFIGCKAVDPTKPLRVVAEEGAISASGIGSKKSGRKKNAATDGTRIVNLWRDPSGAPIHRDVLRSPEWQDYAGYWNEVQHRVIRNLKTCYEQTSQQEDPFVSQDADKPF

SEQ ID NO: 61704 - protein, 1519 aa, Unknown
  Microbial Source - Accession No.  Ga0123519_10021143
MDLTQRAYTLRLEGVDPSDDSWREALWQTHEAVNIGAKVFGDWLLTFRGGLDHTLADKKVKGRGGKDVRVSSDEERRMRRIFLALSWLSVESRLGAPDKFIVATGEEDEETRNNKVIKAFEEILKKRGLSKKEIEEWKEDCKISLNSAIRKDAVWVNRSKAFDEACRDLKGALNRKEVWDFLGFFFLSPNAYLASEKSVDEEIIDSEQVDEEKDFVEKAGQWLSSRFGKGKGADFQRMAKIYKEIGSWANTARPGIGGKRAIEEMARRLSRKGFGPGLRNLNDILDLISGPGYKSATRNLLKKLSEKGTINRQDLYNLKTKAEMDAQKCEEKIGKKGHRKYADFILDKVERSSGITYFADKNGFNIPISDRNKFGTKILLGASRHREFAVMLDHAARRVCSTHTWIKRAEANRRKYEDDANKMKSIPSTIKEWLCDFCENRSAALGASVPYRIRRRAVEGWKEVVDAWSKDGCNTTEDRIASARRLQGELENFGDIQLFEALADEDASCVWHVDGDPKKAPSHQLLLDYVAAEEASFNMQRHKVPAYRHPDPLFHPVFCDFGNSRWSIKYSVHEAKKTRKDPWKEVDKRRREVEKAKNAAQRCSNDGEKKIKAEEKLRLAEMLLHEAERELEFLASPKRVCMKLWNGINLQEVQMLWRSKRLDKDLAIRCGNRGPHAIQVSRADRLGRAAVNASKSDSLQIAGPFEQRCWNGRLQAPREQLARIGRRVERHGWDKKSQMMKRDIKWLLTFSPKLRPLGPWLEYGGKEKIKERQEVEEKGGRGNDARLLLCRLPRLRVLSVDLGHRYAAACAVWETLGEEDFKREIKGRKVLCGGSSGECMYCHTLHRDREGKVLKTIYRRIGADTLPDGRPHPAPWARLDRQFLIKLQGEREGAREASVEEIWKVHELEARLGRTKPLIDRLVAAGWGQTPGQKKRLRILEGLGWKQTQGVVDVTKDNEMSYKPSLSVDELMFSTVRTLCLALGRHGDRARIAHALTADYKKMPGGQRYYFNRAEDASVGDDESVRHEKHVEYILDALLRWHDLFEAKGWQDEEARELWDKYIANLSCCLEVSEMDDSLTDAELKKRRKDFKERLRPVAEAIVKDGKLRKKIQQEWKRRWERDDEKWREDIRWFKHWIFPRKKQAGPSIYRMGGLSLTRLATMTEFRRKVQVGFFTRLHPDGTTGEIGEDFGRKVLEDLEVMREQRVKQLVSRLVEAALGIGSEDLSHWEGQKRPQQRIEDPRFSPCHAIIIEDLTHYRPDETRTRRENRQLMTWSSSKVKKYLAEACELHGLYLLEVPARYTSRQDSRTGAPGIRCSDVSVAEFKNSPYWRKEVARAKAKNEKNQGDARDRYLCELDAQLAGSGRLKNVRVPIAGGEIFVSADTGSPATKGIQADLNAAANIGLRALVDPDWPGKWWYVPCDSSSFKPINDRVKGCKVIDTQESLKEASPGLAVKGEKNSEKKRQRRAKHREVVNLWRDISAKPVSAAYGPWDEYSVYWNRVQDQVVKILRNNLALSK

SEQ ID NO: 61705 - protein, 1026 aa, Unknown
  Microbial Source -  Accession No. Ga0123519_10027137
LILEGKKQDNFWLNEFGIDKSIIQKTKPEGELKDITFVIIPELIVDSFNKEYEVDSLIEKRRVWLKKRFNKEKEIEKNLQLILGLSNNFNGFSNFLGKGLRAFQGGKILMIFEAMSKINPSIKNQENKEKVLEALNFLSDKSKFFPLRPSLNIVKSWADYRTFFGGKLQSWYSNGIRRKNELKVQVKEIYEFLTKAQDYLAAKISFNDENKRYARKELESINLKINRLKQFIENENFDISSEDRYLIFDTLLSSLRTQLNLYYQKYLSSEEDNIRENKDLKGIYQKIYKPIAFFGKATKRKNKKVIEETVPIIESGINNLFSLMKKLEKTFLPKNTFSKVKNKNEDEETNLRNLVDYYQNKVSHKMLNSLTFVNKLEEVMKSVIEENDWDKLHSNKYVFYKSEYQKGALELIPLKKGSWIDIFEKIILEMTSYLLTFDLTDLLKDKKILLDWIEIAKNTLAKLIKFNTCDVFTLDELNLDLRNFPKAMDYIKIFKITKVDKNELNFIVQSFILSELKGAATLFSKEKYLAKYNVQVINADKKFKLFYKPNDGFIEREVDRKNLLKPHQYFVALDKIEDKKIKEKANFLLITKEDIKPVFIKEENFSKLYKISSSFYQIQFLDKFIYMPEEFKDLGIRLSEWNFVLEREYKIDWDLCTKRPKMTFIENSKKNKLYLSIPFNVFYKSKKKDVSLSKVISNRLSYPILGIDVGEYGLAYLLAEFSDKKIKILKKGFIEDRNIANIKDKFAEIQLKARTGIFNEEDTTIARVRENAIGNLRNKVHYILTSDRGASIIYERSISNFETGSGRTTKIYDSVKRADTEFETEADKFIHNHVWGKNTKYVGRSLSAYGSSYICSKCHRSIYQFKKEDLREIKLLMREGNILTFLTPIGKVWGYSKDEKFKKDYQFKPTEKDFKEFIKILKDFARPPVGKNKTEVLEKFFLKDNDKKAKIDEFRKKRGASAIFICPFCGFIADADIQAAFVMAVRGYIRFKESQIKEENKSLILEKTINYLKEVQFKPEDIFLPF

SEQ ID NO: 61706 - protein, 387 aa, Unknown
  Microbial Source -  Accession No. Ga0063162_10057643
VETIKLCVKGVISPRDIGLEKLMHEYTVYKRVLIPRTKHAVREVIKDRSIVVYAQQKWELDKKINEYLKNLSFHPMPFHNQSVYIENGNGKFWIHFKTKEGEAVCHLHVPAKYKPLIEKSCGSGYATNPVLGQVELIEDEKYGWINCHITLRLPKPKPYEPKGWLGVDVGWNKLATSILATTNPHLCFNNPTVHGKLFKTRIIQLKYLLKDYARKRRAWKKWNFRLKQTVKYATGVVAKEIVTKAKKHKAGIVMENLTFQSQTKKWLIPRYKLMIAIKTLCEREGIPFKLVPPKHTSIKCPRCGYINNENRKGERFACQKCSYEADADITAAMNIAAIAVGLAPTVKEVRLYAEASGDVATPLSPMVDDLYEDEGKPSKIEMRWAKS

SEQ ID NO: 61707 - protein, 332 aa, Unknown
  Microbial Source -  Accession No. Ga0123519_10064432
MAIPVRCDKPGQKRLEKTNDGQVEVDLMICTHPYPRVVLATQDKSLGKGARTILAHLLENKDQSKNGYRQRYFEIKEDKLSHKWFLLVSYDFPASTPSLSKERIVGVDLGISCPLYVAINNGYARLGWRQFHALAARIRAIQNQTIRRRREILRGGKTIISDDRARSGHGLKRKLLPIEKLQGRIDRAYTTINHQFSSAVIKFAKDHGAGMIQIEDLDGLKEILSGTFLGERWRYSELQQFIKYKAKENGIEVKEVNPQYTSQRCSQCGYINEQFTFNYRQEQRQKLGKPVPFTCPECKYEANADYNAARNLATLDIEQLIMRQLDKQGIKN

SEQ ID NO: 61708 - protein, 975 aa, Unknown
  Microbial Source -  Accession No. Ga0124943_1106748
MKSLAQFQNLYALQKTLRFELKPEGHTRETFNRWLEEIEKEQASENENIVYQDLLRAKKYEKIKIILDEYHKDFIEQALAYANLTELEKYEELYRKSNRTSEEEEEFENTKESLRKQIANIFIKNPNKTVQERWKFLFSKKLIQNELIVWVKGNYELLSEKLKNEFPDESSIISTIEDFKYFTTYFRNYHENRKNLYSNEDKFSTIAHRLIHENLPKFIDNIAIYQKAKAVLNINEVEKELGLPEDTLDKIFSLDFFSKALTQKGIDQYNYFLGGKTENEVKKIKGLNEFINLYNQQQQDKNQRLPFLKVLYKLPLFERTSTSFRFEPIENDRDLIERIGKFYYNDLKQYRDDSQGDTTDILSGINTLLRHVHDYRDGLYVNGGITLTQISQKIFGSWSYINNALAYFYDTYIDASGVDHQGERKPKKQKQIQEKTKWLKQKQFPVILVEKALSEYKSIETNEDLKTRISDTTLCDFFKRCGNDDNGQDLFDRIEARLREKNEEGYSLEDLLKKEFTTERKLMQDKTKTLLIKNFLDVIQGDKDDITAGLLHFVKCLIPRTEISEKNELFYSGMEKYLNILSEVTPLYNKARNYLTQKPYSIEKVKLNFENSTLLDGWDENEESDNSCVLLRKRGYYYLGIMNKKHNMIFDRKIYPKATEGEAYYEKMIYKLLPGAYKMLPKVFFSEKNIDYFKPSEEILRIRNTASYSKNGQPQEGYQKASFSIEDCRKYIDFFKKCIANHWDWQKFNFNFSPTEYYQSIDEFYREIERQGYKIDFVKIPESYINQLIKENKLYLFKIYNKDFSEKKKSKGKDNLHTLYWKMLFDEKNLKDVVLKLNGEAEVFFRQKSILYNEEIWNKGHHYSELKDRFSYPIISNKRYAEDKFFLHVPITLNFKADGINNVNNMVNEFIKDNRDIHIIGIDRGERHLLYVSVINQKGDIVEQCSLNEIVTEYNGKIFKKNYHEELDNLEKERD

SEQ ID NO: 61709 - protein, 922 aa, Unknown
  Microbial Source - Accession No. GA0124945_1030784
MHLELTIKGSENPKKQKQIQEKTKWLKQKQFPVILVEKALSEYKSIETNEDLKTRISDTTLCDFFKRCGNDDNGQDLFDRIEARLREKNEEGYSLEDLLKKEFTTERKLMQDKTKTLLIKNFLDVIQGDKDDITAGLLHFVKCLIPRTEISEKNELFYSGMEKYLNILSEVTPLYNKARNYLTQKPYSIEKVKLNFENSTLLDGWDENEESDNSCVLLRKRGYYYLGIMNKKHNMIFDRKIYPKATEGEAYYEKMIYKLLPGAYKMLPKVFFSEKNIDYFKPSEEILRIRNTASYSKNGQPQEGYQKASFSIEDCRKYIDFFKKCIANHWDWQKFNFNFSPTEYYQSIDEFYREIERQGYKIDFVKIPESYINQLIKENKLYLFKIYNKDFSEKKKSKGKDNLHTLYWKMLFDEKNLKDVVLKLNGEAEVFFRQKSILYNEEIWNKGHHYSELKDRFSYPIISNKRYAEDKFFLHVPITLNFKADGINNVNNMVNEFIKDNRDIHIIGIDRGERHLLYVSVINQKGDIVEQCSLNEIVTEYNGKIFKKNYHEELDNLEKERDRARKDWQTIANIKELKEGYLSHVIHKISKLILKYNAIVVMEDLNSGFKRGRQKVEKQVYQNFEKQLIEKLNYLVLKESNVDEPGGVLRAYQLANKFETFKKLGKQSGIIFYVPAAYTSAIDPVTGYIQYLYPLKQADSVEKARKFYSQFKRISYNPHKQWFEFSFDYNDFNIIYHGKSSWTICTTNTERYMWNRLLNNGHGGEELVYVTNELELLFGEYNIIYGDGKDIKQQITDVQDIDVDRTAKQFYKRINELLNLTLKLRHNNGKKGADEEDYILSPVEPYFDSRFESRKPSMQQTLPINADANGAFNIARKGLLLLERLNQLGVEEFEKTKKSNNKKTQWLPHELWVEYAQNHTRK

SEQ ID NO: 61710 - protein, 409 aa, Unknown
  Microbial Source - Accession No. GA0133944_1001807
MKLVQRHLIKRTNKYFSEIDNLAFLSKNLYNCGIYQCRQAYFKGEKPPTMTDLHHNLKTSIDYKALPAKVSQLVLKQVEKTFKSYLAAKKEYYKYPDKFTGKPKLPRYKDKVKGRNILSYNYQAVSQKLLKQGFVNPSGTNLKIPTDIKEITEVRIIPKVGAYCIEIVYEQPEIEQSQNTHYAFIDLGLNNLAAVTSNKPDFQPSLICGKALKSCNQKYNKTLSRLRSQLPANQKSSKRIQGLTLKRNCKVDYYLHTASKYIVNLLVSNQISLLVIGQNQCWKQNINIGSRNNQNFVNIPHSRFVEQLTYKCQLSGIEVKTVNESYTSKCSFLDLEPIQKHSSYVGKRVKRGVFRAKSGYLYGADINGSLNIGRKVVGEVAFSGDPIERFVVNPVRVKAYKETCGHICP

SEQ ID NO: 61711 - protein, 406 aa, Unknown
  Microbial Source - Accession No. Ga0134095_1000962
MCCKSYLLKIDKSHLNKKVAKQLNLLFLESKWFVNHAIAQGVFDVDYKTKTVLVKKGEGFEERKIQVLSSQMKQALLENLKKDIKALSIKKKNGHKVGMLKFKKFIRAIPLKQFKVTYSLCGKNHICIQNIGKKLRVRGLKQIPEGVEFANAYLIQECRDYYLRVVTYCLPDKNQQTEDKAVGIDFGVRNQLTLSNGISIQYRVPITKKLKKLYQKLSKKQKNSNNRYKARVKVQKEFCRLNRIKDDIKNKIVSCIKNNYSIVCYQNDSIKLWQTWWGRKTFETALGEIKNILKERISTPIALKREFPSTRRCFCGTENQIQLDEEIYSCINCGLRMHRDLKASISILLEGLNQLPTERREAALQYAERKACGEESSTLSMFEYLNSIPHVRARLLVETGSLSALA

SEQ ID NO: 61712 - protein, 855 aa, Unknown
  Microbial Source - Accession No. GA017716_10003017
VVASRYREARTLVRRLGRLPGEGEASFRAKLARLRKHFERFNVDVSELCQWLMGLRKQHCHKAGTASFGVLGDFLLHPESSNVAPGEAEADRWRLLVFDAVAGICPAKQLTNAPMPRGLPEAMEREAKRLADLEWRRRNTTQSKLIDRLAILEPAHRLVLLKAAAEWVVSRYQRGLENWAARRGEWEKERHAWEKRHPALSEEVRQRFTEVFKSLNDPERTDKPGVRRKNPRICPYERLRANIDNCIYAGEKGHGALCWKYAEFVKARKTRQPQFNDKRFAEDAEKVLPLLKQGMKRHQALQRLFPRDRPHGQLAQQRFNENWTAYLQALGLKEERVVNRGRLPHCLKIGETHEKSKCAWNPHTELCKQYKRALDQFDEETLKLEPLYREWRRDYLAGPGKPQFRYPSSRELPMPKIFGAGFHEIDFDRSILRLRLEDMPEGEWIEFGFAPWPRGYRPSKEEVKVKGAISSVHVNFVGVRARAGFRFDVRHRASRFQCTQDELDQLRSRAYPRRAQDREYLDAARKRLLESFAEGEEAAKRELRLLAVDLGETGACAAVYHGHAHQKDVQLAILKINRLYTQLPEALEPDPHGRPEEGKRKYERDDPRGVRKEHMGRHLKRMADGAASIAARRQGTMPATVTMAGHDFRGLKRHVTWMIRDWARHNAARIVAAAEEHGCDLIVFESLRGQKVPGYHELSSEKERDKRQLAMLSYGRIRHKVREKAVERGMRVVMVPDYRSSRLCSSCGHEQCAEKWQERRWRENKKKRLFKCVCGEPAPTEKPHHGGSAPDRQRAARRDGPGPGKRPGMAADQAKQRCRCGAEMNSDANAARVLARVFWGEITPPASERSFAGSA

SEQ ID NO: 61713 - protein, 439 aa, Unknown
  Microbial Source - Accession No. GA0137716_10003038
MPTINYRYGLLPPVEGRDEVMRQLHVAHEVYNTLVQYERERRKAVADATRETDAEVARLEAEVEALLSRLTALRSEIQAARAGGGDNARLAEAQAEARVCKRLFGEAKGALREAKRAARQNPALRERLAAIKDEHHRRQLALYHEVVEVGKRLYWPSWNDTKAAVEQAAKKTKNGDLRFRRWTGEGSLYTQVQGKQPICETATSRWVRIDLVPPEAHDPATPRGERRRLCRTRFYLRIGSTGPREDPVFAVFPMVYHRSLPPDAVICGARIVRRLNADREYWQAVITVDLPDAVGQKSGPRVCALDIGWRDRRPEGSDEPPPLRVAAWYDGDRTGEVLVDPSVFERCAKADAIRSTRDRMLDDMRAFLSEARKDLPEHLAEALAGCGLWRAAGKFARLRGLLSAGDVPAEVCARPVSRVVSPRPAPVAIRARHEVERDP

SEQ ID NO: 61714 - protein, 456 aa, Unknown
  Microbial Source - Accession No. Ga0137716_10003531
MGNVKAGQLAGVRVVTLEISGLTKDDIARWRALMDDCRGIVNCTWQTWLVWHVQNGTRAKLQAYLAEAKAWHEGGKQGKKPEWPVKAVTPECAKLTYDEVSAAFPYIETTARELCRNAVIQKINNTKAAHGSLSGWVAILLHRQSLPSTVRSVPIPFSKRNAIIEPPDPADENGCWKLHVKVTRRPRPGKKAGETVTDTVKLWSKGRKAASAVATLKKIAAGVYEFCGSQIIYKESRRKWFAAICYRASIEPPKKLDKEQVAYLRPAPMSATWPHPWRLRVPGANRAPGGCGDWIASVRRRIFAERRSRQNSYRYAGSANKGHGRERALRPIWRLQNRWKDSVKTYNYTVAKDVVDQCVARGIGRLVYFQPGDRVRDSRFLTVSGCGEGDHWAGWDYYQIGKRLADLCQAQGIDFVWRKPSEHPREVGGNVEKTEAKNGTVRNAARKRKASAGLHG

SEQ ID NO: 61715 - protein, 685 aa, Unknown
  Microbial Source - Accession No. Ga0137716_10006890
LDNLFNKYEQLVRITDSFIYHLYPYYANINEQGNLERLKELIKSLDEKAIIKNQRRKREPQKAEEQTTTETETKHQYTHSYLLKTLLHRFIKYAKKYYAKYYAKKHYAKKHYAKKYYEIDVDVKHAYLDTQGGLTDIMHSNAESAYKHRSIPNLRGLSNVMPIRVSKRPLLENRRSKDNDKYYKRTAEFIFNNGKIMLRIGSQRNGLIKIAKRFNDIEKLGMLIDAIQGKNNLTIGDPCYLVRKEIDNGYRYYIMVSISKNVDKKALHEASKNKSKIRIIGIDSNISKYIATMFCIEVDKENKTYKLINAKGIDSKDYINAVKKYEEERRKLQQERMKGKVNKKKGSRYKEEEDYTIKNRCGDSKRIDLRRQLIGYICNQILEFANKNDADIIVIEDLKGLNKELKHLRIIKKELGKLYNDVNSKGNNAIDDKINEINKKYNNKTRRPLLELLDKIKEYSNNNRDRIKVAKYVIKQKRRVERRISLLSIMAYYQFKQELEVEALWNGKLLYIINPKYTSQQCLRCDHISKLNRITQRMFKCIKCNFEMNADFNASANIALRFAREILKLDLKQEQGKSSSMMTVTNATTPLHASINAGSKVGVVVSNNNTDGSVAPTMSGVASILQGCDEGRSLFMRGQTLTVKGGIFTALKGRSLFMRGQTEQPCSAKRFATLDEFLEKRGNGG

SEQ ID NO: 61716 - protein, 519 aa, Unknown
  Microbial Source - Accession No. Ga0137716_10009026
VRSFKIPLKHKDTSVLNAFSERVRQDYISQVGLVNFSDWFEHRGRQWYSLADFWLDSLRAGVVFAHKEAEIKNLIIYLNGDDSVLTRFDRVVRERYPDLYGLVSVKPLYEFCISDTRPGNKSFNELLSSLRNRLFPNYRNVENNDVDEWVKRFAGWVYGDREEGEDGERTRRERRKAKVIEFLGFDPFPQMEYDHLFYFHPLIPMNKNASPKDLLFQYKDVLEKSDPGLYGSDIPIQEKLKMAFGLFNNHGALAGYFNQSLSALAQGDPSIKRHIQSTSTYWQSYEDQLDERISFLQSCAKKVSEPILAKGWHEYRSSIGGKIESWVSNTLNQDEEIRRQLFGYEGENGSFEAVVKQTLLDVTQDVTLGENGVAVVSESSKTIARDCLAIIGDDCSRSPSDERLFLLRKLIGGLRVRLGEEYQIAFRELQGTNEKEREKEAKEKRAYKKYPVIFKDIRLVPNFLGETKKKAYEKFVGSAALLKEGIAFLASIDEQVLRATPSPRFESDAELLEFALKQC

SEQ ID NO: 61717 - protein, 1262 aa, Unknown
  Microbial Source - Accession No. Ga0137716_10009341
MAKRKSRLAGYRLHKERILFSGGQVIRTIKYPLVPLGPSEETAQFLKDFERAIIADDLKIRGDLNINDYLAHTVEGKPPYTLFDFWVDSLRAGVIWMPKGTKLIDFLASQYNANSPFDDVWEKASPRITAIFKKDKFKDIFLSDPIRNTSTKNSFYKRILESLKDDLVKENIIISTDAKEEVELIVNSFFNDDGQLILDGESQFDFWEKEYNLDKGIIESAKPKGKYTDITFVIIPELISNLNTKQTLEDLINKRDTWLSNRELDEDNKLLASILGFSDNANGFSNYLGMVLRGLQEEDGDKEALYEAQKTIFPRLENYRDKVLESLDFLSQKAKLLGETSLPLVNCWHDYRSVFGGKLQSWFTNFQKRKEELDEQISQFKESLFKAKNYLQKENFGEEADKGKEDILSFLSLLENFFADEQKSIKIEENYQLFEPLLALIRRRLNFFYQKYLQKEGDETKVNKFKEFEGLYKTIYKPVAFYGYSAKRANEKFVNETVPILEDGIENIKKLIFCLQDSFSVQKTFEDIRRDGGEIDGPYRKFLQFFWNKYVDASINSPLFLEKYEKIIKESIEDNKWEEISDKNKKGRYVFFKSPYAKGSIEEIQLKTNDYLEQLQTSVLELAEFILSFERDTLLSDAALLLDWIEVSKNIISILLRFNTKETYKLDDLLLESFSQAKRYQELFRREDYPKNEFSFIIQSLILSEIRGAAILYSKREYIASYSVQVVNSDEKFKLYYISKEEIPITADTIKSKPDSIERKQLMKPHCFVVALDKVSEKKKNQSFNAILLSKSNITAVFLPDESLQKLFKLSSSPYQLQFLDKYLYRPAGWENTDISLSEWNFVVEKRYKINWDLQTKRPKLLPITDSEQAKKNKIYLAIPFNLSPNNQIKQSAPLKSIARGNEKIEKDLSRLNYPILGVDVGEYGLAYCLVKFDFDKNTYKITGIKLGSDEKETFGFIEDKNIGNIKDKFSEIQQKARQGAFDEEDTIVARVRENAIGHLRNRIHIVVTQEKSSSVYEDSITNFETGSGRTTKIYNSVKRADTESSTKADEQIHNHIWGEKTKLVGRNVSAYASSYTCVNCLKSLYQIKKEDLTKMTITQKDGRVVTISSPYGDIKGYVSNEEKYDVGYQFRGTDEDFKKLRKIVQDFARPPVSNRSEVLEKYAKSILETGRIEEWRKRRGNSSIFVCPFCQYVADADIQAAFMMAVRGYLRFSGIVPSQSYKEKQSQEGEKTAGESFLEQTQEQLKDIDRSRIKNAFSIRI

SEQ ID NO: 61718 - protein, 1546 aa, Unknown
  Microbial Source - Accession No. Ga0137716_10027208
VNAQSCPCRCNSSDHYFFSRCLRSEQVPTFSPRIDLALLKLLYFAYRANTLRTQNWTFLPIAAGRDPMSRGRAPVTQRAYTLRLRGVDPGDTSWRKALWQTHEAVNKGAKVFGDWLLTLRGGLNHTLADTKVKGEKWKPDRDPTDDERRVRRILLALSWLSVESKLGAPEKLIVSSGEEAAEDRNSKVIAALEEILKSRNLADNEIDDWKNDCSASLSAAIRDDAVWVNRSKAFDEAVKHIGPSLTREEPWDMLERFFGSRDAYLAPAKGSEDESSEAEQEDKAKDLVQKAGQWLSSRFGTGKGADFPRMAAVYGRIAAWADTAQAGTTGKDAIKELAAALGTFAPASNDIQGVLGLISGPGYKSATRNLLAQFDARPILTQQDLTRLNQTATADRKKCATNTGSKGQRAYANAILKNVESVCGFTYLQNGGPARHSEFAVILDHAARRVSLAHTWIKRAEAERAKFEEDAKKIDQVPKAAREWLDQFCLKRSEASGALEPYRIRRRAVDGWKEVVAAWSKPDCKTAEDRIAAARALQDDPEIDKFGDIQLFEALAEDEAVCVWHRDGDAAKPPDPQLLIDYALAAEAEFKKRRFKVPAYRHPDALLHPVFCDFGRSRWEIRFDVHKNVQTPFPRKILMVARPSVTDVHKNVQTPFPRALRLTLWTGSEMKQVPLCWQSKRLARDLDLGNNARNAGASEVTRADRLGRAASNVTKNDEVKIAGLFEEEDWNGRLQAPRRQLETIARYIEKHGWDQKAETMRDGVQWLVSFSARLQPHGPWCMYAKNSGLGLKHDPQYRPHVEENKKRKGHARLILCRLPGLRVLSVDLGHRYAAACAVWEALSAEAFKKDIDGKIILRGGTDKDALYCHTEHKANGKKHVTVYRRIGADTLPGGTPHPAPWARLDRQFLIKLQGEEEEVREASNEEIWAVHKMEAALGRRTPLIDRLIASGWGSTEKQKARIEAFKKLGWTPAQTPQPTSESAEDGETGVYRPSLSVDELMFSAIRTMRLALKRHGDRARIAAHLMTDEKTKPGGIKEKLDENGRIDLLLDALVMWNDLFSSREWRDDKAKRLWDERISSLSGYRAPEEIGEDTAGSDRKPKQKENREKFHDAAKALAEDATLRKEIHDAWKIRWEEDDGLWKKQLRWFKDWILPRGKATADPGIRKIGGLSLARLATLTEFRRKVQVGFFTRFRPDGTRADTKEGFGQKALHALEHLREQRVKQLASRIAEAALGIGSENKQHWEGGKRPRQRTFPPCHAVVIEDLTHYRPEETRTRRENRQLMTWSSSKVKKYLFEACQLHGLHLREVPASYTSRQDSRTGAPGIRCQDVPIREFMRSPLWRRQVEQAEAKLAEDKGDARDRFLCNLNQIWKDKTLAEWEKAGAVRVPLNGGEVFVSADPVSPAAKGLQADLNAAANIGLRALTDPDWPGKWWYVPCDPASFKPIQDKVEGSAAVEPDQALRQPAQEHRSDASAKKTRRKMGAGKSKEVVNLWRDISSSPLKFGEWREYGAYQNEVQCRVISILKKQCREKRLHDGSKEDDIPF

SEQ ID NO: 61719 - protein, 1368 aa, Unknown
  Microbial Source - Accession No. Ga0137716_10032400
  misc_feature (444)..(548): Xaa can be any naturally occurring amino acid
  MISC_FEATURE (558)..(692): Xaa = any amino acid
MNNNTTNQQSIWSAFTRQYALNKTLRFELKPVGKTEDFLKQNKVFEKDKTIDDSYNQAKFYFDKLHQKFINEALSSDKVQEIKLEKFAKEFFSLKDKIQKLKSDKKQKEVYGVEKEINELRTNYYKEIKSLLDKVAEDWQKKYQEIGINFSKSDLKQKGTDFLMKSGILGILKYEFPKEKEDEFKSKDWPSLFVEDKANPGNKVYIFDSFDDFTTYLLKFQETRKNLYKDDGTSTAVATRVISNFEKFLNNKKIFEDKYNNCWKKIGINKKEKQIFNIDYYYSCFIQDGIDKYNDLIGQINKKTKEYRDRNKIEKSHLPLLKVLDKQILGEVIKERELITKIETETEEEVFIKRFKEFIDQNKKRISIIKNKKDSEKEKEYLTDDLFNEKFESEYAGIYLKRSAINTIANRWFKNTTEFLLKLPQVSKSKSKENKESPKVKPFXXXXXXXXXXXXXXXXXXXXXXXXXXXXXXXXXXXXXXXXXXXXXXXXXXXXXXXXXXXXXXXXXXXXXXXXXXXXXXXXXXXXXXXXXXXXXXXXXXXXXXXXXCDAALRIYQMMKYFALEARKQDDIPLDYATEFYNRFDEYYKDFKFIRYYDAIRNFITKKPSNEDKIKLNFESGSLLTGFDKNKESEKLGVILRNRNSDKYFLGIINKEHNKIFDSKNESKFIGDDNKDLYEKMELKLFPDPKRMIPKIAFADKNKKYFGWTQEIQKIKEDFKNFQENKKDNKDLKFDKNKLSKLIEYYQNCLEKGNYKKEFEFEWKRPEEYQSMSEFNQDIEKKNYKIKFIPIKASYIEDKVKNGELYLFEISNKDFIWPNQKKNIHTLYFLNLFSDKNIQKPVFRLGANAEVFYRPASVRKEMDKERSKGGKEIIKYKRYTEDKIFLHLPIEINYGCPKDPNKNGYNKKIVEFLNKNKDEINIIGIDRGEKNLLYYTVINQKGEILAHGSLNEINGVNYLEKLIEREKERQINRQSWEPVVKIKDLKKGYLSYVVRKIADLVEKYNAIVILEDLNFRFKQVRGGIERSIYQQFEKQLIDKLGYLVFKDDRDPESPGGVLNGYQLVAPFDTFKDLGKQTGIIFYTNAEYTSKTDPITGYRRNIYISNSASQKKIKENLINKLKEIGWDEKEKSYFFTYNQKGFGSPISKQWTLYSKVTRVRREKNNSTGYWEYKPIDLNKEFEDLFKKYGINEKSSDILSEIKELIKNKEEKLTQKQKFDEKEKSFYERFIYLFNLLLEIRNTMSLQVKLDKRGNEIKLEEIDYGVDFFASLVKPFFTTAGVRFIGKQNENGKIEKHKKEEFTKENLTDFEELFKGCTSENFDSDGVGAYNIARKGIMILKRIKQNPEKPDFYFYKEEWDDFALKNALIK

SEQ ID NO: 61720 - protein, 418 aa, Unknown
  Microbial Source - Accession No. Ga0137716_10033855
MAVKMAIKVFKGYLRRVPADDQEGRAHRREVLGQLRQASYHAAQFANLLLSLNYLKFKFEQRGEIPDSLDKEIKRQYTAWNDRLSAAVRDAVSRSVVGKIRALGRKVMRGDVTLPSYRRRGALLVRGDRGAVQLWQDNGRVFCSLKITPEPPVVLELWVKGLKTSPGYRAVLDRLLDGTYAVKQAQVIFPEQGEVEVRLAYELPVVERTGNKVATLEIEEEALLLRWGQRRALFPHEVGHLARVKRQIEARMAKARREARRTERHGRSRFYQYRVLRRFRRRWYHIQLTWRQQLAARIIRQAEAWGVDEIELPTGGKFAEELNQLLDWSALASTLAAKAQERGLRVSQIPSQEEQEQEGRKQARKQRRSRARTGKEESNDPHQTSDAFRHGPAEPDALDGPGRRAVAGPSGPILVPRP

SEQ ID NO: 61721 - protein, 577 aa, Unknown
  Microbial Source - Accession No. Ga0137716_10038387
LTVAIKINAGDEMPEEQEKIITGVKFKLFFDNFEDKKEMNRYFDEYARAVTFAARKINEIQNSFKDTWVLDEQGKKQKGEDGKPLRPIEICNSCNEKKEIIKQEIESGKKFCLSCYSSTYSKPMIRKLLVPKTHGQEKRKVDPSINIKNAAALSATSYHYAVRDASQLLQALKEQRRKRRDFLKRDGSRLKKFKEMLDNENKRFQLPMKGRMRVPRFVHIDDKENTNLRGWRIKDLQNKVKRLQWNIDKLKRSLEKPSPIEYKGTKVSLSNDTIFDIQQNKVRIRLWKPKWYKISGSDVANRHGVEFFKDKLSKIQPKKYGWLIKKIDRNAKSSKTKTEYYNIPIKVKGTTRYISIDSINFYLQYPIEEQIEYRNPTTLMGIDIGLNKLAAVSVLPLNSNNVKPLLVKIFSGKEIKRLRYRKLKHDRMLRNVHHRLDKIKRIRSIENMINQQYHILAKQIADIADVNNSIVAFERLEDMKKKLKAEERRSQRFIRHSFVYATIRNLIEYKLKLRGLRTIEIDPEGTSYTCSKCGATNTTRPKQAIFKCNDCGVQLNADYNASVNIAKKALNTLNINK

SEQ ID NO: 61722 - protein, 693 aa, Unknown
  Microbial Source - Accession No. Ga0137716_10042212
LGTRSLKYRAYPTPVQADLLGRMHRACIALQNALIDQGRQAQARVTMEHARSVQVVRSACCGVRLRQGRCRCTGCGQPACQARDGRRCGQTETAQIERVVRSGLLLDAQTRCGACLRPCKSVSTCASCAGPLRRSRPSCPTCRAAVTRAPKDEQAQAPKDTPPWRCPSHGPVEAVAECGPNAWVCEACGPRARAADAAVSDCHRAPLRSPYRDVAELREAQKDARGALNVRVRRRTGIGLDQVPVKMLQEVLDRVDLAQQAHRKGQRGEPRFRSALRTRVSLGCPVQASPLVQVPVADRTHPALRLPVATAPGSPAVGDLRLVLHQHEAALLDGTITIKKVIVHEDAAGRWWATLQCDGVPDQGLPAAAQGRERGVDLGLQPLAVLDDGTQIPAPEFLGRALQQDKPEPGKPRRMSPLKRAQRELSRKIEAQTQRRRQMAAAGNPRPPQSKRLARAQLRVAKLHARIADGRKDFAHKLSHGLVYGGEVAPGVRLEGAERIAIEKIGVANMVRRSADPEIRDPAGLNRRDLDAGWGQILQLAQGKAAAAGALVVPVPAQRDQKAGGRQASARQILAAGQAVWSAPDEKKKSSPRSKQGGRRQGMPSLDASSRSPRAGDEDSTQAGRPPRAEGIGSTTRGNPGASVPVEASTTDILYEHRGDAHGAPSLSSSAERPDRGVLAKEPPKPRRSRGSA

SEQ ID NO: 61723 - protein, 448 aa, Unknown
  Microbial Source - Accession No. Ga0137716_10061480
MAKGKKKEEKPLYRAVRFEIFPSPQDVEILYKVSQNLSLIWNEALKERQECFEKNIKPIYEKIAAAKKKAEEAGASEVWKENLRKTINKLMREKGFLVRFTSEKESLLLELKTAFAKHKVTLYDQINSLTAKRLNEAFAFVPRNWQEETLDSLDGSFKSFLSLCKNGDMDANPPGERDVENHFYKIPGRYGFKIANGKLVLSFPKLDYRLTLDIPTFQMGKLGAATKLKKFELYRDERNMAKPGRFWVSIVYEVEKPISRPLLADNTVYLAVGASRLGVISPNGSFCLNLPRPDFHWKPNINNLEDRLKHVVKGSRKWKRLISARAKMFSKMSHQQKHGQYEVVRDLLKLGTHFVVTDLKVRSKENSLADASKANRGGSPFGANWSAQNTGNIGRFIQKLTDKAQERGGTVLKRQPPKLSLEERQLPEKQQKILIAEKLREEFLAEHR

SEQ ID NO: 61724 - protein, 577 aa, Unknown
  Microbial Source - Accession No. Ga0172363_1001655
MAEEKFFFCEKCNKDIKIPKNYINKQGAEEKARAKHEHRVHALILGIKFKIYPKKEDISKLNDYFDEYAKAVTFTAKIVDKLKAPFLFAGKRDKDTSKKKWVFPVDKCSFCKEKTEINYRTKQGKNICNSCYLTEFGEQGLLEKIYATKGRKVSSSFNLFNSTKKLTGTHNNYVVKESLQLLDALKKQRSKRLKKLSNTRRKLKQFEEMFEKEDKRFQLPLKEKQRELRFIHVSQKDRATEFKGYTMNKIKSKIKVLRRNIEREQRSLNRKSPVFFRGTRIRLSPSVQFDDKDNKIKLTLSKELPKEYSFSGLNVANEHGRKFFAEKLKLIKENKSKYAYLLRRQVNKNNKKPIYDYYLQYTVEFLPNIITNYNGILGIDRGINTLACIVLLENKKEKPSFVKFFSGKGILNLKNKRRKQLYFLKGVHNKYRKQQKIRPIEPRIDQILHDISKQIIDLAKEKRVAISLEQLEKPQKPKFRQSRKAKYKLSQFNFKTLSNYIDYKAKKEGIRVIYIAPEMTSQNCSRCAMKNDLHVNTQRPYKNTSSLFKCNKCGVELNADYNAAFNIAQKGLKILNS

SEQ ID NO: 61725 - protein, 491 aa, Unknown
  Microbial Source - Accession No. Ga0172365_10006450
MAIKSFEARVICKPDDKYTADQKRQFLWYTHKVFNDGVRAVLPYVFKMKRRKLGDEFQAIYYAIKNSQDAIGKLEAVIHVDWKTKKAGKYPPEQWKKFLQFPEIEKEFRQRLHEQGEKNIKKFRKELERQKKELAKEIGGKDVWADAAMRLHQRGELLFDREKLLDNLPSEFRRKIYEMTIQLMHGYQELVANWEDEHAKWLKEKDEWEEDNPEYMKVRPIFEAFQKEKGKVKGSRIRWFDYLDFLSSHPDLANWRGKASEIVPLTSEERKGLRKPREHFEAFFEKNPELRELDRKHKYYQEKFSRSQSQRTPNPDGFKHRPTFTLPSADKHPAWYSFKGATDPTKGATYRNHNIENCSVDLKVLTALEGKGRNPKGMVTYEFEPDDRIKKFRYVGTKEKGKKAKGFVYYDSILQKERPAKIQGIKLVFRPASPDGIPYLIFSCAIEDEKSKIKIWQDKETVDDGVFSKPKKAKKILYPPELVTLAIDFGQ

SEQ ID NO: 61726 - protein, 1487 aa, Unknown
  Microbial Source - Accession No. Ga0172382_10012866
MPQQDKPLVTQRAYTLRLRGADSNDQSWRDTLWQTHEAVNKGAKAFGGWLLTLRGGLDHTLADTKVKGGKGKPDRDPTDEERKARRILLALSWLSVESSLGAPANFIIASGTEASEDRNGKVVAVLEEILKSRGVDQNEINAWRDDCSASLRAAIRDDAVWVNRSKAFDDAVKSIGCSLTCEEAWDMLERFFGSRDAYLAPVKGSEDEFSDTGQEEKTKDLVQKAGQWLSSRFGTGKGADFSRMAKVYQKIADWADTASPNMGGTQAVASLATALSGFIPASNDLQGVLGLISGPGYKSATRNLLNQIAADTTVTQEDLKKLNETAAADKGRCETNTGSKGQRAYSDAILKDVESVCGLTYRMDENGNAVSVADYSRYDDDYNWGSARHSEFAVILDHAARRVSLAHTWIKRAEAERCRFEEDAQRMGNIPVGVKEWLDSFCLERSGMSGALEPYRIRRRAVDGWKEVVAAWSKSSCSTSADRIAAARALQDDPEIDKFGDIQLFEVLAEDDAVCVWHKDGDAAKAPDPQPLIDYALAAEAEFKKRHFKVPAYRHPDELLHPIFCDFGKSRWDICFDVHKKVQTPFLRALCLTLWTGSEMKPVPLCWQSKRLARDLALGQDTQNDGASEVARADRLGRAASNVTKSDEVKISGLFEQADWNGRLQAPRQQFEAIAAVMNNLSLSAQERERRMSGMRDRIRWLVTFSARLQPQGPWCDFAKKTQLRIDPQYWPHADANKTRKGQARLILSRLPGLRVLSIDLGHRYAASCAVWEAVNAKQVKEACQAAGHEEPKESDLYLHLKKKVTKQKRGKHVEVEETTVYRRIGVDTLPDGRQHPAPWARLDRQFLIKLQGEEEGVREASNEEIWAVHQMEAALGRPVPLIDRLVASGWGGSDKQKARLEELKHLGWKPAEKPEPGDESDAGEESNAYRPSLSVDELMSSAVRTMRLGLKRHGDRARIAHYLITDEKTKPGGIKERLDDNGRVDLLQDTLLMWHDLFSSRGWRDDAARQLWDNYVAKLSGYKAPEEIGEESSGPERRNKQKENREKLHDVAKVLVTDARSREDLHDAWKKRWEEDDERWKRQLRWFKDWILPRGKAANDPTIRKVGGLSLPRLATLTEFRRKVQVGFFTRLQPDGTRAETKEQFGQSALDALEHLREQRVKQLASRIAEAALGIGRMRRPMGGKDPKRPNSRVDEPCHAIVIEDLTHYRPEETRTRRENRQLMTWSSSKVKKYLFEACQLHGLHLREVSAGYTSRQDSRTGAPGIRCQDVPVKEFMQSPFWRKQVKQAENKGDACERFICDMNVMWKDKAVADWEKAGVARVPLKGGEVFVSADPVSPAAKGLQADLNAAANIGLRALTDPDWPGKWWYVPCEPASFRPVKDKVDGSAVVNPDQTLRQPTQAQSGDTAKDKKKRGNKGAGKSKEVVNLWRDISSSPLECIEFGEWKEYAAYQNEVQCRVVHVLEEQIKGRDRQPHDGSKEDDIPF

SEQ ID NO: 61727 - protein, 493 aa, Unknown
  Microbial Source - Accession No. Ga0180300_10000403
MEDKIKLTVRAVIPPRDLGLRKLMREYKAYKKALIPRVREAVREVIKDRSIRVYAQQKWMIEKKLLEYLKNLPFHPMPFHNQSVWIENKDGDFWIHFKTKEGEAICYLLVPAKYRSLIEKACGVDNPVLGQVELIEDRKYGWVNCHICLRLPKPEPYEPKGWVGVDVGWNKLATSILCTANPHVKFSNPTFHGKQFKTRIIQLRYLLKQYARKGKSWKKWNHRLKNTIKYAIGVTAKEIVSKAKKFKAGVAMEKLTFKSTTKGYLVPRYKLMIAVKTLCEREGVPFKLVPAQYTSVTCPYCGYRDKKNRNGKWFKCLKCGYQTDADLAAAMNIALRAFDSSPDGGEIGTGHAPCLKARGLHAPERGDVATPLRAMRDVPLERAANTTMYCNCSQNVHTVTMPHTVDCKLQHAAQRALAYIGPVTMPHTVNCELQHVPHSHRSHGSQGVTMPYTVGCELQPPNACSTMYLTAPLIDNPRFTANFSTRSYSFRGM

SEQ ID NO: 61728 - protein, 329 aa, Unknown
  Microbial Source - Accession No. Ga0180301_10011215
LKLEPTPSQEKVLKGCEEESFKFLSLSREKLKQLLYHELKDEVKLSRRTLALLIQRFTGSMGGKTIIPFDEDNSKFVKEDGFWFVEIQPFKGRGRIKIPVARTEVPYYSVIQELQGYPFYITRENVDWFAYISIPAPNNSNGTVIGIDFNLKKWVATPYQGKPQFFDAEKYEGEIDRLQKLIARYQSRGESEKVKECHEKIQEQVKLAHGNFLKLIRDTWDVCNLAIEDVEVMFKLREKDSQVINNWLYRKAALRQFALRAMAKGFNIIEVNPEGTSKICHRCGSPVKIYGKHKRLITCEKCGYKDYNRDLNAARNIAKKGLHHLTLHL

SEQ ID NO: 61729 - protein, 1507 aa, Unknown
  Microbial Source - Accession No. Ga0180435_10008691
PPIYIRRHCLNNIDYRPSWRLPFQRFSIPPDGPIFNAFRHLADAKVKGGKSKPDRDPTDEERKAWRILLALSWLSVESRLGVPANFIIASGTEASKDRNGKVAAAFEEILKGRNIAADEIENWKQDCLASLSAAIREDAVWVNRSKAFDEAVKLIGDSLTREEVWDLLERFFGSRDAYLAPAKSSEDESSDTGQEEKAKDLVQKAGQWLSSRFGTGKGADFRRMKDIYEKIAQWAANNNSSPLVGTDAIVNLANTLQNFNPASNDVNGILGLISGPGYKSATRNLLTQISNKITVTQEDLTKLSETAASDKGKCETNTGSKGQRPYSDTILKDVESACGFTYRVDKDGQPVSVAEYSKYNDDYSWGSAKHSEFAVILDHAARRVSLAHTWIKLAEAERRRFEEDARKIDDVPDSVKEWLDSFCLERSRTSGALEPYRIRKRAVGGWKEVVAAWGKSSCTGYADRIAAARALQDNPEIDKFGDIQLFEALAEDDAVCVWHKDGDAVKSSDHQPLIDYALAAEAEFKKRHFKVPAYRHPDALLHPIFCDFGNSRWEIDFSIREASADAKKKAEEKVTKKQKEFEKAQAALKKAGENGNNESAAKEKLDAATKKLSEAQKEFERLSSIHLMKMTLWNGETIAETHLSWQSKRLVADLALEQNKRATEITEVTRADRLGRAASNVNGSSRVKISGLFEQKDWNGRLQAPRQQLEAIAARVEKHGWDAKSQSMLSHLKWLVTFSAKLQTQGPWCDFASENQLNIDPKYWPHADANKKRKGHARLVLSRLPGLRVLSVDLGHRYAATCAVWEAISTKKVREACKAAGRTEPKDSDLFLHLKRKVKKHKKGKEVEVEETTIYRRIGANTLPDDKPHPAPWARLDRQFLIKLQGEDREVREASNEEIWAVHQLEAELGRPMPLIDRLVKADWGYTSKQKARLEALRHLGWTPVNQTQDFAATDEGELRKPSLSVDELMFSAVRTLRLALRRHRDRARIAHYLITDEKTKSGGMKEKLDENGRINLLQDALVMWHDLFSSRGWRYDAAKNLWNEHIARLQGYQAPVEIEEDITNVERKKKRKENQDKLRGAAKALAENENLRKTLSKAWTEQWNDNDQRWKKRLRWFKDWILPRGKRKADKSIRHVGGLSLTRLATLTEFRRKVQVGFYTRLKPDGSKCEIKDKFGQQALDALEYLREQRVKQLASRIAEAALGIGRMKRSKNGKDIKRPRERVDEPCHAVVIENLTHYRPEETRTRRENRQLMSWASSKVKKYLTEACQLHGLHLREVQAGYTSRQDSRTGAPGIRCQDVAIHEFMRSPFWRKQVAQAEKKQGDSKGDTREKLLCALNGKWKDKSDPEWKNAGTVRIPLKGGDLFVSANRNSPAATGLQADLNAAANIGLRALLDPDFTGKWWYVPCDPKTFKPVNDKVSGSTVIDVNQSLKDNQPESGEKNPKGDKKTKEAVNLWRDISSQPISEKNTWKQFTEYWNGVVFRVIENVLRSYNAIPSQDSQESPV

SEQ ID NO: 61730 - protein, 646 aa, Unknown
  Microbial Source - Accession No. Ga0180446_1198
MLPKVFFSDKNIGYYKPSDSLLENYKNETHKKGEKFNLQHCHELIDFFKNSIEKHEDWENFGFTFSPTESYKDLSDFYKEVEKQGYKITFQPVSESYIKQLVNEGKLYLFQIYNKDFSEYSKGKPNLHTLYWKALFDPENLNDVVYKLNGEAEVFYRKKSIDNPTIHKANQPIENKNPNTTKKQSIFSCDIIKDRRYTLDKFQFHVPITLNFKAEGKENINNDVLNHLKDNSDIKIIGLDRGERHLIYLTLINQDGKILKQESLNVIKDEKFGIETPYHQLLQSKEEQRAKARENWGVIENIKELKEGYISQVIHYIAKMMVEENAIVVMEDLNTGFKRGRFKVERQVYQKLEKMLIDKLNYLVFKDKDPRTPGGLYKALQLTNKFTSFKEMGKHNGFIFFVPASYTSKIDPTTGFVNFFNTKYESIKKAQEFFNNFKSIRYIPSRSNPSEYNPSEYNPSEDYFEFEVDDYTKFNPKAQGIKKDWVICTYGDRIRTFRKPNKNNQWDYEKVNLSKEFKNLFKKHKIEYTNGSCIKEQITKKDDKKFLMELLDLFNLTVQMRNSIPNDKEDYLISPVKNSNGKFYDSREAGNNLPKDADANGAFNIARKGLLLIKKIKETKETGKLPIITNKEWLEFAIEKGQDIIK

SEQ ID NO: 61731 - protein, 1232 aa, Unknown
  Microbial Source - Accession No. Ga0181613_1004254
KEIKSLLDKKAEKWKEVYKKKRIEFSQTDLKQEGTNFLTKSGILGILKYEFPLEKEKEFKSKDWPSLFVEDKANPGNKVYIFDSFDNFATYLLKFQETRKNLYKDDGTSTAVAARVISNFEKFLNNKKIFKDKYVDYWERIGITEEEKEIFKIDYYYNCFIQEGIDKYNKIIGQINQKTKQYRDKNKIDKNRLPLFKVLDKQILGEVIKERELITKTETETEEEVFIKRFKEFIDQNKKMISVIKNQKDLEKEKEYLMDDLFDEKFESEYFGIYLKNSAINTIANRWFKNTTEFLLKLPQASKSKSKENKESPKVKPLISLLDIKNALDDFEKERESLGAIFKDKYYKTKEIDEAPLNDDNQESYWKQFLKIWGYEFNQLFEDKFNEKGFKIFWGYTEDLEKQAENLNSFSHKKEEIVLVKNYCDAALRIYQIMKYFALEAKKQGEITDFSTEFYNRFDEYYKDFKFIRYYDAIRNFVTKKPSNEDKIKLNFEKPNLLGGFSESPVGNAQYCGYILRKNDKYYLGISLFTHFLDIEKYKLNELKGEDFYEKLEYYSLDWAKNIVGGRVYQSFTKSKFGKPISFQEHKNEFKNYPKKHVEIIKELIKEKYLRRYPQLKQIIEKDFDTPKEMQKAFSDLSLKGFYWVKVKASHVDNQKIIEGGGNHEKRHLLYLFEIVNKDFVWSRKTKNIHTLYFLNLFSDKNIQKPVFRLGANAEVFYRPASVRKEMDKERSKGGKEIIKYKRYTEDKIFLHLPIEINYGCSKAPNKNQYNKKIIEFLNKNKDEINIIGIDRGEKNLLYYTVINQKGEILKHGSLNEIRGINYLEKLIEREKERQINRQSWEPVVKIKDLKKGYLSYVVREIADLVEKYNAIIVLEDLNMRFKQVIRGGIERSVYQQFEKQLIDKLGYLVFKDDRGSEFPGGVLNGYQLVAPFTTFKDLGKQTGIIFYTNAEYTSKTDPVTGYRKNIYISNSASQKKIKEDLINKLKALGWDEKEKSYFFTYNQKDFGSSISKEWTLYSKVSRIRREKNNSTGYWEYKPIDLNKEFEDLFKKYGINEKSSDILSEIKELIKNKEEKLTQKQKFDGKEKNFYERFIYLFNLLLETRNTMSLQVKLDKRGNEIKLEEIDYGVDFFASLVKPFFTTAGVRFIGKQTEGGKIQKEKKEEFAIKNFGDFERLFRNCSSDGFDSDGVGAYNIARKGIMILERIKQKPQKLYISKEDWDAFAIKNALVK

SEQ ID NO: 61732 - protein, 1039 aa, Unknown
  Microbial Source - Accession No. Ga0181613_1005053
MNQIQIRKLDYQLTKNIGFLLKDVILEKWLVQKSENLKSSRLSINKLEFLKKLNNLLEDLFSSKDVGLIDRFLFYKHERGFNLFNYELDKKFLCKYDLYSGKTRYSHLAFNKMSFKKIKGFWLYFSRRIEEEILNPLNNYLNLYEKGINPKESEIRSVLRKFQGRYYFELLKEFFDGLRFNYKEKNINKIDFEAKIKDIKNKINSINELIQKNPFENKDELTKFSFNYYTLNKRPLNYRGDIDDTQSIENYYKSLKESYEKSLNEKINQFEFIKRYNNIINFVNKNLGENLLSYSLENAVEKLKEFRATIKSNFYKDINRADKDKLDLNYFDRAHPLFKFKDKNSFNKFLNSKVDDIKKYFNYEFKGYKNLCNLYQKLAVERGKIKAQIKGLEKEKEEFINLKYWGFIADYNNEKYLILLKKEFRKDFKDYLDSYKEEKPDFTLYNFKSFTFRALEKLIFNSYNNDFFEGIKQDERISDLLKKSNIRDKYKIKESLNNKDLILFYKYILTSEYAKNNLDLEDFNLEEVLSKDFDNIEDFRIALDGACYFIKEINLSWNKFINAWKNNVSIFKIYSYDLIGKQKELKFHTKVWKAFWSSFKDSRIRLNPEGSIFLNVVDEDERRTILLKKEKLEREGKKFIRNRKLEDYYYKALFNFNLYFPSKEIKISFKEKDKIDKSIEEYNNNFNQQNDFKNLFYIGIDLGEIELATLGIIKFKDSSSNFELQKIKAYKIKDEFINPQNIKNPSLLDDNFFEEVELDSLDLSKAKLIRDKIVINGDISTYLKLRIVSAKRKLFDLVKKQGEALANEKICFYNETKNNLGVNLGNDVFVLKKNNKKEKYLRVYKYDPEFENICPKEYLNEELNNYYRSLLKDESINYYEEINSLRKAISSNIVGIASYLQDIFPSILVLENLSKETREYHMRKENFFLDSQVDWMIYRKLETKKLCPPNINNFKFLKDLESENGVFQLGGLVFVSEKSTSKKCPRCGAEELGLSEEKFKEAKFELRNMKCEQCSEEFHPDLIACINIAKSAFDFLNSK

SEQ ID NO: 61733 - protein, 529 aa, Unknown
  Microbial Source - Accession No. Ga0181858_1004277
MRRFSAAYRWTYRRLLEGYDPNVLKRADGPMTKLFGLGLKYNEGGRDLAKWKLGALKRLGQPPEKIVFGGRGLFRRLGRKGDLRSRLEAKRLWWERRNGLLYCPGDRSQPSGNPNLRLFWEHGALWLRILLEGTPAKGRYVDALVQTSSPYLEAIAEAVGRKGVAPIGVNLRLRDGKVYAIFTRSLPSPAPHITRQGGVLGVDVNARPLHLALAVAGPDGNLRRYLTLSLEEVDRIRERKRGESADALSDFYWKVAHRVVDLAKEEGTAIAIENIRNLPRGKRGDGNKRLRRALPRFAYRAVLERIVAVASREGVEVWGVNPAYTSVIGMLKYAPQLSLSKDVAAAYVIARRAMGLRERVPKRYLELLARPEHWERVAEWFASEWRALEARVREEKNEYKLRRYRQEQEELKNAWDYLRKFVESLEGAPGAPRRGPTGADALPSSGSQKEPEGGLLLWRALQVGVLRPLLGRKVPRDLSALKPLLVGGAWEGGGGERLGPDRCAGPTRTGARGLTALTLEDISRGEEVF

SEQ ID NO: 61734 - protein, 1522 aa, Unknown
  Microbial Source - Accession No. Ga0182014_10001887
MAEKNSKEQPVVTTQRAYTLRLSGTDKHDNSWCDRLWKTHEAVNKGAKVFGDWLLTMRGGLCHTLAEADVPGKGKKPARRPTQQEIKNRRIVLALSWLSVESKCGAPESYIVPHDSNTATGERKNWKTVEALREILRSRGLTEERAIEWADDCRDSLRATIREDAVWVNRSKAFDLAATNIGASLTREELWDFLQPFFANRHSYLEMDTVASATNGDSETDTEESKAASSDEKAKDLSQKAGQWLSSRFGTGPGADFSRFSKVYEVLATACRSIAPEVSGVEAINRLAIAIKKCSPSSNDIEGILGLISGPGYKSATRNILQQINRLQSVSEQDLSRLCDACEKDASQSRQKVGGKGSRPYADAILQDVERTCGICYARTEDHPSRHWQYAVILDHAARRVSMAHSWIKRAEEQRSKFEIEKNKLLRVPRDALAWLAAFCAKRSSDSGANDAYRIRRSAVDGWKQVVAAWAALPAKSEIAGSELRSDAERARIQVARELQDTVEKFGDIQLFEALAIREAKCVWMPDGKPDAQPLLDYVFGTDAIAKKQRFKVPAYRHPDAFLHPVFCDFGNSRWSIDYAVHRAPGKLTKARQLLEKKSAEISKAELALGKMDDALRHAAISETLQNLRAAYKQQQAEVAWLKTLQAITMGLWDGNGIQDTQLLWRSKRFGANIGQPDAVHPSPVSRADRFGRAVALAEDNVPVIPSGLFDLPEWNGRLQAPRRQLEAIAAMRDSAKLSAGEKQQLVAKRIHSIRWLVTFSAKLQSHGPFITYAEQHGFDWRYGMHGFENKSRQGLAKLILCRLPGLRILSVDLGHRYAAACAVWETLSTGQIQKSCGVAGMEAPGPRTLYLHLKQIVDGKEKKTIYRRIGADTLPDGSPHPAPWARLDRQFLIKLQGEDRDARPATSEEIAAVEHMENELGVVRQLKRKGRELLVDELMSDTLRTLRLGLRRHGERARIAFNLTAAKRIRPGGIQDVLDQEGRISLLKETLLLWYELYSGERWRDKPAEDLWNRHLQPLLGGAILPDTVDQEGNASAAKRRKQREETSENLRPVAEQIAKNDSLCRQLHVLWGAQWQTEDAVWRTRLRWMRRWLLPRGIKRDAQLRKSIRDVGGLSLTRIASFRSLYQVQKAYRMRFHPEDPERNIPKRGDSRLEGFGQRVLDAMERMRENRVKQLASRIAEAALGIGDEAGINSKDGRQKKRPTERSRDSRFVSCHAVVIEDLTHYRPDETRTRRENRQLMSWSSSKVKKYLSEACQLHGLHLREVSPAYTSRQDSRTGAPGLRCKDVTVAEFMKSPFWRKQVNTARENRGKENNGNARDRYLLWIDEKISADVTKETDSFLIPSDGGEMFVSAFEDNKAQPASRRKKPSALQADLNAAANIGLRALLDPDWEGRWWYIPCDAATLCPDAKKFIGCKAVDPSKPLRVVAEEGAMSASGIGSKKSGRKRNVATDETRIVNLWRDPSSMPVHLDASGSGEWQGYHEYKDNVQSRVIRNLKARYKQTWRQEYPFVPQDEDTPF

SEQ ID NO: 61735 - protein, 1437 aa, Unknown
  Microbial Source - Accession No. Ga0186994_110
RGADPSDTFWRKALWQTHEAVNKGAKVFGDWLLTLRGGLDHTLADAKVKTRKGQPDRDPTDEERKARRILLALSWLSAESKLGAPADFIVASGTEAQDERNCKVLAALEEILKARGLDPQEIEAWKNDCAASLSAAIRDDAVWINRSKAFDDAVKSAGYSLTREEAWDMLERFFGSRDVYLAPAKVSEDESSEAEQEDKAKDLVQKAGQWLSSRFGTGQGADFCRMAKVYGKIAAWADNAQGGMTGNETIKNLAAALSEFNPASKDLQGVLGLISGPGYKSATRNLLTQIAAKSFVTQQDLASLKDRAIKDAQKCNQNTGSKGRRPYSDAILKNVEALCGFNYLQDGGPARHSEFAVMLDHAARRVSLAHTWIKRAEAERRRFEEDARKIELVPEPIREWLDHFCSQRSQELGALEPYRIRRRAVEGWKEVVAAWSKADCKTAEDRIAAARALQDDPEIDKFGDIQLFEALAAGDAVCVWHKDGDPAIDPDPQPLIDYALAAEAEFKKRHFKVPAYRHPDALLHPIFCDFGKSRWDICFDVHKNVQTPFPRALCLTLWTGSEMKPVPLCWQSKRLAHDLALGNSEKKAEASEVTRADRLGRAASDVGKRDVVNIAGLFEQADWNGRLQAPRQQLEAIAKRVDKHKWDETAKKMLDRLQWLVTFSARLQPNGPWYVYAKEHGLREDPKYWPYADANKTRKGHARLILSRLPGLRVLSVDLGHRYAAACAVWEALTVEQVKEACQAAGHRDPNESDLFLHLKRKMRKQKKGNQVEVEETTIYRRIGADTLPDGMPHPAPWARLDRQFLIKLQGEEDGAREASNEEIWAVHQMEGELGRAVPLIDRLIAAGWGITEKQKSRIETLKRLGWRPVERPELGDESDSDEEDLYRPSLSVDELMSSAVRTMRLALKRHGDRARIAHYLIADEKTKPGGIREKLDENGRIELLQDALVMWHDLFSSRGWQDDAAKQLWDDRITRLSGYKAPEEIGEGVSGVERKKKQRENREKLQVVAKALTQNVSLRKDLHNAWKKRWEEDDERWRKQLRWFKDWILPRGKAANDPAIHKVGGLSLSRIATLTEFRRKIQVGFFTRLQPDGTRAGIKEQFGQSVLDAIEHLREQRVKQLASRIVEAALGIGSENKHHWDGTKRPRERIADRRFAPCHAIVIEDLTHYRPEETRTRRENRGLMAWSSSKVKKYLAEACQLHGLHLREVSASYTSRQDSRTGSPGIRCRDVPVKEFMRSPFWRKQVKQAEAKQAENKGDERDRFLCDLNAMWKDKTVADWEKAGIVRVPLRGGEVFVSAAPASPAAKGLQADLNAAANIGLRAFTDPDWPGKWWYVPCDPVSFKPIPDKVKGSAAINLDVPLKGDVPPKDVPAASGDVTRKKSGKIKSRSKEVVNLWRDVSSREISTTGIAWEVYAAYQNRVEKRVIEILRKSKCP

SEQ ID NO: 61736 - protein, 1374 aa, Unknown
  Microbial Source - Accession No. Ga0187028_105
MPETTQRAYTLRLQGHDPKDASWREALWKTHEAVNRGAKAFGDWLLTLRGGLDHSLADEGAPGQTPTEEQRKQRRILLALSWLSVESENGAPQEYIVPHDRDNESGARQNWKTREALREILKNRGCRDDEIESWCHDCEPSLTSAIRKDAVWVNRSKAFDNAVQSIPNFSREEIWDLLGCFFVSSQAYLAPLESPKDDKPDASKKDSSKDLIQSAGQWLSRRFGRGKGLNFARLAETYEAIARWASVANPGDTNDLIADLAKTLNAETPELDGILKVVSGPGHKSKTRNLLRSLSAVNHITKDTLQRLKDTANEDAKKAKLKKGEKGHRAYAYKVLEAVEDACGFTYLQEGDRAKHCEFAVMLDHAARRVSSLHTWIKRAEAERRRFEIDTKKKDQLPPSVKEWLDTYCQKRSKETGAVEPYRIRRGAIEGWKEIVEAWSKAGTTTAEDRKHEARRLPDNPHIDKSGDIKLFEDLALEDALPVWHANGDPNNPPDPQLLIDYVEGSEAEFKKRAFKVPTYCHPDPLVHPVFCDYGCSRWNVSFAIQPVKKQKLSSEEKLPAKGLLLDLLHGTAIRPVALRWQSKRFARDLALNTTDSSDKPNEVTRADRFGCALAKCPSSQKIRIRGLFEEKYWNGRLQAPRPELTALAKRVAKYGWDKKARKLRNSLNWFITFSANLRPSGPWEEYTKYAEKAFSSNASAKPSVSRGGFWVVHASPNKRGKMAQLRLCRLPELRVLSVDLGHRYAAACAVWETLSKSAFEQEIHERKILRGGTGPNDLFCHTQHDTNGQSKVTIYRRIGADTLPNGTPHPAPWARLDRQFLIKLPGEEREARKASPTELANVEKLEKELGLKTSENRVKRIDDLMSDTLRTVRQALRRHSLRARIAFNLATLRDQSDGDEESQSKQKRDTRWNNTVKIWHSLLESNEWTDDWAKALWDELGPLSDPQKADDAEWLKLAAEKFYTRWQEDEQTWRERLRWLRRWILPRGSQAASQKGSIRHVGGLSLTRLATIKTLYQVLKAYHMRLKPDNSRKNIPAEGDEALQNFGQKILDDLEHMREQRVKQLASRIVEAALGLGRMKQVTIGKDPKRPREPVDQSCHAVVIENLTHYRPEKRQTRRENRQLMDWSAAKVKKYLKECCQLHGLHLVEVSASYTSRQDSRTGAPGIRCQEVPLTDFLKKNFWREQVKQAKQRLSEGKANARDRYLCQLNERWGNAPAPVTQTAIRLRIPLNGGELFVSADQNSPASKGIQADLNAAANIGLRAITDPDWPGAWWYVPCEANTFKPVKDKVAGSAAIDSNVSLKKDSPNSEKPASDRKSRTSKSMINLWCDTSSKSLSEKDQWQESAPYWEDVAARTINILQASLACSTTNSQ

SEQ ID NO: 61737 - protein, 519 aa, Unknown
  Microbial Source - Accession No. Ga0187073_104
MNLTKSYKFKLIVTPEQHIFLENYFLRYAKAVNFYIKIIQIIRRDYQWLTKKEQIEGECNNCRKKVLLVYRFLPENKLLCPKCYNLHAGDYSLRKILYATRQRKRGKYDVRDAVSLAGTEYALSFKRAVDILKAIRKQIGSMRKFIKNRKERLEMWQEVLNDEKARFVVPRLEGQKAVRYKHIKLKDNPSRGKTESQIKKEIVALSKTIIKTEKSLRGIKSNFRGDIVDLQNTAIKKIDEDGAEITLDGGKRKFGLMIGAVRNEKGRKWLSDILKKIKESKPTYPMLLKQKGNFYLHYPISIDVAEPEIKTKTNYRVMGIDRGVNQIAVSVILDEFQGKPHNIKFYSGRDLMRQKIKFQLIRKKFTGTKNVNRRRAKFGKKLNRISTYLLHYISKNIIDEAKKFKPIVIVMENLKMIQGAKRPKKGSAAQERKINYIMSNFSYRKLQSLLSYKALQAGIPIRLISPEYTSQLCSKCSKPGDRTKGHFKCLNEKCGLQMNADLNAAINIANSYFKHSENS

SEQ ID NO: 61738 - protein, 1548 aa, Unknown
  Microbial Source - Accession No. Ga0187107_1033
MAELLEKTQRAYTLRLQRASGKCDICGKDDCSCWREALWNTHEAVNKGAKVFGDWLLTLRGGLSHTLADEPPLSDDDIEKELKALKKEAKANERNEPSFDDAKRSAEEKREARIRNKRIVLALSWLSVESERGAPQKFFVKHQRNEETNERSKWETEEELREILKNRGLNRNEIESWIKDCKASLSSAIRHDAVWVNRSKAFDELINNLMTHDEVWDMLGFFFKDQKTYVAPAEGPKDSEDEAADSEEEEAKDLVKNAGQWLSSRFGEGKGADFARMAGNYGKISNLSSQIMPGVTGKEAIEKLAKHLEVRDLAGILDLISGPGYKSATRNFLKEIDNKKIVTTEDLEKLKELAIEDQGKCKSKIGLKGRRSYSDMIMKEVEDACGFTYLQQNGPSRHSEFAVMLDHAARRVSIAHTWIKRAEARRRQFEEDAGRLSKVPPIISDWLDKFCSDRSEISGALEEYRIRRRAVDGWDKIVEKWAKCSSKEERIKAIEKVQGECQANDDKFGDAQLFEALAEDDAICVWHKNGNPQEEPDPQPLIDYVAAKEAEYNKRRFKVPAYRHPDPFMHPVFCDFGCSRWDINFAIHRASQELSETTQKIERKKAELEKAENALSKVEKLNDITKISPAHKKRDECREVLAEAQRRCAWLMSPRALSMKLATGNNKVVDITTLCWQSKRLAHDLGLNTKDSSGEASDVTRADRLGRAASGISDKDPVKIKDLFEEAEWNGRLQAPRGQLEAIARRVEKHGWDEKAKRMLDNIKWLVTFSARLRPYGPWVEYTKSFSEDSFPKPLVGAREYFVKYSDNDSRSSLSKHILSRLPGLRLLAVDLGHRYAAACAVWETLSAKKFQDEIAGKTILRGGTDANAIYCHVEDEKDGKKRTIIYRRIGADILPDGNPHPAPWARLDRQFLIKLQGEDEKARMARRNEIKKVERMEGEFGRFRKAPNNSECPNDEQGGNASSPACVDESGLPKRVDELMSEAVRIMRLALQRHGRRARIAYNLTAEDKLLPGGRKEKMEPEERVALLAETLADWHEICESRRWKDDFASSLWDEYLKAFDADIEAIKNAIEGEKDAVSDDEEETARARRKKREKLIAVLKPIAQKLADDMPLCKEISKRWAAYWSEEDEKIKKWLLWLRRWILPRGKKFATVRSIRRVGGLSLTRIATIKSLYQVQKAFRMRPEPDDPRKNIPARGDESLEDFGAKILKTVEKMREQRVKQLASRIVEAALGIGSENYEEHWEKKRKRPRRPIDDPRFRPCHAVVIENLTHYRPEETRTRRENRQLMTWAAGQVKKYLAEACQLHGLYLREIQPAYTSRQDSRTGAPGARCQDVPVTEFMKSPLWRRQVKQALKKSKEQSADARVRLLCELDEYCEKHKADWKNRQPEKKAEEKEPLLRIPLKGGEIFVSSDVNSPAAKGIQADLNAAANIGLRAIMDPDWPGKWWYIPCERSTFKPAKDKVAGSSAISLDEPLKKDSETDSSGAKQKRRKSGKKGSEIVNLWRDVSSKPISADDGWREFEPYWNAVTAKVVEILRQQSKEKDWPF

SEQ ID NO: 61739 - protein, 581 aa, Unknown
  Microbial Source - Accession No. Ga0187121_108
MDKEIQTFFCEKCNKEINIPKNLIGKENAIEKAKSKHNHKEHSLILGIKFKIYPEKKDIEKLNNYFDEYAKAVNFAAKIIDKLKEQFFFIGQKNKEQTGKKWIFPIEKCDFCGEEKEIVYQSKRGKKICKNCYMKEFSEGEIRKKIYSTKGRKVNPSYNIKNATNKLCATHYNYAPREAFQLLDALKKQREKRIRRLKKDKIRLRQFEEMLEQEDKRYELPKKGKQREPRFIHISLKDRASEFEGKGYTIKKIKDKIKTLRRNIEKEEKSLRKKSPIEFKGNRIMLTNNLKFDFEKDMVRIPLTKELTKYYKFSGLNVANEHGRKFFEEKLKLIKENKPKYSYLIRKQINKDKENPVYDYYLQYTVEFLPEIKTEYKGILGIDCGVNTPACVVLLEKGKEKPSLVKFFSGKDILKLKIRRRKQLYFLKGKHHKIMKQKRIRPIEPKINQILHTIAKQIVGLAKEKEVAISLENLEKPKKGKYKQSRFIRYKLSLFNFKTLQNYIAYKAKKEGIKVIYVPPEMTSQTCSHCAIKGNIHADTKRPYKNSYSLFKCNKCGIELNADYNAAFNIAQKGLKSLNSI

SEQ ID NO: 61740 - protein, 1353 aa, Unknown
  Microbial Source - Accession No. Ga0187143_105
MEIKTKNRQKTIWSEFTKQYSLNKTLRFELKPVNRTAYFLKQNKIFEKDLTIDDSYNQAKFYFDKLHQKFVNEALLSDKVKEINLEEFAQNFFALREEVKKLKESQEREKTYTVENKINKLKNEYFKKIKLLLDRTANDWKEKYKERGLKFNKTDFKKNGTEFLMKSGVLKILKYEFPKEKEEEFKNNDWPSLLIEDKANPGNKVYIFDSFDNFTTYLLKFQETRKNLYKDDGTSTAIATRIISNFEKFLNNKKIFDEKYSTFWGKIGITKEEKEIFEVNYYYNCFIQKGIDKYNETIGQINRKSKEHRDKNKIDKSQLPLFKKLDKQILGEVIKERELITKTENETEEQCLIKRFKEFINQNKERIDKAKNLIKDLINSNFESEYAGIYLRRAAVNTIANRWFKNPTEFLLKLPQTSKSKENKESPKIKTFISLLDIKNALENFEGNKDSLGLIFKDRYYKNEQNENKPLEINNQESYWMQFLKIWNYEFSQLFEDKFNEKGVQIFWGYTENLEEQAERLNSFSRQKDEIQIIKNYCDASLKIYQMMKYFVLEVKNEKDVPVDYSTEFYNRFDEYYKDFEFIRYYNAIRNYVTQKPSNEHKIKLNFESGSLLTGFDKNKESEKLGIILRYRNSNKYFLGIIHKEHNKIFDSKNESKFIGDSDEDLYEKMELKLFPDPKKMIPKIVFANGNKKDFGWTQEIQDIKTEFKVFQENKKENKDIKFDKSKLAKLIEYYQNCLERAGYKKEFGFEWKKADEYQSMSEFNQDIEKKNYKIKFIPIKDSYIEEKVQSGELYLFEISNKDFVWPNQKKNIHTLYFLNLFSDKNIQKPIFRLGANAELFYRPKCERIVKEKRGKKEIIKYKRYTEDKILLHLPIEINYGCFKAPNTKQFNKKFLEFFNDHDDEINIIGIDRGEKNLLYYIVINRKGEILEHGSLNGINGVNYFEKLLEREKERLINRQSWEPVVKIKDLKKGYLSYVVRKIADLVEKYNAIIVLEDLNFRFKQIRGGIERTVYQQFEKQLIDKLSYLVFKDNRNPEEPGGILNGYQLVAPFTAFKDLGKQTGIIFYVSAEYTSKTDPLTGYRKNIYISNSASQKKIKDLINKLKDFGWDEKEHSYFFTYNQKDFDSSIDKEWTLFSKVPRVRREKDNKTGYWEYKPIDLNKEFKDLFEKYEINKESNDILSEIKSLIKNNEEILTQKKEFDGKSKNFYERFIYLFNLLLEARNTISFQVKLDTQGDELKLEEIDYGVDFFASPVKPFFTTSGIRFISKQNRDGKTEKEKKEEFTKENFPDFKNLFKECSPENFDSDGVGAYNIAKKGIILLERIKENPEKPDLYISKEDWDNFAIENALIK

SEQ ID NO: 61741 - protein, 1544 aa, Unknown
  Microbial Source - Accession No. Ga018764_10009485
MADENGREQPVVTTQRAYTLRLSGTDKNDNSWRDRLWKTHEAVNKGAKVFGDWLLTMRGGLCHTLAEADIPGKGKKPALRPTPQEIKNRRIVLALSWLSVESKCGAPESYIVPHDSNTATGERKYWKTVEALREILRSRGLTEERADEWADDCRDSLSATIREDAVWVNRSRVFDLAATKIGASLTREELWDFLQPFFANKHSYLEMDTVASATNGDSGTDTEESKVDSSDEKAKDLSQKAGQWLSSRFGTGTGADFSRFSKVYEVLAAGCQSIAAGVSGAEAINRLATAMEEYSPHSKDIEGILGLISGPGYKSATRNNVLPQINSLQRVSQQDLDRLRDACEKDAVQSRQRVGGKGSRPYANAILRDVEVACGICYAKTAGGPSRHWQYAVILDHAARRVSMAHSWIKRAEEQRSKFEIERNKLDHVPHDARAWLDAFCNRRSSESGATDAYRIRRSAVGGWKQVVAEWAALPATAENAGSELLSGPELARIRAARELQDTVEKFGDIQLFEALSATDARCVWQPDGKSDAQPLLDYVAGTDAISKRQRFKVPAYRHPDALLHPIFCDFGNSRWSIDYAIHRAPKELTHAKQLLEKKKAEIDKAELTLAKANGTAKRADISEKIKSLRAAFIQQQSKVACLDSRHAMTMGLWDGSRIEDTPLRWQSKRFASDIGQPLSAHSLPVSRADRFGRASVAAEDNSPVKPSGLFDLPDWNGRLQAPRRQLEAIAAMRDSAKLSAGEKQHLVAKRIHSIRWLVTLSAKLQALGPWFEFAGPRGLLEYRNGEVVLSPRSSKDSWRGLAFPFWHPHNLKGRGGAVRHVLSRLPGLRVLSVDLGHRYAAACAVWETVSTGQIQKACLDAGMEAPGPHPLYLHLKQIVDGKEKKTIYRRIGADTLPDGSPHPAPWARLDRQFLIKLQGENRDARPATSEEVAAVEQMENELGVVRQLKRKGQELLVDELVFDTLRTLRLGLRRHGTRARIAFNLTATKRIRPGGIQEVLDQEGRLSLLKETLLLWYEVYSGERWRDKPAEDLWNRHIQPLLGGTILQDTVNQEDIPSAAKRRKQREETSEKLRPVAEQIAKNDSLCRQLRVLWSAQWQTEDAIWRTRLRWMRRWLLPRGIKRDAQLRKSIRDVGGLSLTRIASFKLLYQVQKAYRMRPHPEDPERNIPKRGDSSLEDFDQRVLDAMERMRENRVKQLASRIAEAALGIGDEAGIHSKDGRQKKRPTERSRDSRFASCHAVVIEDLTHYRPDETRTRRENRQLMSWSSSKVKKYLGEACQLHGLHLREVSPAYTSRQDSRTGAPGLRCNDVTVEEFKKSLFWRKQVGAAEKNREAGNKGDARERYLLWVDEKISADETKETDSFLIPSDGGEMFVSAFEDNKTQSASRRKKPSALQADLNAAANIGLRALLDPDWEGRWWYIPCDAATFCPDTKKFIGCKAVDPSKPLRVVAEEGAISASGIGSKKSGRKRNAAIDGTRIVNLWRDPSSMPVHLDASGSGEWQRYHEYKNNVQSRVIQNLKARYKQTWQQENAFVPQNEDTPF

SEQ ID NO: 61742 - protein, 347 aa, Unknown
  Microbial Source - Accession No. Ga0190309_1003062
VEKDETIKLTVKAVIPPRDKGLRKLMREYKAYKKALIPKVREAVRNVIKDKSLRVYSQQKWMVDKKLNEYLKNLPFHPMPFHNQSVWIQEKEGVFWIHFKTKEGEAVCYLKVPEKYRGFVKKACGRDNPVLGQVELIEDKKYGWVNCHIVLRLPKPEPYKPKAWVGVDIGWNKLATSIACTVNPHLRFFKPTFHGKQFKTRIIQLRYLLKQYARKGKAWKKWDYRLKHTIKYAIGVVAKEIVSKAKKLKAGVAMEKLTFKSVTKGYLVPRYKLTIAVKTLCEREGVPFKLVPAKYTSIICPKCGYTNKKNRNGERFNCLRCGYKADADIVAAMNIAKRAITAPQMEG

SEQ ID NO: 61743 - protein, 591 aa, Unknown
  Microbial Source - Accession No. Ga0190334_1000016
VVKQTTFFCKECNKNINIPRNIIKKLESNHISQDQAIKKAKERHNKKKHSLILGIKFKLYVKNKEDKEKLNSYFEEYAKAVTFAAQIIDKIKSGYLPQWKKDKKLKRIIFPKGKCDFCGTKTEIGWISKRGKKICKNCYSKEYGENGIRKKLYATRGRKVNPSYNIFNATKKLAATHYNYAIREAFQLLEANRKQRQERIRRLLRDKKRLREFEDLIEKPDRRIELPMKTRQREKRYIHISQKDKINELRGYTLHKIKEKIRILRRNTEREERALRKKTPIIFKGNRIMLFPQGIKFDKENNKVKITIAKNLPKEFIFSGTNVANKHGRRFFKEKLNLISQQKPKYAYLIRKQTKNSKKITDYDYYLQYTIETVYKIRKNYDGIIGIDRGINNLACLVLLEKNQEKPCGVKFYKGKEINALKIKRRKQLYFLRRKHNRKQKQKRIRRIEPKINQILHIISKEIVELAKEKNFAIGLEQLEKPKKSRFRQRRKERYFLSLFNFKTLSTFIEYKAKKEGIRVIYIPPERTSQICSHCAIKGDVHTNTIRPYRKPNAKKSSSSLFKCKKCGVELNADYNAAFNIAQKSLKILST

SEQ ID NO: 61744 - protein, 1341 aa, Unknown
  Microbial Source - Accession No. Ga0190361_1000443
MNKQNTKQEIWSRFTRLYSLNKTLRFELKPVGKTADFLKQNKVFERDKTIDDSYNQAKFYFDKLHQKFINEALKKKNVRGLDLKDFADKFLQLKNEIQILKQKGERNKIYQTEKEIADLRSKYYRQIKSFLDKRASDWIESYRRKGVKLHKTDLKQNGTDFLTKAGILGILKYEFPKEKETKFVKQCWPSLFVDDKVDLGNKVYIFDSFNNFTTYLAKFQETRKNLYKDDGTNTAVATRIISNFERFLSNKKIFDEKYKNLKGIGLAKGQMKIFKHDYYYNCFIQEGIDKYNKILGEINKISKEYRDKNKLDKSQLPLFKTLDKQILGEMVKKKEIITKTENETEAQSFVKIFKELITKNKAKIPKAKLLIDDLTNGKFENDYEKIYLKRQAINIIANKWFRNPTEFLSKLPQSSKSRKDGESLKIKSFISFLDIKNGLEELDDERDYLGRIFKDKYYRDENNNEVLLNENVRESYYSQFLKVLKYEFESLFKDKFEIKTDKKEKQIFWGYTRELESKAEKLSSFTREKISLVKNYCDASLRIYQMMRYFSLETKSEKDIPVDCSTEFYNRFDEYYKDFNFIRYYNAIRNFVTKKPFDDDKIKLNFESGNLLTGFDKNKESEKLGIFLRRDNKYFLGIINKEHNKIFDEKKYPELKGKATDRYEKMELRLFPNPKRMIPKIVFADKNVKEFGLSENIKRIKEDMRVRKENKFSKDKLIKLIKYYQDCLKKGGYKKEFNFTWKNADEYQSLSEFYSDIEKNNYKIKFIKISDRYIDERVAKGDLYLFEISNKDFVWPNKKKNIHTLYFLNLFSDENLNNPIFRIGANAEIFYRPASLKPKKEIRGRHKKKIIKYKRYTEDKILFHLPIVINATKGSLKQRQFNKRLNQFIAKNKDRINIIGIDRGEKNLLYYTVINQQGEILEHSSLNEINGVNYFNKLVEKEKERQLNRQSWEPIVKIKDLKKGYISYVVRKIADLVEKYNAIVVLEDLNMRFKQIRGGIERTIYQQFEKQLIDKLGYLVFKDNRNSQSPGGILTGYQLTAPFTTFRDLGKQTGIIFYTTAEYTSKTDPLTGFRKNIYISNSVSNKEVIKLIEKMKIGWDKKEKSYYFIYNQKDFNSLIDKEWIIYSKVPRVRREYNKKSGKWDYKLIKPENLNQLFKELFEKWNFKNIKSNNLKFEILQRKEELAKNRHIIDDKEVNFFQRFIYLFNLLLQIRNTISLNFEFDSYSRRLKQIDYGVDFIASPVKPFFTTAGIIYLGKESNENKIEKDQKKILVGKNFADFEKLFKNCSSDGFDSDGVGAYNIARKGIMVLERIKENPDRPDLYISKEDWDKFVINNSLVK

SEQ ID NO: 61745 - protein, 541 aa, Unknown
  Microbial Source - Accession No. Ga0190361_1001609
MITLQARLQIENKNLLILENLMRRYCSAYRYAYNRLLEKKNENDVRKEIQKIFNLHSNYAESAVNEAKALIFSCKERGQNPKKVIFGGRLLFEKLSKKHLTGKKREKLKEKWKEKRQGVLYAIGRKHRKGNLNLRLVEIENNLYLRINTGKKEWIYAKIIRKVKRNKDKWIDFIQRLKLAEKTKEYFPYTVKILKRDKKFYAHISFEEILPEKLKITKENGIIGIDVNASPFHLALATSSKDGNLLSYKKISLHELINANKNKRKYLEWLTAHEVINYALKNNKAIAIEKLEGLKNEKRGSGRAKFRKRLQQFCYRNILEKIKILAKREGIEIIEVNPFYTSVIGKLKYSPLYNIDKDTSAAFVIARRALGFKEEIPENYKNLLKDEDFLSYAIAELEEKVEEIKEKKNKEKNKYKRNVIKTELKKLKNELNLLKKHLKDLKSGKREPATQQPVNLGKKQVRGKLSGLLKSWRVLSAALTVPYLEKFLQVNGTCRDFSPLKKLLIKGDWIRAVSRLVPDSGQGRNFYKFGKQLNIFEKLVS

SEQ ID NO: 61746 - protein, 340 aa, Unknown
  Microbial Source - Accession No. Ga0190361_1003780
METVKLTVRAVIPPRDKGLRKLMREYKAYKKALISKVREAVREVIKDKNLRIYSQQKWMVDKKLNEYLKNLPFHPMPFHNQSVWIQKKDGRFWIHFKTKEGEAVCYLHVPAKYQSLIEKASGENNSILGQVELIEDKKYGWVNCHITLRLPKPKPYEPKAWLGVDIGWNKLATSIACTCNPHLKFFSPTVHGKQFKTRIIQLRYLLKQYSRKKKAWKKWDYRLKHTIKYTVGVVAKEIVSKAKKLKAGVAMEKLTFKSTTKGYLVPRYKLTIAVKTLCEREGVPFKLVPAQNTSITCPYCGHKDKKNRNGERFKCRKCGYQADADIIGAMNVARGVINGL

SEQ ID NO: 61747 - protein, 390 aa, Unknown
  Microbial Source - Accession No. Ga0190361_1003780
MEKNETVKLTVNAVIPPRDKGLRKLMREYKAYKKVFISRVKEAVKPVIKDKNIEVYSIQKHLLGKKLTEYLKNLPFHPMPFGNQSYWLEEKDGNFWIRIKTKDGEAVCFLKVPSKYQHIMKKASGKTCPYQTNGGCEFATCPFNTPKMCSKINPHLGEMELIEDRKYGWVNCHIVLRLPKPEPYKPKCWVGVDTGWNKLATSIACAVNPHLRFFNPTFHGKQFKTRIVQLRYLLKQYARKGRAWKRWNYRLKHTIKYAVGVVAREIVSKAKKLKAGVAMEQLTFKSTTKGYLVPRYKLMIAVKTLCEREGVPFKLVPAKNTSITCPKCGYKEKKNRNGEWFKCLKCGYQTDADLAGAMNIALRALTATRMEGLESQLSTATYILGELTVL

SEQ ID NO: 61748 - protein, 350 aa, Unknown
  Microbial Source - Accession No. Ga0190363_1000125
MGSQPTIKITVKGVISPRDLGLGKLMREYVVYKKVLISRVKDAVRQIVKDKSITVYAQQKWMVDKKLNEYLKNLPFHPMPFHNQSIFIENRNGHFWIHFKTKQGEAVCYLRIPEKYYPLIEKACGTTFGENPVLGQVELIEDRKYGWINCHITLRLPKPEPYKPKGWLGVDIGWNKLATTILATKNPHLKFCNPTVHGKTFKTRILQLRHLLKEAQRKRNAIKKWENRLKNTIKYVVGFTAREIVSKAKRLEAGVAMENLSFKSVTKGYIVPRYKLIVAIKTLCEREGIPFKTVPAQNTSITCPYCEYTNDKNRVGKRFQCLKCGYQADADIVGAMNIAKRAYDSYPDGG

SEQ ID NO: 61749 - protein, 483 aa, Unknown
  Microbial Source - Accession No. Ga0194111_10067953
NKFVFTSGECDYCQKQNDISYVHSRSGKKICRSCYDKEFSVNAIRKKVYPTRGRKSNPNYNIFNATHKLSGTHYSYAVDEAFQLLEANKRQRQQRIKRMIKDKRKLREFEDIAKYSDKRYELPMKERQREKRYVHISQKDRANELKGYTMAKVYGKIKILRRNTEREEKSLRKKSPIISKGKRIMLYPQGVQFEREKNKVKVSISKDLPKEFEFSGTNVASAHGRLFFEEKLKEILKQKPKYSYLIRKQINKDKDSPKYEYYLQYTTEIPPKAEISYKGVIGIDRGSNPNLAVLAFLEKEKDKPSIVRFIRGSDIVALKVQRRKHLYFLKGAHNKKAKIKNIRLIEPRIQQILHTKAKEIVELAKDKNAAIALEQLEKIKKSKFRQRKIEKFRFSLFNFKTLSTFITYKAKKEGIRVIEVPPEMTSQTCSHCHSVDTQRPYKKPNAKFASYSLFKCNKCGVELNADYNAAFNIAQKGLKILNS

SEQ ID NO: 61750 - protein, 462 aa, Unknown
  Microbial Source - Accession No. Ga0207429_10023
MIGGINVAKRKRDKNAVVKTLKIELVDVLNYEPPPKKDGEEYSEKEKRRELIKELRRLQRKVAQASNYISREYFLWELKRREAEEKGIILNEKQELGTTLQNKGYRIAAEVLKGFNTENIAVLSSQLWENWKKRVSDVFNGSMSLPSYGQKQPIPINKKNYNIIPYKNNKYMIEITFYSPSEGRNRKLQFITANLNDYSQNIIKNILSQKYRKGSANFIIENNPNKNLSSQKIFFHISYEFIPQPQDESTENILGIDLGLKNVVAMQVYNPKKQEFEYIKYNDCIIEGGELVAIKRKIEALKHKKGKATKWKGEGNTGHGRKKKMKMVYSIGKKISQIKNTYNNKIAKYIIDFALKHQCKYIKMEKLTSHGFENTLLQEWRYYDLQTKIKNKAKENGITVLFVNPKYTSQKCSVCGYINSENRKTRDNFKCTKCDNEMDADINAARNIAVSEDIIKEDDEED

SEQ ID NO: 61751 - protein, 401 aa, Unknown
  Microbial Source - Accession No. Ga0207433_10006213
MEEQLKLCVRAVIPPKDVGLRKLMHEYVVYNKVLIPRVKQAVRQVIKDKNITVYSQQKWMIDKKLNEYLKNLPFHPMPFHNQSVWVQEKDGKFWIHFKTKQGEAVCYLHVPAKYHSLIEKACGEDNPVLGQVELIEDQKYGWVNCHITLRLPKPKPYEPKGWVGVDVGWNKLATSIACTCNPHIRFFNPTFHGKKFKTQIIQLRHLLKQFQRKDTNVNKWENRLKNTIKYAVGAAAKEIVSKAKKLKAGIAMESLTFKAVSKGYLVPRYKLMIAVKTLCEREGIPFKLVPARYTSITCPKCGVKHEKNRQGKRFRCLKCRYEADADVVGAMNIALKAFDSFPDGGENDVGFTPASKADRGLPREVGHVASPQAPMNDDSYKAGRKHNKIENEVRKEGLSRL

SEQ ID NO: 61752 - protein, 1008 aa, Unknown
  Microbial Source - Accession No. Ga0207433_10011113
MPQQPTTQRAYTLRLRGADPNETSWREALWQTHEAVNKGAKVFGDWLLTLRGGLDHALADTKVKGKKGKPDRDPSAEERKARRILLALSWLSVESKLGAPADFIIASGEETAEARNAKVIAALEEILRSRDVAEEAIGDVTKKPEDQPGTWIGDCAPSLTAAIREDAVWVNRSKAFDEAVKSIGSSLTREEAWDMLERFFGSRDAYLAPAKGSEDESSETEQEDKTKDLVQKAGQWLSSRFGTGKGADFCRMADVYKKIAEWADNAQADTTGNDAINNLAAFLSEFNPASNDLKGVLGLISGPGYKSATRNLLTQIAAKATVTQQDLARLKDTATEDARKCYQNTGSKGQRRYADSILKDVESVCGFTYLQEGGPARHSEFAVILDHAARRVSLAHTWIKRAEAERRKFEEDAKKIGQVPKAAKDWLDQFCLERSGVSGAQEPYRIRRRAVDGWKEVVTAWSKADCKTAEDRIAAARALQDDPEIDKFGDIQLFEALAEDDAVCVWHKDGDAAKTPDPQPLIDYALAAEAEFKKRHFKVPAYRHPDALLHPIFCDFGKSRWDICFDVHKNTKTPFPRTLCLTLWTGSEMVSVPLCWQSKRLARDLALDHGRQDLGSPKVTRADRLGRAASNVTENDEVKIAGLFEQADWNGRLQAPRQQLEAIARYVAKNGWDEKAKKMRDAIQWLVTFSAKLQPNGPWCAYAEEHNLNKDPQYWPHADTNKDRKSHARLILSRLPGLRVLSVDLGHRYAAACAVWEALSDKAFKEDLEGKKIIRGGTSDNSLYCHTEHEVNGKKHITIYRRIGADTLPDGTPHPAPWARLDRQFLIKLQGEEEGVREASNEEIWQVHQMECTLGRKTPLIDRLVAAGWGSTEKQKARLDALKNLGWKPVEKAETSEDADTEEEELSFRPSLSVDELMSSAVRTMRLGLKRHGDRARVAYYLITDEKTKPGGIKEKLDENGRIDLLQDALVIWHDLFSSRGWRDDAAKRLWDENIARLCGYKAPEEIG

SEQ ID NO: 61753 - protein, 1384 aa, Unknown
  Microbial Source - Accession No. Ga0207433_10012523
MTNNIKNQKSIWSEFIKQYALNKTLRFELKPVGRTEDFLKQNKVFEKDKTIDDSYNQAKFYFDKLHQKFINEALFSESVKSINLKDFTEKFLGLKSEIQKLKSEKKQEEANKKEKEVNDIRNDYYKKIKSLLDKKAEEWKKKYKDGGLKFRKTDLKQKGTDFLMKSGILGILKYEFPKEKEEEFKNKDWPSLFVEDKANPGNKVYIFDSFNATYLLKFQETRKNLYKDDGTSTAVATRVISNFEKFLNNRKIFEDKYINHWKEVGITEEEKKIFETDYYYNCFIQGGINKYNDLIGQINQKTKQYRDKNKIEKSELPLFKVLDKQLLGEVIKERELITKTENETEEDVFVKRFKEFVDRNKQRIPRAENLMNDLINEKFESDYYGIYLKRAAINTIANRWFKNTTEFLLKLPQASKSKENKESPKVKPFISLLDIKNALDDFEKEKESLGTIFKDKYYKTKESDEAPLNNDSQESYWKQFLKIWGYEFNQLFEDKFNEEGIKIFWGYAKELIEQAENLNSFSRKKEEIAVVRNFSDAALRIYQMMKYFALEAKKEDDIPLDYSTEFYNRFNEYYQDFKFIRYYDAIRNFVTKKPSSEEKIKINFESEELLRGWDISKIKGCLGIILIKDNEYYLGVVKKEKDKLFDYYENKNDTEKDIQRKNHLKKEIIAKPNEDYYIRVKYKQIANAGKDIYNLVLMPDGNAVRFTKKEKKEKYWPEEIKRIKKEGSFKNNKRDLVKFIDYFKKCASIYWKEFNLRFKSSEEYENFKEFTDSINIQGYKISLDEENENKIKSEYIEKQINEGNLYLFKIINKDFCKNKKQNSKKNIHTLYWEYLFSKDNLIKNEYPIIRLSGGAEVFYRKAFNVKKEPVVLKRGNSEKPALRENKPIFHLNRYLEGKYLFHCPIQINATAISNISNKVFSQKINNFISDKNEINIIGIDRGEKNLLYYTVINQKGEILAHKSLNEINGVNYLEKLIEREKERQIDRQSWEPVVKIKDLKKGYLSYVVRKIADLAEKYNAIIVLEDLNFGFKQKRTKIERTIYQQFEKQLIDKLGYLVFKDDRGSESPGGVLNGYQLVAPFTTFKDLEKQKQTGIIFYTNAEYTSKTDPITGYRKNIYISNSASQKTIKENLINKLKALGWDEKEKSYFFTYNQKDFGSPISKEWTLYSKVPRVRREKNNSNGYWDYQPIDLNEKFEDLFEKYGINKKSSDILSEIKELIKNNEEKLIQKQEFDGKSKKFHERFIYLFNLLLEARNTMSLKVKLDKRGNEIKLDEIDYGVDFFASPVKPFFTTAGIRFIGKQNEDKKIEKQIKEKFAEENFADFKGLFKDCSSDGFDSDGVGAYNIARKGIMILERVKQNPQKPDLYISKEDWDDFVLKNAIIK

SEQ ID NO: 61754 - protein, 1239 aa, Unknown
  Microbial Source - Accession No. Ga0207433_10020534
LLGLDPATTDFADCAKRVLRNNGATAEARAAALFQLLQEANASANASDLNQMCVSRLPWFNITLTGKLNRQRLNQMCVSRLPWFCTPKGQLAATPKTVVAQQENAMLAIIRDVHEAAPADLKTVAQRLEPGYFVTQFPKQQMTGDEARAEAERLFAACQKKFKELAEYEDGYRQCLDALGPNLSLPRLGRKPKGAYPYAVVFKLMPTNATWECFKRVTASLYKRAQKGVVSPVSADSIADVRTNDEPLFEYFTNLALVRPPGNKDRAVWFEFDLAAFIEAIKSPHQFFQDTIKREQAVAQIKAKLDAMDGQGRAASGEEDALPGFEGDDRITLLRELVTDTLGYLAEADASTSPGGKIEYSIQERTVRGFAEVKRRWRDLVEKGKATEDALLKVLAEEQTEHRDDFGSATLYRELAKPKFQPIWRDPGTQPWHADDPLRAWLEYRELGRELEDKQRPIRFTPVHPVHSPRFFIFPKKKGGGRFGTVHEPGQLRVMAGIVAQTQHGWEPVPVRITYAAPRLRRDQLRDDVETDLESRPWLQPMMQALGLPEPDTADFSNCRVTLQPSAPDDIQLTFPVDVSADKLTTAIGKAARWAKQFNLFPDGDNFYNASLRWPHEKKPSKPPVPWHEALDNFSVLAADLGQRCAGAFARLEVRANDDFAGKPSRFIGETPGKKWRAALVAAGMLRLPGEEQTVWRPGATGPNFHTELSGSRGRMARPHEADDTADLLRAFDCPEESLMPADWRTSLSFPEQNDKLLVAARRYQSRLARLHRWCWFLTDEKKRQTALDEIREAEDMPAADDPQLTDKLRALLLQKQAALPGLLVRLANRILPLRGRSWQWETHPDKADCHLLTQTGPALPDVWIRGQRGLSMQRIEQIEELRRRFQSLNQMQRREIGGKPPIRRDDSIPDCCPDLLDKLDQIKEQRANQAAHMILAEALGLRLAPPPADKRQLRASRDVHGQYVKSREPVDFIVIEDLSRYRSSQGRAPRENSRLMKWCHRAVRDKLRELCEPFGIPVVETPAAYSSRFCSRSGVAGFRAVEVGPGFDREFPWMMLKDREDEGEPVRQLILQVATLNQGRDGKPPRTLLAPLAGGPIFVPIVDKLNGADIQPALAQADINAAINLGLRAIADPRLWSIHPRCRTQRQGDQMLTREKRKFGETGQPLAVHRADGVKPDDTRNPNFFADISGSLPAWESATLDGQHLLSGRCLRSEIKKRQWQRCAEINDRRMNRWMKGE

SEQ ID NO: 61755 - protein, 591 aa, Unknown
  Microbial Source - Accession No. Ga0207433_10021674
MTETLEILETPGETGRDEEKTVIVRQYGLLPPVDWDQDCQEHLWFQNRLWNTLVELERKHREDYFRLTGEDPELREIEDVLKALVEEKEALIGEKKALRQAARKKAGVDTAAQDLRIAEIRPEIRKLAGLAKEKRKEVRERLKPELDRLEEKRREAVKSARNASGLWWGNYNAVCASYETARSRALKSGAELKFHSFDGTGRFTCQIQGGMTVAEFFSGDRAAIVSADPVSPDAFWHPSRGERRRAARTKLRMTVFTTKDEKGHYVRRILTFPMILHREIPSDALIKQVVVSRKRVGTEFRWTVTITATRSGPPAVRADNAGLCGVDLGWRLVPEGLRVASIADAKGVRHIVLPEKMLRRMDHVEDLKSQIDQDTNRLLLWFRSRWPEISESFPEEIRERFLRHVRSPKVSARHLSGSVLAWRDNHGDFRPDLLAALETWRKSNKRLTQEMDNLRDKLSAQRTDLYRNEALRIVREHSVVGVEDFDLREVVKLEMPDGEKTTQPAAARANRVRAAVSDLRNWIRIQAAKTGSTVVRIPSADTTRACRTCLHVNRAGNPEDLIWKCDGCGAVWDQDENAAKNILRTVEVANG

SEQ ID NO: 61756 - protein, 1189 aa, Unknown
  Microbial Source - Accession No. Ga0207433_10022806
MLPFGAGALIIILNMQKGYNLHKKRIDLLNGEILRTIKYPLKPLNENSEKNKKQFELQIINDDLKIRGDLNLNDYLNYTFKNNHIYNLFDFWIDSLKCGVIWQPSFNNLKNLIEKIYLNKTISEEIFDNSIPEIKKFFDKNKFIENFILRTGIRENKSKKSFEKDLIKSLNDEFNKEEINKEAQDLIDKIINTFFNENKLKKLTIEEQNNLWLNKFNIDKSKLKTKELKYNYTFFIIPELIKFKENNLENLLNIRYEFIKNKNLNIEILQEILGLENNFNSFSNYFNEIIKNLQNDEYNLIYEDFISFYKFTNEEKEKILQSLKYLSEKSKQLGSPQILNLSWADYRSILGGKIQSWFTNYLQRKEKLEEQLNSLKENINKTKEYLLENFQENTDLKEIIYFLDKLFELSEVSKINNLFFDIHSTCKLKINNFFQKNIKQNEDDTVESNENLKGIFEKIYKPLNFYGQSRRENNIKIINSLQTVELGIIYTKKILNFLKNDLDFNKEENFEEIYRKNLNFLWNKLKENSLNSKNFKSKYKEIIIKNLNSYSNIKFEKIIKRPSYYVFYKSIYSKGTNLQIEFNKEINFKNIFIENINELYNFLINLEDKEIITDKNLLLDWIELSKNISSYFIKFTNIEKINLKEIFKDKDLNFFSNIAKYFETFGNVVEKQGLSYFVQSIFFSEFKGAATLYTKNKYLAKYNIQIIHSNEKFPLYYYSNNLKNHNKLLNPKDLIREKHNYFVSLKKIKILKNKDLEFLLLNKDNFQKIYNSFEDNKNDLLKLESSFYQIQFLEKFIYKPKNWENSKIELSEWSFILEKEYEIKWDLENKIPILNEIQNSKKNKLYIAIPFKISSYQKEYEEIKKSKENYILGIDVGEYGIGWVLINYKNKELKIINKGFFVSKNIAKIKDEFSKIQKKSQKGIFNESSNLISEIRKNAIGELRNKIHSVFIFYHSKNICYEYSINAFETGSGKTTAIYKSIKKSDTLSIIDADKKEQMHIWGKKLNKEIEIGKNLSSYASSYICSKCGKSLYQLKETDLENNEIKIIEREGNILKIKTPYGNVYAYSSKKEHQVDFIFNKTKSSFKELQKIMKDFARPPLNNNSEVIRKFTNLKENEIDILHQKRGSSCVFVCPFCLHVSDADIQAALMMSIRGVINNETKSKGEKIDYFQKNLEFLNELKEKPVIDL

SEQ ID NO: 61757 - protein, 396 aa, Unknown
  Microbial Source - Accession No. Ga0207433_10030792
LETIKITVKATIPPRDPGLRKLMREYTVYKKVLIPRVREAVKEVVKDRAVAIYADQKWLVAKRLLEYAKNLPFHPMKFSNKSYWVEWSEGFLLHVKTADGEAVCNLNVPLKYRSLLQAASGKACPYKGKCKPCPFNTPKMCDKINPHRGEMELIEDNKWGWVNCHITLRLPKPQPYEPKGWVGVDVGWNKLATSIVCTRNLQVRFFNPTFHGKTFKTRIIQLRHLLKEYQRKSRSVKKWGNRLKNTIKYAVGVVAKEIVSKAKKQKAGVAMESLTFKPVSKGYLVPRYKLMVAVKTLCEREGIPFKLVPAQYTSITCPKCGYVDSKNRNSEWFKCLKCGYQTDADLAAAMNIALKALNSSPNGGENGVRHALTPKTDEATRLRGAECCDPHKGDEQ

SEQ ID NO: 61758 - protein, 615 aa, Unknown
  Microbial Source - Accession No. Ga0207433_10045901
MLALKLKLDPTSEQMTVLDKMFWKWASICSRISAGKGKVTLEKLAPSESVTGIWFSKTQLNQAKTDVSDLVSALKKSAKQKEKSLGRDEERAREIREAIDHPESRDVNPERASNFRIKAWVQKTGNLSQKYHTIKYWQGQLKRLENAIQKRKQTIETIKKGRIHFKPTRITLHQNSFQISFGKNKLLLKPFHKSPSAQPPLEVPIITYPQQPLVGHNGGKSSQRSLEFLEHGILEFLAFALDKRFFGMNDAEKMLLKAKKPEKLLIKEAKLAKKKEAFNSKIKEVQKMLGRELDDNEKKILLEESKRFFKDIEAYRPNADYIKLLKKLADELFRKEDYFSPNKYPILVRKPINKYKVKKFSNLKPIDWEYFLQLSYEPFGAEPIAAKTVMGVDRGVKHLLAVAIFDPNTKTFTFNKLIENPVIGWKNRLKRLRKAIQRLERRTRVKTGEHILENQLKIKLKSIENRIKNLYHNISANIVKIAKDNQSVIVFERLEGRGLKQHGRSKGKRMKALNYFLSNFDYGKIASLIKYKADKEGVPVFDINPAYTSQNCAKCLLESGNLSDSEKNYYRDKNNSKIGYCKKHGYIDADLNAARTIAVCYDKGLNEPMPFDSRK

SEQ ID NO: 61759 - protein, 319 aa, Unknown
  Microbial Source - Accession No. Ga0207433_10075234
MRVSSLYRTVIIRLYPTEQQEKLLLKAEKEVLKFLEISRFEFQKMLYHKICEEIGISKRSLSLLVQRFTGSMGEKAILPFDDNAKFVNDNGIWFLEVQLFAGKGNRIRIPLAKTEVPYYSVLDELDGLPIVITRENSDWFAYVSIPVSRASNGLIVGVDFNYRKWVASPYKGKPFFFDVGEYVEKIDRLQRMASRFQSRGEEEKVKECYHLIRETVKLAHGNFLSGIKERFGVCTIAMEDIEKMYKMIEEIDSKMTNNWLNTKTALRQFILRAMAKGFEVVEVDPKDTSKTCHKCGNPVKIYGKHKRLASCEFCGYRDY

SEQ ID NO: 61760 - protein, 316 aa, Unknown
  Microbial Source - Accession No. Ga0207433_10075916
YSLSLLAQRFTGSLGNKAIIPLNTAYNARFICENGIWFLEAQLLKGRGNRVKIPVAKTENKYYAAIGELDGLPLYVTREDDKWFAYVSIPVNAENNGRVIGVDFNVMEWVVAPADGGPVLFFDASWYSREIDRLQRLRAQLQSKGDLEGVQAACKSMLDIVKLAHGNFLARIQEKFGVCVIGMESVETLYKLTEKDNAMINNWLYSKTALRQFALRAMAKGFEVVEVDPKDTTRICHRCGAPVKINGRRGRSITCPSCGLTNYNRDLNAARNIARKAAEEWAKRVESRKQLEKLEPIAIVANGGGKDENKPEDEST

SEQ ID NO: 61761 - protein, 368 aa, Unknown
  Microbial Source - Accession No. Ga0207433_10082276
MNDLIKFAVTCGIDPRDHGTLKLMKEYKIYKKQFLSKVKNAVNQVVKDKNVYVYSIQKFLLEKKLLEFVKNLPFHPMPIGNQSYWLEKSTFKTPIGEYPCVNLHVKTKDGEAVCKLIVPKKYKDYVLEATGKSCPYFHDGKCEFERCPFGTPKMCKKINPHRGELELIEDLKNGFIRAHIVLRFPKPTPYEPEGWLGADVGWNKLAASIIYKKNPGFFAPSVHGKDLKTRIIQLRHKQKELMRSGKISEVWENRLQNVIKYAVGKTAKEIVSKAKKHRVGVAMEDLNFQSVTKGFLIPRYKLMVAVKTLCEREGVPFKLVPAKSTSITCPKCGCVDENNRNGERFKCLSCGYEADADIVGAMNIAKKA

SEQ ID NO: 61762 - protein, 837 aa, Unknown
  Microbial Source - Accession No. Ga0207747_1007959
SRAIRGWTEIVKKWMKLDPSAPQGNYLDVVKDYQRRHPRESGDFKLFELLSRPENQAAWREYPEFLPLYVKYRHAEQRMKTAKKQATFTLCDPIRHPLWVRYEERSGTNLNKYRLIMNEKEKVVQFDRLICLNADGQYEEQEDVTVPLASSQQFDEQIEFSSEDTGKGKHGFSYYHKGINYELKGTLGGARIQFDRDHLLRRQGVKAGNVGRIFLNVTLNIEPMQPFSRSGNLQTSVGRALTLKNFQVIAFKPKELTEHIKESEKNAPALGVESLQTGLRVMSVDLGQRQAAAISIFEVVSEKPDDNKLFYPVKDTDLFAVHRTSFNIKLPGEKRTERRMLEQQKRDQAIRDLSRKLKFLKNVLNMQKLEKTDEREKRVNRWIKDRGREEENPVYVQEFEMIRKVLYSPHSVWVDQLKSIHRKLEEQLGKEISKWRQSISQGRQGVYGISLKNIEDIEKTRRLLFRWSMRPENPGEVKQLQPGERFAIDQQNHLNHLKDDRIKKLANQIVMTALGYRYDGKRKKWVAIHPACQLVLFEDLSQYAFYDERSRLENRNLMRWSRREIPKQVAQIGGLYGLLVGEVGAQYSSRFHAKSGAPGIRCRMVKEHELYITEGGQKVRNQKFLDSLVENKIIEPDEAWRLEPGDLIRDQGGDKFATLDERGELVITHADINAAQNLQKRFWMRTHGLYRIRCESREMKDAVVLVPSDKEQKEKMETFFGNGYLQPLNQENDVYKWVKGEKIKGKKTSSPSDDKELVSEILQEASVMADELKGNRKTLFRDPSGYVFPKDRWYTGGRYFGTLEHLLKRKLAERRLSDGGSSKRGLSNGTDSDSNVE

SEQ ID NO: 61763 - protein, 1283 aa, Unknown
  Microbial Source - Accession No. Ga0207868_1000002
MNRFINKYSLSKTLRFELEPIGKTIENIQNKGLLIKDEQLAESYKKMKKTIDGFHKYFIELAMQNVRLTKLEAFADLYFASPERKKDEKFKEELKKVQDELRKEIAHGFKTGAAKEIFSKLDKKELITQLLENWINTQPEKPYFDESFKTFTTYFGGFFENRKNIYSDKEQSTAIAYRMIHENLPKFLDNIRVFGQIKNIPELYENANLLFQEIKNDLNINSIDEAFELKYFNEVLTQKQIDLYNLIIGGRVPEEGKSKIRGLNEYVNLYNQKQKDKSKKVPKFKMLYKQILSDREKTSFVPEKFQSSEEVTSAINSFYHCNVISFQPKDKPDAENILEKIQDLLAALKDYDLNKIYLRNDSQLTFISQKIFGNYAVLGDALNFYYDNVMHPGYEMEYKSANERKKKKLEEEKQAFIQQDYLSIGQLQDALDKYIPEIDDSVDWKRNYTTSCIADYFKNHFNAEKKEGEEKEFTLPANISAKYSCVKGLLENYPKDRELYQDKKAIDNIKLFLDALLELLHFIKPLILRADIALEKDAAFYGQLEPWYDSLKELIPLYNKVRNYATQKPYSIEKFKLNFENSTLLDGWDVNKEKDNSGVLFIKDGHYYLGIMDKKHNKIFRDIPKATSERTYRKINYKLLPGASKMLPKVFFSDKNTSYFSPDEEIQRIRNHGTHTKNGDPQEGYEKLDFNLNDCHKMIDFFKSSIQKHKDWKNFGFRFSPTYTYDSIDAFYREVEAQGYNITFTEIDESIIDRFVEEGKLYLFRIHNKDFSPFSKGRPNLHTLYWKAIFSPENLKNVIYKLNGQAEVFYRRKSIQPEQMVIHKSGEAIDNKNPLTGKKQSTFHYDLIKDKRYTVDKFQFHVPITLNFKASESNIINYEVLQYLRTQPDVHIIGLDRGERNLIYLSLINQKGELLYQEPLNALKSDKFNVVTNYQELLARREKERDMARKSWGTIENIKELKEGYLSGVVNKIATLMVKHNAILVMEDLNTGFKRGRFKIERQVYQKLEKMLIDKLNYLVFKDKSEDEPGGLFKALQLTNKFKSFKEIGKQNGFIFYVPAWNTSKIDPTTGFVNLFYIHYENMEKARAFFGKFQSISYNHDKGYFEFAFDYNDFTTKAEGCRTNWTVCTHGDRIRAFRNPEKNHQWDYKTIHITEEFMALFRKYGIEFSGNKDLREIITGQKDAAFYKSLLDLFRLTLQMRNTNQDWDYLISPVLNENGEFYDSRKADNHLPQDADANGAFHIAKKGLMWLKQIQQFEGDNWKKLDLDKTNKGWLRFAQGYQF

SEQ ID NO: 61764 - protein, 536 aa, Unknown
  Microbial Source - Accession No. Ga0208151_102415
MSSKTSSDKKNGKHSRQKESDNKRSLTVRLNLSMEQQIYLTSLIKAYTSIAKKLHEEARAKFMELTNGEIKNIKELKDVKKKFNSWFNEYFKTQRKWITDSLGSNISDQLFQFLMAQYKNFFANYENFFEHKVDGRPSFPSLPELFQIRDRGVEVDFDKKILIIKLKGKQLRLKFQSDRILYHGDPGAVTIKKVDGKFYAYIPFDFNPKFNEEKKGAIDIGLSNFFAAVTEDGDVILVKAKQYTYIYNMYKQRIKELDRMIGNIRKHTLKMYVTPPKSFRYHPLLGFTNNREVSKILISLYTSRYDEKRGKKKKLTREDMTNIVKKIRKVNYSLRIKRLNFMKVDGHIKLFPKKSRFMNDVYRDLPMLHKLEYERRKLFEKRDRTLTHIRRTAINALLRILKERGVTRIVVGYPRYINKNRNELTVNLFQYRKTINDLKIIGERYGIKVEELEEYGTSIRCSICGEEHKNGRIERGLYRCEKTGKTINADVNGALNIFYKAFSKMPKQLKKIETIKLTSSPPQRDEVSHLLSYRKL

SEQ ID NO: 61765 - protein, 1459 aa, Unknown
  Microbial Source - Accession No. Ga0208195_1004385
MPQQVKPPVTQRAYTLRLRGADSNDQSWRDALWQTHEAVNRGAKAFGDWLLTLRGGLDHTLADTKVKGGKGKPDRDPTDEERKARRILLALSWLSVESKLGAPEGFIIASGTEAAEDRNAKVVAALEEILKSRNVATNEIDEWKNDCSASLSAAIRYDAVWVNRSKAFDEAVKSIGSSLTREEAWDMLERFFGSRDAYLAPAKGSEDESSETEQEDKAKDLVQKAGQWLSSRFGTGKGADFRRMADVYNKIAEWAGNPQTSTTGNEAINNLAAALSEFNPASNDLQGVLGLISGPGYKSATRNLLTQIAAKATVTQQDLASLKDKATKDAQKCNQNTGSKGKRPYSDAILKNVEAVCGFTYLQDGDSARHSEFAVILDHAARRVSLAHTWIKRAEAERSRFEEDAKKVDQVPEAAKDWLNNFCLERSGLSGAQEPYRIRRRAVDGWKEVVTAWSKADCKTAKDRIAAARALQDDPEIDKFGDIQLFEALAENDAVCVWHKDGDAAKAPDPQPLIDYALAAEAEFKKRHFKVPAYRHPDALLHPIFCDFGKSRWDICFDVHKKVQTPFPRALCLTLWTGSGMVSVPLCWQSKRLARDLALGQDAQNDGSSEVTRADRLGRAASNVTKSDEVKISGLFEQADWNGRLQAPRQQLEAIAVVRDNLSLSDQERERRMSGLMDRIRWLVTFSAKLQPQGPWCEFAEKLQLRINPQYWPHADTNKDRKSHARLILSRLPGLRVLSVDLGHRYAAACAVWEAVNAEQIKVACQAAGHREPKESDLYLHLKRKVTKQKKGNQVESEKTTIYRRTGADTLPDGKLHPAPWARLDRQFHIKLQGEEERVREASNEEIWAVHQLEAELGRTVPIIDRLVKAGWGQAGKQKTRLEALRELGWTPAKEAQGSDETEEGEPRKPSLSVDELMSSAVRTMRLALNRHSDRARIAHYLITDEKTKPGGIKEKLDENGRIDLLQDALVMWHDLFSSRGWRDIAARQLWDDHITRLSGYKAPEEIGEDASGVERKTKQKENREKLHDVAKALAQDVTLRGALHDAWKKRWEEDDGRWKKQLRWFKDCVLPRGKHASDPTIRKVGGLSLPRLATLTEFRRKVQVGFFTRLHPDGTRAETGEKFGQSTLDALEHLREQRVKQLASRIVEAALGIGSEGGKGWDGAKRPRQRISEPRFAPCHAIIIEDLTHYRPEETRTRRENRQLMTWSSSKVKKYLAEACQLHGLHLREVSASYTSRQDSRTGAPGIRCQDVPVNEFMRSPFWRKQVKQAEAKQAENKGDARERFLCDLNAMWKDKTVADWEKAGIIRVPLRGGEVFISADPISPAAKGLQADLNAAANIGLRALTDPDWPGKWWYVPCDPASFKPTSDKVKGSTAINLDVPLKDVSAVSGDVTRKKSGKAKSQSKEVVNLWRDVSSREILTTGVAWEVYSAYQNQVQARVVDILRRSACPKNSREKQ

SEQ ID NO: 61766 - protein, 1546 aa, Unknown
  Microbial Source - Accession No. Ga0208357_1002034
MIAVDSGKEQPIVTTQRAYTLRLNGADKNDNSWRERLWNTHEAVNRGAKTFGDWLLTMRGGLSHTLADLGIHGKGNKPERKPTQQEINNRRIVLALSWLSVESEHGAPKDYYVPHDLDTNTGERTNWKTIEALREILKCRGVSNEEIENWLAACKDSITATIREDAVWVNRSNAFDNAMKVVGESLSREELWDLLEPFFASKQSYLELNTATDVQQEQSDENAEESKELSPDKAKDLSLKAGQWLSSRFGTGKGANFQKFAEVYDALALQCKSIKPATSGTEVCKCLASAVSQFAPHSQDLNGLLELISGPGYKSATQNTLKRINALQSVSGEDIQKLRGNCEADAAKSKQKTGSKGNRPYADVILREVEAACGITYLGTSDGPSRHWQYAVILDHAARRASMAHSWIKRAEEQRSKFEVERNKLNNVPVDAREWLDAFCAQRGSDSGAKDAYRIRRGAVDGWKQVVAAWVDSLGATENAGSELLSEAEALRIQAARELQDSVEKFGDIQLFEALARTEAKCVWTTNGKTDAQGLLDYVAGTDAIAKKRRFKVPAYRHPDALLHPIFCEFGNSRWSIEYAIHRAPAGLTKAQQLLEKKRTEIAKADLALAGATGTPKQTLIEEKLEKLRSAFKQQDAEVAWLGSHHAMTMGLWDGRHIQDTQLLWQSKRFGSDIGQPEVAAPLLVSRADRFGRAAVAIKEYSSAIPFGLFDLKDWNGRLQAPRRQLEAIAAIANRTNLTAEQKKQLVSKRISSIRWLVTFSAKLQSQGPWLEYATKHDLFEKRNGEIVSSPAQTRDAWRGIAFPFWHPGNPKGKGSAVRHVLSCLPGLRILSVDLGHRYAAACAVWETLNSEQIQEVCGNSGTEAPGPLALYLHLEKVSNGRTRKTIYRRIGADRLTDGSLHPASWARLDRQFLIKLQGEDRDARPATSEEIAAVDQIESALGFVRQAQRTGSDLLVDELMSDALRILRLGLRRHSDRARIAFNLTATKRPFSGGREEPLDKDGRIGLLQETLLTWHELNVADRWKDDVAEEMWHQHINPLLEDQVSIEVDNQDGSVTSARRRAQRELLIQKLKPIAIHLENNDSLCRQLQSLWNAQWQAEDRAWRARLRWIRRWLLPRGVKRDKDSHKSIRHVGGLSLTRIASFKVLYQIQKAFHMRPCSEDLKRNIPDRGDNRLEGFGQSVLDAMERMRENRVKQLASRIAEAALGIGSETDRRNKNGTQNKRAVEQSEDSRFAPCHAVVIENLTHYRPDETRTRRENRQLMDWSSSKVKKYLSEACQLYALHLREVPAAFTSRQDSRTGSPGRRCNDVKISEFASLSYWRKQVKAAEENQKKGNNGNARERYLLWIDKKISSGQSKQTDSFLIPSDGGELFVSAHKTGESQTFGKRKKLATLQADLNAAANIGLRALLDPDWKGAWWRILCDPTTFIPDKKKYAGSITIETSKALRVMAKVKLDVLMSADKAKQSAQNKGKRSNADGNRLMYLWRDPSSQPVHPDVLDGGEWQFYPEYKNGVEDRIIRKLLKSYDRTSRQDNQFVPGDEDIPF

SEQ ID NO: 61767 - protein, 505 aa, Unknown
  Microbial Source - Accession No. Ga0208429_100128
MSESKRALIVKLNPTRDECVCLISLIKAYTAIARKLNNDAYAKFMELTTNGLIENIKQLKDIKKKFYSWYNEYFKTQRKWITDTLGSNITDQLFQFLRGQYENFFANYENFFKHKIEGRPSFPTLPELFQIRDRGVEIDFDKKVLTIKLKGKRLSLRFQADRILYHGDPGSVTIKKIDGKFYAYIPFDFTPKFEEGKKGAIDIGLTNFFATVTEDGDAILIKAKEYTYVYNMYKEKIKELDRIIGKIRKHTLRMYITPPKSFKHYPFLGFTNNRQVSKIITSLYTSWYDAGRAKKKRLRREDMTSIVRKIRKVNYRLRITKLDFVKLNGHVKLFPKKSQFVKDVYKDLPILHKLEYEKKKLFEKRDKTLMHIRRTAINALLRFLREKGVTHVIVGYPYNINKNRNELTVNMFQYRKTINDLKTIGERYGMKVDEIVEYNTSITCSICGEVHKNGRIERGLYKCEKTGKMINADVNSALNIFYKAFSKMPKQLKKIETIKLTFSQP

SEQ ID NO: 61768 - protein, 499 aa, Unknown
  Microbial Source - Accession No. Ga0208429_100584
VGQQIYLTSLIKAYTTIAGKLNRDAYAKFMELTANGVVENIKQLKDIKKKFNLWFNEYFKTQRKWITDTLGSNVTDQLFQFLHGQYENFFANYENFFKHKVDGRPSFPSLPELFQIRDRGVEVDFDKKILIIKLKGKQLRLKFQSDRILYHGDPGAVTIKKMDGKFYAYIPFDFTPKFEEGKKGAIDIGLVNFFAAVTEDGDVILVKAKEYTYIYNMYKEKIKELDRIIGKIRKHTLQMYIIPPKSFRHYPFLGFTDNRQVSKIITSLYTSWYDVERAKKKRLRREDMTSIVRKIHKVNYRLRITKLNFVKLNGHVKIFPKKSPLVRDIYKDLPILHKLEYEKKKLFEKRDRTLRHIRRTAINALLRFLRERGVTHVVVGYPYNINKNRNELTVNLFQYRKTINDLKIIGERYGIKVDEIVEYNTSITCSVCGEVHKNGRIERGLYKCEKTGKMINADVNGALNIFYKAFSKMPKQLKKIETIKLTSSPSTRLFAPLTT

SEQ ID NO: 61769 - protein, 508 aa, Unknown
  Microbial Source - Accession No. Ga0208429_100770
MPSNTDSKRALTVRLNLSTGQQIYLTSLIKAYTTIAGKLNKDAYAKFMELTPNGVVENIKQLKDVKKKFYAWFYEYVKTQRKWITDSLGSYVSDQLLHFLDAQYKNFFSNYENFFKRKIDGRPSFPSLPELFQIRDHGVEVDFNKKELMIKLKGKRLSLRFQADKLLYHGEPGSVTIKRVDGKFYAYIPFDFTPKFEEGKKGAIDIGLANFFAAVTEDGDVILVKAKEYTYIYNMYKEKIKELDRIIGKIRKHTLRMYVTPPKSFKRYPFLGFTNNRQVSKIITSLYTSRYDVGRAKKKRLRREDMTSIVKKIRKVNYKLRITKLNFVKLNGHVKLFPKKSQFIRDIYKDLPILHKLEYERKKLFEKRDRTLRHIRRTAINTLLRILKERGTTHVVVGYPYNISKNRNELTVNLFQYRKTINDLKIIGERYGIKVDEIVEYNTSITCSVCGEVHKNGRIERGLYRCDKNGHVINADVNGALNIFYKAFFKMPKQLKKIETIKLTSSSP

SEQ ID NO: 61770 - protein, 989 aa, Unknown
  Microbial Source - Accession No. Ga0208461_1008711
MQQYDNFINHYAIQKTLRFELQPIGKTREHIQKNGIIEHDEALEQKYQIVKKIIDRFHRKHIDEALSLADFSKDTAMLKRFEELYWKKNKNENEKNEFVKIQSDLRKRVVSFLEGKVEGDARFAKVQQRYGILFDAKIFKDKEFISTACDDIEKDAIEAFKRFATYFTGFHENRKNMYSADEESTAIAYRVINENLPRFLENKARFEKIQHTVDSKTLNEIATELKPVLEKNKLETIFTLNYFQNTLSQAGITYYNTILGGKTKENGEKVQGLNEIINLFNQKNKDTMLPLLKPLYKQILSEEYSTSFTISAFEKDNDVLQAIGSFCNDCIFYAKNNVNGKAYNLLQTVQAFCNSIDTYNDNRLDGLHIERKNLATLSHQVYGEWNILRDALQIHYEAYEQKDNGNNNNYLESKTFSWKALKDALTTYKSLVEEAQDIDENGFIAYFKDMKFKEEIDGKTTSIDLIENIQTRYKSIETILQEDRNNKNNLHQEKEKVATIKGFLDSVKYLQWFLNLMYIASPVDDKDYDFYNELEMYHDTLLPLTTLYNKVRNYMTRKPYSVEKFKLTFEKSTLLDGWDKNKERANLGVILRKGNNYYLGIMNKKYNDIFDSIPGLTTTDYCEKMNYKLLPGPNKMLPKVFFSKKGVQFYKPSQEIIRLYNNKEFKKGDTFNKNSLHKLINFYKESIAKTEDWSVFQFKFKNTNDYADISQFYKDVERQGYKISFDKIDWEYILLLVDEGKLFLFKIYNKDFSPYSKGKPNLHTIYWKNIFSHDNLNNVVYKLNGEAEVFYRKKSIEYPEEILQKGHHVNELKDKFKYPIIKDKRYAEDKFLFHVPITMNFLSKGEPNINQRVQQYIASTSEDYHIIGIDRGERNLLYLSLIDATGKIIKQLSLNTIKNENFNTTIDYHAKLDEKEKKREEARKNWDVIENIKELKEGYLSQVVHQIAKLMVEYKAILVMEDLNTGFKRGRFKVEKQVYQKFEKMMIDK

SEQ ID NO: 61771 - protein, 1440 aa, Unknown
  Microbial Source - Accession No. Ga0208609_100002
MPQQDKPPVTRRAYTLRLRGTDPSNTSWRKALWQTHEGVNKGAKKFGDWLLTLRGGLDHTLADAKVKVGKGKPDRDRTDEERKARRILLALSWLSVESKIGAPVGHIIASGEEVAEDRNSKVVAALEEILKSRGLANSEIKEWKNDCSASLSAAIRDDAVWVNRSKAFDDAVKSTVGSSLTREEAWDMLERFFGSRDAYLAPVKISEDESSEVEQEEKAKDLVQKAGQWLSSRFGTGKGADFSHMAKVYERIAAWTDNAQVGTTGNEAINNLAVALSEFIPASEDLKGVLGLISGPGYKSATRNLLKGLDTKTAVTQQDLESLKDKATTDSLKCEQNTGSKGQRPYSDAILNGVEAACGFTYLQDGGSARHSEFAVMLDHAARRVSLAHTWVKRAEAERRRFEEDAKKIAKVPTPARNWLDSFCLERSLASGALEPYRIRRRALGGWKEVVAAWAKSSCSSCEDRISEARKLQDDPEIDKFGDIQLFEALAEDDALCVWHKDGYPAKATDPQPLIDYVLATEAEFKKRDFKVPSYRHPDALLHPVFCDFGNSRWDICFEIHKNRQSPNPNALSVTLWTGSEIKPVSLRWQSKRLARDLALDQEAQGNGASEVTRADRLGRAASNVTKNDEVNIAGLFEQKDWNGRLQAPRQQLEAIAAVRDNLSLSAEERNRRMSGMMDHIRWLVTFSAKLQPKGPWLDYATTNDLKLDQKNGEIVATPSNSKNEWRGLAYPFWHSDNQEGRKGLAKHCLSRLPGIRVLSVDLGHRHAAACAVWEAVSAEQVKKACQIAGHEAPKASNLYLHLKRKATKQKKDNQVVIEETTVYRRIGADTLPDGTQHPAPWARLDRQFLIKLQGEEEGVRKASDEEVREVYQLEAEVGRTAPMDADDGEVRKPSLPVDELMSSAGRTMRLALKRHGDRARIAHYLITNEKIKPGGIKEKLDEEGRVDLLLDTLVMWHNLFSFHGWQDDEARQLWDNHVAKLSGYKAPERIGEECSGKSRKNKQQENREKLRDAAKALAKDITLRKALHEAWKKRWEDDDERWKKQLRWFKDWILPRGKHASDPTIRKVGGLSLTRLATLTEFRRKVQVGFFTRLQPDGTKAEIKERFGQSALDALEHLREQRVKQLASRITEAALGIGRMRRPAGGKDPKRPGVSVDEPCHAVVIENLTHYRPEETRTRRENRQLMTWSSSKVKKHLSEACQLHGLHLREVSASYTSRQDSRTGAPGLRCQDVPVDKFMLSPFWRKQVEQADAKRAENKGDARERFLCELNTMWKDKTVADWKKAGAILVPAKGGEIFVSASQNSQKAKILQADLNAAANIGLRALTDPDWPGKWWHVPCDPVNFKPIPDKVKGSAAIDPDTPLKDTSVLSEGVTGKKSGKIKSQSKEVVNLWRDVSSKEVSTEGVAWEVYSAYQNQVQVRVVNILRRSACPKDNWEGQ

SEQ ID NO: 61772 - protein, 536 aa, Unknown
  Microbial Source - Accession No. Ga0208683_103187
MPAKTSSNKKNGKQSRQKDDNKRSLTVRLNLNADEQIYITSLIKAYTTIANKLNKDAFAKFKELSNNGEIKNIADLKDIKKEFYSWFNEYFKTQRKWITDSLGSNISDQLFQFLMAQYKNFFANYENFFKHKVDGRPSFPSLPELFQIRDRGIEVDFDKKILIIKLKGKQLRLKFQSDRILYQGDPGAVTIKKVDGKFYAYIPFDVNPEFHEGKKAAIDIGLVNFLASVTEDGDAILVKAKQYTYVYNTYKQRIKELDWMIGNVRKHTLKMYVYPPKSFRHYPLLGFTNDRRISKIIISLYTSRYDDARGKKKKLTREDMTSIVKKLRNVNYRLRVRRLNFMKVDGNIKLFPKKSRYMNDVFQDLPILHKLEYERRKLFEKRNRTLRHIRRTAINALLRVLKQKGVTHIVVGYPRYINKNRNELTVNMFQYRKTINDLKIIGQRYNMKVEELEEYRTSIMCSICGQEHESGRIERGLYKCQKTGKTINADVNGALNIFYKAFSKMPKQLKKTETIKLTYSPPKTNEVINPLYYRKL

SEQ ID NO: 61773 - protein, 383 aa, Unknown
  Microbial Source - Accession No. Ga0208683_103849
EVDFDKKILIIKLKGKQLRLKFQSDRILYHGDPGAVTIKKMDDKFYAYIPFDFTPKLEEGKKGAIDIGLINFFAAVTEDGDVILVKAKEYTYIYNMYKEKIKELDRIIGKIRKHTLRMYVTPPKSFKCYPFLGFTNNRQVSKIITSLYTSRYDVGRAKKKRLRREDMTSIVKKIRKVNQRLRIAKLNFVKLNGHVKLFPKKSPLVRDIYKDLPILHKLEYERKKLYEKRDRTLRHIRRTAINTLLRILKQRGTTHVVVGYPYNINKNRNELTVNLFQYRKTINDLKIIGERYGIKVDEIVEYNTSITCSLCGQVHKNGRIERGLYKCEKNGNVINADVNGALNIFYKAFSKMPKQLKKIETIKLTSSPPQRGEVFRPLNYRKL

SEQ ID NO: 61774 - protein, 517 aa, Unknown
  Microbial Source - Accession No. Ga0208683_104403
MLSNADSKRALTVRLNLSDKERVYLTSLINAYTSISRKLNKEAYTKFMELTANGVVENIKQLKDVKKKFYSWFYEYVKTQRKWITDSLGSYVSDQLLHFLDAQYKNFFANYENFFKRKMDGRPSFPSLPELFQIRDHGVEVDFNKKELMIKLKGKHLSLRFQADRLLYHGDPGGVTIKRVDGKFYAYIPFDFNPKFEEGKKGAVDIGLSNFFTAVTEDGDVILVKAKQYTYVYNMYKQRVKELDRMIGNVRKHTLKMYVTPPKSFRYHPLLGFTNERKISKILISLYTSRYDKKRGKKKKLRKEDMTNIVKKIHKVNYRLRIRRLNFMKMDGHIKLFPKKSKFVKDVFQDLPILHKLEYEKKKLFVKRDRTLRHIRRTAINTLLRDLKERGVMHIAVGYPHNINKNRNELTVNLFQYRKTINDFKIIGERYGMKVEEVEEYDTSITCSICGEVHKNGRIERGLYRCEKTGKMINADVNGAVNIFYRTFSLMPKRLKKIETMSYPALKAFRPLEPPQI

SEQ ID NO: 61775 - protein, 1280 aa, Unknown
  Microbial Source - Accession No. Ga0208940_1001448
MQQYDNFINHYAIQKTLRFELQPIGKTREHIQKNGIIEHDEALEQKYQIVKKIIDRFHRKHIDEALSLADFSKDTAMLKRFEELYWKKNKNENEKNEFVKIQSDLRKRVVSFLEGKVEGDARFAKVQQRYGILFDAKIFKDKEFISTACDDIEKDAIEAFKRFATYFTGFHENRKNMYSADEESTAIAYRVINENLPRFLENKARFEKIQHTVDSKTLNEIATELKPVLEKNKLETIFTLNYFQNTLSQAGITYYNTILGGKTKENGEKVQGLNEIINLFNQKNKDTMLPLLKPLYKQILSEEYSTSFTISAFEKDNDVLQAIGSFCNDCIFYAKNNVNGKAYNLLQTVQAFCNSIDTYNDNRLDGLHIERKNLATLSHQVYGEWNILRDALQIHYEAYEQKDNGNNNNYLESKTFSWKALKDALTTYKSLVEEAQDIDENGFIAYFKDMKFKEEIDGKTTSIDLIENIQTRYKSIETILQEDRNNKNNLHQEKEKVATIKGFLDSVKYLQWFLNLMYIASPVDDKDYDFYNELEMYHDTLLPLTTLYNKVRNYMTRKPYSVEKFKLTFEKSTLLDGWDKNKERANLGVILRKGNNYYLGIMNKKYNDIFDSIPGLTTTDYCEKMNYKLLPGPNKMLPKVFFSKKGVQFYKPSQEIIRLYNNKEFKKGDTFNKNSLHKLINFYKESIAKTEDWSVFQFKFKNTNDYADISQFYKDVERQGYKISFDKIDWEYILLLVDEGKLFLFKIYNKDFSPYSKGKPNLHTIYWKNIFSHDNLNNVVYKLNGEAEVFYRKKSIEYPEEILQKGHHVNELKDKFKYPIIKDKRYAEDKFLFHVPITMNFLSKGEPNINQRVQQYIASTSEDYHIIGIDRGERNLLYLSLIDATGKIIKQLSLNTIKNENFNTTIDYHAKLDEKEKKREEARKNWDVIENIKELKEGYLSQVVHQIAKLMVEYKAILVMEDLNTGFKRGRFKVEKQVYQKFEKMMIDKLNYLVLKDRQATQPGGSLKAYQLASSLESFKKLGKQCGMIFYVPAVYTSKIDPTTGFYNFLRVDVSTLNSAHSFFNRFNAIVYNNEQDYFEFHCTYKNFVSEPSLQKNVKSSKMHEYNNLKDTTWVLCSTHHERYKKFKNKSGYFEYKPVNVTQSLKQLFDEAGIDYQAGADLKEAIVTGKNTKLLKGLGEQLNILLAMRYNNGKHGNEEKDYIVSPVKNNYGKFFCTLDGDASLPVDADANGAYAIALKGLMLVERMKSNKDIKGRIDYFISNNEWFNYLIAKNTLNKSK

SEQ ID NO: 61776 - protein, 580 aa, Unknown
  Microbial Source - Accession No. Ga0209012_1000842
VPFGKKRSDKVAIVYEYGCLPPEGGLPAVAERQLVLADDFWNSLADIDRRHRAKMREILDDGELGKLNAHITSCKARIEELRGQIKGVNQRERRNAGVDANTKAEIARLKAEVKATAARIKEIKPEHIAKQKPLLEENDALRQAAVKRARQWFSDRGLYWGTYNAVLRSYETAHKVLLKSGEQMQAHRYTGEGRWVVQIITTAGEKPTTAEDLATGTMVQIDPVDFSDWKHISRGERRRRARTKCRIRVGSEGRAPVWLELPCVMHRPLPEGAEIVGADVTRRLVGPARWEYRLHLTLRVPAPVPADAAKPAIGVDIGWRALPNGGTRVAYAVGEDGSRKEVVCPDDILAGLAKSSDLRSLRDEKMNRIKAFLRDVIPGLDSADLSEQTEHLAMWKSPKRLIRLYRWWKEHRVEGDTEAFGRLHEWYYHDYWHLYQYEDDMRQQVLARRRDMYRIAAKEIAERASVVVIEEFDLRKFAQEDQPEDGEDNKIQRARRVAVAPSEFRIALRQACAARGVRVVEKPAQNTTRVHVVCGQVVAADYAADVTVRCPRCGVAYDQDANAALNLLGAGRGESTPAAS

SEQ ID NO: 61777 - protein, 1546 aa, Unknown
  Microbial Source - Accession No. Ga0209012_1001252
VANAKVKTTTRSYTLSLNAPSDTTDRSPLWHRIFRTHYAICCGAREFGKLLLDLRGGLPTSLAQLGEGIAENDRRQTQRGTRRILALGWLSVEDLDHARNDPHRVQDTAPGSPLDQDLAEKILRKILITKGIKSEEEQSNWISDCLPALTANIRPDAVWVNRAESFAQWQRGTQPGAQPPTPEEAQQILFSLCGESLVTLTLPEQPAAAGQKQPDQETSPDPEEQTDRPPAAPSADDEMDPSNASRGIFGDLFGENAEGKRSRSQGKDNFACAVRDFLCANPTPSADAITEFREKQKPREPNPPGPEKYPPEVSTSGAPTAVAKRYRKLLVCAGLWPKSADEDGSSRNSAKTKFADPKEPQKTEIQINALDLIDACNQAAPADDSGTSPKAGRVFAPAWASNIAEKVASATQMPANAKSLNEFKRLMFALAARRFSQTQSWTRRNEAERHMAAARQDAAVARLREIDPDHKAQDWLRGYEQRRADQSGSNGEFRITRRMIGEAEAVFKAWAGTNSAAERELKTVAVQTTAEKFGDAALYSEIARNTAAEAVWRSGSAPEILDQWVKLRKAQSDQQRTRVPRFCHPNAFRHPTWCEFGESSKPGVWYAWNPKSKPRKPEVGGEGDGTRRLWVLLPDFNSGIGQAVPLRWRSKRLSKDLGEALQPSDAPIPRADRVSIAAAGLNLEGANGVPARYRPSLPFSENTKGWNARLQANRTALLHLESKWDAEAATWRDGGRSLLALKWFTTFSPELAMSEGPGRAIHPKLGWNSEPHSDLNRAQKRGGNAKLILSRLPGLRVLSVDLGHRYAAACAVWETLTTEQMNAACQAKNHTQPAESDMYVHLAHPTERVVKSGRKKGQNLIQTTVYRRIAADTLPDGTPHPAPWGRLDRQFLIKLQGEQRPTRAASKNEADLANALFHRLGLRSDADSENKSRAVDKLMARTVRVATLGLKRHARRAKIAYALDPNTKAIPGMGGSSAAFTPGDEPHIHLLTDALFDWQSLATDAKWDDAHARSLWNHHIATLPGGFHLENPTPRDESAHEPSRQRQRSGDDALRATLKPIAEKLSKADRQEVHAAWKKYWGDSDGQSAIVPKVLQGQRGPEKTTPSASASGWHGKIRWITDWIMGKYLEGCTGHAWKHDVGGLSVSRITTMKSLYQLHKAFAMRATPEKPRGAPEKGESNLGAAQGILTAMESMRQQRVKQLASRIAEAALGAGIERRSDNGRELQRPRERVDDPRFAACHAVVVEDLTNYRPDEMQTRRENRQLMQWASSKVKKYLSEACQLHGLYLRGVPAGYTSRQDSRTGAPGVRCGDIPVEELMAAPRWRRQILTAEKTRRENNTGTARDRYILTLDEKYRLLTAEQRKKTPPARIPVKGGDLFVSADPDSPAASGIQADLNAAANIGLKALIDPDWPGRWWYIPCDATTHKPSPERTRGSAAVDCDVPLGPDSTGTPEDRDAKPKKNQRNSKIAGRGQSAIINLWRDPTHLPIKENPSAWCESKKYWNQVEHNVVKVIESKGQKLTQTAEAATGESASSPPIAPTDVPW

SEQ ID NO: 61778 - protein, 508 aa, Unknown
  Microbial Source - Accession No. Ga0209012_1015334
MSKNKHNKRTLTVRLNPTRDEQVYLISLIKAYTSIAGKLHTDAYAKFMELTTNGLIENIKQLKDIKKKFYSWYNEYFKTQREWITDTLGSNVTDQLFQFLRGQYENFFANYENFFKHKIEGRPSFPALPELFQIRDRGVEIDFDKKILTIKLKGKRLSLRFQADRLLYRGEPGAVTIKQLDGKLYAYIPFDFTPKFEEGKKGVIDIGLTNFFATVTEDGDVILVKAKEYVYVYNIYKEKIKELDRIIGKLRKYTLRIYITPPKSFKRYPFLGFTNNRQVSKIITSLYTSWYDVGRAKKKRLRREDMTSIVRKIRKVNYRLRITKLDFVKSNGHVKLFPKKSPFVRDVYKDLPIFHKLEYERNKLFEKRDRTLRHIRRTAINTLLRILRERGVTHVVVGYPYNINKNRNELTVNLFQYRKTINDLKIIGERYGIKVDEIVEYNTSITCSVCGEVHKNGRIERGLYKCEKTGKMINADVNGALNIFYKAFSKMPKQLKKIETIKLTSSPP

SEQ ID NO: 61779 - protein, 1484 aa, Unknown
  Microbial Source - Accession No. Ga020918_1000172
MPDEALVNGSTAGTDLMVVTQRAYTLRLQGVDPQDHSWRDALWKTHEAVNKGAWAFGDWLLTLRGGLDHSLADAKVKGGKGNPDRDPTDEERKARRILLALSWLSVESKKGAPEKYRLDKQSSARSNLNPEEALREILKGRGLGKSEIESWVQDCSASLSAPIRDDAVWVNRSKAFDDAVKSVGCSLTRDEAWDMLERFFGSRDAYLAPAKGSEDESSETEQEDKAKDLVQKAGQWLSSRFGTGKGADFSRMAKIYEEIANRAGKAQPGMTGDKAIADLATALSKFSPTSNDLQGVLGLISGPGYKSATRKLLKRFRDKTPVTQEDFQNLQDKAREDAQKCKNKTGSKGHRPYADAVLRDVESVCGFTYLQDGGSARHSEFAVMLDHAARRVSLAHTWIKRAEAERSRFQEDAKKVDQVPEAAKKWLNNFCLERSRAAGALEPYRIRRRAVDGWKEVVAAWSKPDCKTTEDRIAAARALQDDPEIDKFGDIQLFEALAEDDAVCIWHKDDDPANPPDPQPLLDYVAATDAEFKKRHFKVPMYRHPDELLHPVFCDFGNSRWNICFDVHKNTKTPFPRTLCLTLWTGSEGMKPVPLRWQSKRLARDLAFGQDTRKDGASDVTRADRLGRAASNVGKNDAVNIAGLFEEKHWNGRLQAPRRQLEAIARYVEKHGWNEKAKNIRDAIQWSVTFSAKLQPNGPWCAYAKEHGLRKDPQYWPHTEVNKDRKGHARLILSRLPGLRVLSVDLGHRYAAACAVWEAISTRQFQQNIEDKKILRGGTDAESLYCHTEHTTDGKKHTTIYRRIGADTLPDGKPHPAPWARLDRQFLIKLQGEAEGAREASNEEIWAVHKMETVLGRSVPLIDRLVAAGWGSTEKQKARLDAIKKLGWVPIKRADASEDADTEEEEELAFRPSLSVDDLMSSAVRTMRLALKRHGDRARIAFAMTAAYKPMPGDRRYYFTESKDLSATEDATARNSKHIEFIQDALLLWYGLISSRGWRDEAARQLWDDHVAKLHGYKAPEEIGEDVSGAEREKKQKENREKLYDVGKALAQNESLRKTLHHAWKTRWEEDDGRWKKQLRWFKDWILPRGKYASDPSIRKVGGLSLTRLATLTEFRRKVQVGFFTRLKPYGTRAETKEQFGQSTLDALEHLREQRVKQLASRIVEAALGIGSENKQHWEGGKRPRARSKDPRFAPCYAVVIEDLTHYRPEETRTRRENRQLMSWSSSKVKKYLAEACQLHGLHLREVSAGYTSRQDSRTGAPGIRCHDVPVKEFMRSPFWRKQVAQAEKKQDEGKGDARERFLCVLNAKWKGQPEADWEKAGAVRVPLKGGEIFVSADQNSPAAKGLHADLNAAANIGLRVLTDPDWPGKWWYVPCDPVSFLPVKDKVEGSAVVKPDQPLPKSAQAQSGDGAKDKKKPGKRGASKSKESKKVVNLWCDISSSPLECREEWKEYAAYQNEVQSRVIHILEKQIKRLRQATARGVQ

SEQ ID NO: 61780 - protein, 1226 aa, Unknown
  Microbial Source - Accession No. Ga0209101_1000507
MKNFFQLFTNQYELSKTLRFELRPIENTAELLKKNKIFEKDKKVYEYYQKTKKYFDKLHCEFIDEALVNTSLPNKDYSIYDKLFFEYKKDKENKKIYKALNEHAKKLRTNIVKDFEKTAEKWRDEYILSIKDEKSQKKLKQLEGLDLLFKTEVFDFLKKKYPEAQIEGNSIFDSFNKFFTYFDNFHQSRKNFYKDDGTASAIPTRIIDDNLPKFLENKKIFEEEYKVLNLSREEKDLFRLDFYNKCFTQTGIENYNEIVSKINSKVNKYRQKNKKSKIHFMKELFKQILSKRSKQATEQDTSISIENDSQVFEVLQDFIMETKNCNRMAKNILETFIQHQEEFDLQKVFLKGSNVTRISDMWFTSWFAFGDLLPKNSTGKKLANFISFQDIKNALEKTEIQDVFKKKYAKYNKESFYDQFLQIFDYEFHKALNDCEKNIVEAEKMMKVDKVYSNKKGILRNGKNGEKQKEIIKDFADSALSIYQMMKYFALEKGKKPVTDMDEDPRFYNDYKDWCEKSRTLLYYNEFRNYLTKKPYAEDKIKLNFEKSTLLMGWSANEEGNLQYYSSILRKDNKYYLGLMSSASTFNINKKEAFETRDGFYELMNYRQLKSTTIYGSLYKGEYKKEYRKDKETLTNQELIERTKKILEKQKFSYPQLEVILDKKYKAAEDLAKDLGNIVLYNIGFVKISKRYVNNLTNENFYLFEISNKDFLNKKKKGNVNLHTKYFQLLFDKKNLESKKGAILKLSGGGEVFYRKATKNLPKKKDKKGKEIIDRKRYAEDKILFHLPIVLNIGFKDKQINSKVNQVLATQRKARIIGIDRGEKHLLYISVIDENANILKIKSLNTIDVPNKKEPDDYHKLLDEKEKERDDERKSWHTIENIKELKHGYISQVVNEIDKIIFECLDERILPIIVFEDLNIGFKRGRFKIEKQVYQKFELALAKKLNYLVSKEKGNYLNAFQFTPPVNNFQDIHKKQVGIIFYIPASFTSAICPVCGFRKRLYGFTFKNINQVKKLLAEHEFNIFYDGKRFNFECLASKENEKKENKNGLYTEIFLNKKLFFNSDIERLFNKKSKDNKKWETISFIATEELKKLFEGKIDLKRNIMDQILAGDFRAEFYQQLIFIINRILNLRNCHAVEHRDFIACPSCGFHSEKNYEKLKSRYAGKEKFEFNGDANGAYNIARKGILLIKKIRQFAKSNNIEKLMPYDHLQIDMQEWDKFCAKNKS

SEQ ID NO: 61781 - protein, 1202 aa, Unknown
  Microbial Source - Accession No. Ga0209101_1006392
YKSATRNLLGQFNNKTAITQDDLKRLAETALADKVKCETNSRPKGERAYANSILHDVESACGFTYRVDKGEQPVPVSDYSHYANDYRWGPANHSEFAVMLDHAARRVSLAHTWIKRAEAERRQFEENAKKIDKVPKVAREWLDSLCAERSIVLGALEPYRIRRRAVDGWKHVVAAWSKSDCKTAQDRITAARLLQEDPEIDKFGDIQLFEALAEDHAVCVWQRDGEAGKTSDPQLLIDYALAAEAEFKKRHFKVPAYRHPEAFWHPVFCDFGQSRWKICFDVHKNRQSRRQRACANRISRKICFDVHKKRQTLRLSLEVWTGSKMLDMPLCWQCKRLARDLALGQDHKKDRSCQVTRADRLGRAVSNVARNQEVQILGLFEQEYWNGRLQAPRPQLEALGRYIEKHGWDAKAQKSCRAIRWMISFSPRLQPAGPWGKFAEKLQLNPNPKYWPHAEDNKDRGSRSKLILCRLPGLRVLSVDLGHRYAAACAVWEAVDAEQVKEACQAAGHREPNENDLYLHLKKRTTKQKKGSQGVVEETTIYRRIGADTLPDCTPHPAPWARLDRQFLIRLQGEEDEARAASNEEVWAVHKLEAELGRTIPLIDRLLGAGWGQTEKQKARLKALRELGWTPANKCQAFNSTDETELRRPSLAVDELMLDAVGTLRLALKRHGDRARIARYLITDERTKPGGVKEKLDENGRIELLQDALIIWHGLFSSPRWRDDAAKQLWNEHIAKLVGEQNLVEVSEDASGSERRTKQKQNREKLREAAKALVDDVALRQALHDMWKRRWEEEDREWRRRLRWFKDWVLPRREQARKAYSRPAETGSSSHPKRRARYAAIRRVGGLSLTRLATLTEFRRKVQVGFFTRLKPDGTKAEAKEGFGQSTLDALEHLRAQRVKQLASRIVEAALGVGRIRRFPGVKNPKRPDTPVDKPCHAIVIENLTHYRPEETRTRRENRQLMTWSSSKIKKYLAEACQLYGLHLREVTAAYTSRQDSRTGAPGLRCQDVPVKEFMRSLFWRKEVAQAEKKLTAGKGSSYERLLCELNQRWKDNSPGDGKRAELLRLPHKGGEIFVSAAPDSPAARGLQADLNAAANIGLRALTDPDWPGKWWHVPCNAVTFRPVEDKVKGSAAVKLDQSLRQVAHPQSKDPGAKKSKEIVNLWCDISSLPLEHREWKLDWEPYPAYWNNVQCRVIRVLQGKV

SEQ ID NO: 61782 - protein, 1268 aa, Unknown
  Microbial Source - Accession No. Ga0209102_1000334
MTKRKSRLAGYRLHKERILFAGGQIIRTIKYPLTPSYPTEEMTQFLKDFEEAVIADDLKIRGDLNINDYLTYTAKGKPLYTLFDFWVDSLRNGVIWMSKGTMLIDFLATQYNINSPFDNVWKKASPRITSFFKKDEFKEIILCDPVRSSSTKNSFHKRITGYLKDHLKVKNGDSYTIVSNDAQKVVEFIVHSFFNNEGKLILEGEEQFKFWKKEYNLDKAIIESAKPKGKYADITFVIIPELISNLNPKQSLEDLINKRDVWLQGRRFDKEDKSLLSILGLSDNFNGFSNFLGVVLRDLQKENGNKEVLYDAQKTVFPLLGNSKDEVLEALDFLSQKAKLLGVTSLPLVNGWHEYRSIFGGKLKSWFTNSQKRKEELDGQISRFKESLFKARNYLQTENFGEEANKEKEDILSFLSLLENFFTDEKRSIKVEENYQLFEPLLALVKRRLNFFYQRYIQKEGDETKVNELGHFKGLYEKIYKPVAFYGYAAKKVNKKFVNQTFPILEDGIENIEKLISYLQNSFSVQETFEEVKQGKEEIDDPYRKLLQFFWNKYLEDSINSHLFAEKYKDILKGNIEDNEWEKVIDKTKKGKYVFYKSPYAKGSLEEIPIGTSNYLEQLQISILELSKFILSYKKDILLSDVGLLLDWVELSKNVISILLRFNTKKTYRIDDLRLDNFSQAKRYQELFKHGDYPKNEFSFIIQSLVLSEIRGAATLYSKREYIASYSVQVVGSDSKYRIYYIPKEKISITPDVVKSRPESSERKQLMGPHYYAVALGKVLEKKKSEIFNSIALFKKNIKAIFLPESSLRGVFRLSSSPYQLQFLDKFIYRPFGWENIDVSLSEWSFIVEKRYTINWDLRSKKPKLLPVTDTERIKKNKVYIAIPFNLIPSKEVRQAAPLKTIAKGKETREKDLSRLNFPIMGVDVGEYGLAYCLVKIIFDKNTYKILAIELVSDKKEAFGFIEDRNIGNIKDKFAEIQHRARQGSFDEEDTVITRVRENAVGHLRNRLHVIVTLQRSSSVYEDSISNFETGSGRTTKIYNSVKRADTESDTNADKMTHNHVWGEKTKWVGRNVSAYASSYTCVSCLKSLYQVRKEDLSKMRITQRGGRIVTISGPHGDIKGYVSKEEKYNLGYHFRETDDELKNFRKIVQDFARPPVGDHSEVLKKYAKQILEKGKIEEWRKRRGNSSIFICPFCQYITDADVQAAFMMAIRGYLRFSGIVPSRGNKKDQDQEQEDEKTAGESFLEQTQRQLGDVNLSKILEAFSLKI

SEQ ID NO: 61783 - protein, 343 aa, Unknown
  Microbial Source - Accession No. Ga0209102_10036881
YKPSDGRFWIHFKTKEGEAVCYLHVPAKYHSLIEQACGEDNPVLGQVELIEDCKYGWVNCHICLRLPKPEPYEPKGWLGVDTGFRKLATSILATPCIALRSTGHTSSELKGVAESPSFGAHGSIAFTHEHKAQGNSGLKPASINGDCLKLSFSHPTFHGKEFKTWIIQLRHLLKQYARKGKAWKKWDFRLKHTIKYAVGVVAKEIVSKAKRLKAGVAMENLTFKATTKGYIVPRYKLMIAIKTLCEREGVPFKLVPSQYTSITCPKCGYADDGNRSNERFECLKCGYKADADIVGAMNIALKAFDRTADGAVNGMGLDPIPKGEGALRLQAAGCCNPPKADER

SEQ ID NO: 61784 - protein, 652 aa, Unknown
  Microbial Source - Accession No. Ga0209143_1000788
MLKLELKGDPNSLKFLDNLFNEYKRLVRIADSFVYYLYPYYANINEQEKLERLNKLIMSMERKAIIKRRKDKKLEDKISKELRYTYSHSDHLKTLLHIYIKYAKQYYGIDIKHAHLDMQGGLADIMHSNAENAYKHRTIPNLRRRLINVMPIRVSKRPLAENRRNKDNNKYYQRDAEFIFKNGKIMLRIGSKRNGLTFKITKRFNDDDRLSMFIKAIQGNDGLTIGDPCYLVRKDADNGYRYYIMVSISKNVNVKALYEASKNKSKIRIVGVDSNISKYIATMFCVEVDKENKEFKLVNAKGIDSKDYINAVKKYEEERRKLQQGRMKGKINKKKGSRYKEKEDYTIKNRCGDSERIDLRRQLIGYICNQILEFADKNDADIIVIEDLEGLNKELKTLKIIKKELGKLYNDVNSKGNNAIDDKINEINKKYNNKIRRPLLELLNKIKEYSKNKDRIKVAKYILKYKQGIERRISLLSIMAYYQFKQELEVDALWNGKLLYIIDPKYTSQQCLRCGHTNKLNRITQRQFKCIKCNFGMNADFNASANIALRFATKILKLELELKQGESSSMMTITNATTPLYASINAGSKLGVVIANNNTDGSVASTMSSVASILQGCYEGRSPCSRGQTEQSCSAKRLVTLDEFIEQRGNGG

SEQ ID NO: 61785 - protein, 667 aa, Unknown
  Source - Accession No. Ga0209143_1002248
MLTITRARTKKITKTMLKLELKGDPNSDSMKFLGNLFNEYEQLVRIADTFIYHLYPYYANINEQEKLERLKELVKSLDEKAIRKNKRRKREPQEAEEEQTPTETEAKHTYTHSNLLKTLLHRFIKYTKQYYGIDAKYAWLEKQGGLADLMHSNAESAYKHRSIPNMRRRLTNVMPITMSKSPLDENRKDKKNNGRYYKKDAEFIFENGKIMFRIGRGKHKVTFKIATRFNDAERLGMLIHAIQGDNGLTIGDPCYLVRKETYNGYRYYIMVSISKNVDVKALYEASKNKSKIRIVGIDSNISKYTATMFCIEVDKENKEFKLINAKGIDSNDYINAVKKYEEERRKLQQGRMKGKISKKKGSRYKEKEDYTIRNRCGDSKRIDIRRQLIGYICNQILKFANENDADIIVIEDLKGLNKELKHLRIIKKELGRLYNNVNSKGNNAIDDKINEINKKYKNKTRRPLLELLNKIKEYSKNKDRIKVAKYILKQRQIIERRISLLSMMAYYQFKQELEVEALWNGKLLYTINPQYTSQQCLRCGHTNKLNRITQRQFKCIKCNFEMNADFNASANIALRFATKILKLELELKQGESSSMMTATNATTPLHASINAGSKLGVVADTSSGVASILQGCCEGRSLFMRGQTKQSCSAKRLATLDKFIEKRGNGG

SEQ ID NO: 61786 - protein, 493 aa, Unknown
  Source - Accession No. Ga0209143_1006289
IFENGKIMFRIGRGKHKVTFKIATRFNDAERLGMLIHAIQGDSIFTIGDPCYLVRKETYNGYRYYIMVSISKNIGKKALYEASKNKNKIRIVGVDFNISKYTATMFCVEIDKENKTYKLINAKGIKSKNYINAVKKYEEERRKLQQGRMKGKKQKKKGSRYKEKEDYTIKNRCGDSKRIDLRRQLIGYICNQILEFANENDADIIVIEDLKGLNKELKHLRIIKKELGKLYNNVNDKGNNAIDDKINEVNKDKKYKNKIGKPLLEILNKIKEYSNAKDKVKVARYILKQRQIIERRMSLLSIMAYYQFKQELEVEALWNGKLLYTINPRNTSQQCLRCNHINKLNRITQRMFKCIKCNFEMNADFNASANIALRFATKILKLNLKQEQGESSSMMTVTITNATTPLHASINAGSKANEQGYCYCNDNGNLVRNGSVAPTMSSVASILQGCYERRSLFMRGQTKQSCSARRSIATLDEFLEQKGNVFAMKGNGG

SEQ ID NO: 61787 - protein, 964 aa, Unknown
  Source - Accession No. Ga0209162_1014546
MDKKITGYRLHFKRILFSGGEIVRTIKFPLSSTSLSSGKNDLINNFESQLINDDLKIRGDVNLNDYLIYEFSSKPIYTLFNFWIDSLKSGIVWADKPASLIDFINEFYLIKSPYDLVWERATEEFKKYFDKKSFKEILISGPIRKTKNPSKKESFKKRIISCLKDEYVIKEGNSLSVESPEVLKFINKIVNSFFDEDGNLILEGKKQDNFWLNEFGIDKSIIQKTKPEGELKDITFVIIPELIVDSFNKEYEVDSLIEKRRVWLKKRFNKEKEIEKNLQLILGLSNNFNGFSNFLGKGLRAFQGGKILMVFGAMSKINPSVKNQENKEKVLESLNFLSDKSKFFTPRPALNIVKSWADYRTFFGGKLQSWYSNGIRRKNELKVQVKEIYEFLTKTADYLAAKISFNDENERYAIKEFELINLKINRLKQFIENENFDISSEDGYLIFDTLLSSLRTQLNLYYQKYLSSEEDNIRDNKDLKGIYQKIYKPIAFFGKATKRKNKKVIEETVPIIESGINNLFSLMKKLEKTFLPKNTFSKVKNKNEDEETILRNLVDYYQNKVSHKMLNSLTFVNKLEEVMKSVVEENDWDRLHSNKYVFYKSEYQKGALELIPLKKGSWIDIFEKIILEMTSYLLTFDLTGLLKDKKILLDWIEIAKNTLAKLIRFNTCDVFTLDELNLDLRNFPKAMDYIKIFKITKVDKNELNFIVQSFILSELKGAATLFSKEKYLAKYNVQVIDADKKFKLFYKPNDGFIEREVNRKNLLKPHQYFVALDKIEDKKIKEKANFLLLTKEDIKPVFIKEENFSKLYKISSSFYQIQFLDKFIYMPEEFKDLGIRLSEWNFVLEREYKIDWDLYTKRPKMTFIENSKKNKLYLSIPFNVFYKSKKKDVSLSKVISNRLSYPILGIDVGEYGLAYLLAEFSDKKIKILKKGFIEDRNIANIKDKFAEIQLKARTGIFNEEDTTI

SEQ ID NO: 61788 - protein, 1553 aa, Unknown
  Source - Accession No. Ga0209171_10000726
VPKRVRTQTRSYTLRLAAPTGVAEWLPLWDRLFRTHYAVCRGAAEFGELYLNLRGGLSPDLADLRDPTVAEGRWEYVRRGRRRMLALGWLSVEDKRSATTHKFRLPQVQPGQTLSDDEASSLLREVLTTKAVRDDTLQKEWIRDCIGALTARIRPDAVWVNRAAAFRKWQEEHPSCANEMAEQARIILFNMCGSDFVNLALPEDKAIDGNVDLEDSEEAEPNDEVEKGELVGEQQNPSNASRGVYSDLFGGDSVKKVARSKGKQTISAKLATFLRSRDRCCPIRDQIIQWRQENGLPPFDTVSSNPYPPEVTSSGAPTAVAKRYRKLLVSLGMWPQSNDEDGKPRQQAETRYVKSVAGELPDTKKVQVNALDLLAACDEIKESEKDNDRVFNPAWAVSIARRLSEVSGLNSTDKSATEFKRLMFAIVARRMSQTQSWIKRNEVERHKATVRRDAVLDRLRLLDLTQKAQNWLRNYEQVRGETSGAIAGYRITRRAIAECDEVIASWKDTTTGEDRDKQTAEMQARSEKFGDANLYYDLARDTLAEAVWHAPDGSPSSEILKEWVKFRQAEYDQGRLKIPRFCQPDPFHNPTWCEFGGTSKPKVWYAWNPRTRPSKPEQSGETDGSHRLWLLLPDWGKNQTLPTAFRWSSKRLWRDLGGDTIYVEEIPRADRLGVAVAGLPATARDGEMRHYRPAYPFSEDAKGWNARLQVARDALSEMERAWDEDRKQWLDGGLALKRLRWFVTFAPSLAVAEGPWGKLRAKLKWKKFPPAEVNERQKRQGSAKLILSRLPGLRILSVDLGQRFAAACAVWEALSTEEFRNECNAARAKPGFDVTVTDLYTTIAGPGERSKGASRKAQAEGRDSFRPTTLYRRIGEDFLRDNKTGKLTDGAHPAPWARLERQFLIKLQGEELPARAASQDIEMEMVERFARRVGFENADLKLPRRIDELMARTVQIARLGLERHGRRARIAHALDPQTHSVFGIGGKEIPFQQGDETHVKLLTEILFDWHALASEGKWNDVKARELWNVHVSALSVGSRIENPTSGAAADDDRTRLEKRKDDDVLRERLKPLAKVLAETDRAAMHTAWKNRWEDDDGLERDESDYEHDKKGGITKAKRQTSGWHADLRLFTDWIMGWHLPGVTSKLWTRNVGGLSLTRIGTMRSLYQVQKAFAMRARPQNPRGAPEKGESNTGVAESIRVAMERMREQRTKQIASRIVAAGLGMGGHWKHAEVWQRTPDGTREAKKKYVWVEEQSPKYKPCHAVVIEALRNYRPDELQTRRENRALMNWSANKVRKFLEEACQLHDLHLREVVPNYTSRQCSRTGLPGVRCDDVRVEEFLTAPWWRKRVKSAYNRKAKPAREHPYDAEHQMLVALDERWPECQKVPEALRTDYERKVKSANPIRLPRKGGNLFVTAIPWSCAANGHRPCSRCRSFRALQADLNAAANIGLRALLDPDFPAKWWYVPCGANDGKPAKDKVSGAVCFGLMPKFVEVSEAKRDYVNAWRDPSSRPFPDCDNKWSETSKYWNGVRSRVITTLRVFNGLVPDTSTIDA

SEQ ID NO: 61789 - protein, 1181 aa, Unknown
  Source - Accession No. Ga0209172_10015399
ADKATVTQADLTKLNETAAADKGKCETNTGSKGRRPYSDAILKDVESVCGLTYRVDENGNAVSVSNYSLYGDDYNWGSARHSEFAVILDHAARRVSLAHTWIKRAEAERSKFEEDAKKVDQVSKAAKDWLDKFCLERSGMSGALEPYRIRRRAVDGWKEVVAAWSKSSCSTSADRIATARALQDDPEIDKFGDIQLFEALAEDDAVCVWHKDGDAAKAPDPQPLIDYALAAEAEFKKRHFKVPAYRHPDALLHPIFCDFGKSRWDICFDVHKKVQTPFPRALCLTLWTGSGMNTVPLCWQSKRLARDLALGQDAQNDGSSEVTRADRLGRAASSVAKSDEVKISGLFEQADWNGRLQAPRQQLEAIAVVRDNLSLSDQERERRMSGLMDRIQWLVTFSAKLQPQGPWCKYAQDQKLGLNIDPQYWPHAGENKNRKGQARLILSRLPGLRVLSVDLGHRYAAACAVWEAVSTETFRKEINGKNILRGGSGKDDLYCHTKHDAESKKHTTIYRRIGADTLPDGEPHPAPWARLDRQFLIKLQGEEEGAREASNEEIWAVHQMEIALGRSVPLIDRLVAAGWGCTERQKSRLEELKKLGWKPLPAAEPTGDESGEDEGADVYKPSLAVDELMSSAVRTMRLALKRHGDRARIAHYLIADKKTKPGGIKEKLDENGRIELLQDALVLWRDLFSSRGWRDDAAKQLWDDDITRLSGYKAPEKIGEDVSGVERKKKQKENREKLRDVAKALAQDVTIRGKLHDAWKKRWEEDDGRWKKQLRWFNDWIFSRGKAADNSTIRKVGGLSLTRLATLTEFRRKVQVGFFTRLHPDGARAETKEQFGQSALDAIENLREQRVKQLASRIAEAALGVGRMKRPRGGKDPKRPDIRVDEPCHAVVIEDLTHYRPEETRTRRENRQLMTWSSSKVKKYLAEACQLHGLHLREVSASYTSRQDSRTGAPGTRCQDVPVKEFMRAPFWRKQVAQAEKKQAESKGDSRERFLCGLNAMWKDKAVADWEKAGAVRVPLKGGEVFVSADRISPSAKGLQADLNAAANIGLRALTDPDWPGKWWYVPCEPASFRPVKDKVDGSAVVNPDQPLRQSAQAQSGDAAKDKKKRGNKGAGKSKEVVNLWRDISSSPLECIEFGEWKEYAAYQNEVQCQVIRILEEQIKDRDRQPHEGSKEDDIPF

SEQ ID NO: 61790 - protein, 1304 aa, Unknown
  Source - Accession No. Ga0209201_1007464
MMRSSRWAAHSRARRHGICWNASSEAVMLIWPQRKSPKMNLQRKSKRRKRRTSSRRPDNGSAAGSTGKGADFSRMAAVYGKIAAWADNAQAGTTGNQAINKLAADLSEFTPASNDLQGVLGLISGPGYKSATRNLLNGLATKTTVTQQDFGSLRDKAADDAQKCKQNTGSKGQRPYSDAILKDVEAVCGFTYLQQDGGAARHSEFAVILDHAARRVSLAHTWIKRAEAERRRFEEDTQRLANVPGPVKAWLDSFCSERSATSGALEPYRIRRRAVDGWKEVVTAWSKSSCSTSADRIAAARALQDDPEIDKFGDIQLFEALAEDDAVCVWHKDGDAAKAPDPQSLIDYALAAEAEFKKRHFKVPAYRHPDALLHPIFCDFGKSRWDICFDVHKNVQTPFPRALCLTLWTGSGMVSVPLCWQSKRLARDLAIGSNATNAGYVEVARADRLGRAASNVTKSDEVKISGLFEQADWNGRLQAPRQQLEAIAVVRDNLSLSAQERERRMSSMKDRIRWLVTFSAKLQPQGPWCEFAKTNQLRIDPQYWPHADSNKTRKGQARLILSRLPGLRVLSVDLGHRYAAACAVWEAVNAEQVKKACQVAGHEAPKASDLYLHLKRKATKRKKGNQVVVEETTIYRRIGADTLPDGTQHPAPWARLDRQFLIKLQGEEEGVREASNEEVLKVYHLEAELGRTAPIIDRLVKAGWGQSGKQRTRLEALRELGWKPASEAVVSDGMGADEGEVRKPSLSVDELMSSAVRTMRLALKRHGDRARIAHYLITDEKTRPGGVKEKLNENGRIDLLQDALLMWHDLFSSRGWRDDVARQLWDNHVAKLSGYKAPEEIGEESSGPERKKRQKENREKLHDVAKALAQDVTLREALHDAWKKRWKDDDERWKKQLRWFKDWVLPRGKHASDPAIRKVGGLSLPRLATLTEFRRKVQVGFFTRLQPDGTRAETKEQFGQSALDALEHLREQRVKQLASRIAEAALGIGRMRRPMGGKDPKRPNGRVDEPCHAIVIEDLTHYRPEETRTRRENRQLMTWSSSKVKKYLAEACQLHGLHLREVSASYTSRQDSRTGAPGIRCQDVPVKEFMRLPFWRKQIAQTEKKQAEGKGDARERFLCDLNAKWKGKSEADWEKAGVIRVPVRGGEIFVSASRDSQGAKSLQADLNAAANIGLRALTDPDWPGKWWYVPCDPASFRPIKDKVEGSAAVKPDQALRQSAQAQSGDAAKDKKKRGNKSAGKSKEVINLWRNISSSPLECIEFGEWKEYAAYQNEVQCRVIRILEEQIKGRDKQLHEGAKEDDISF

SEQ ID NO: 61791 - protein, 577 aa, Unknown
  Source - Accession No. Ga0209207_1001084
MIKAFKYGMLEPVAGFDKAAIDVLYLRNKLWNSLVELEKAHRERYRTLITGSDDELSKIQARLDQIEAERAELVKRKRQARAMVRSKKVDTSEHDDRIDMLMAERNDLRTKAKDIRLQVKEKVKPAIADLEKERYEAVKHLIHEAGLWWCNSETVIAAYDLARVKAMKENAELRFRSFDGSGKFAVRKTGGFALSDLVSGKLSFARLEALPDANFAHLSERGKRSRARHHLTMTILTYKDESGKLCRHEVTWPIILHRPLPPEGMIKFIHVQRKRIGKDFQWTCSITMEVDEIQKTPIDHPSRAACGIDIGYRLVKDGLRVAVIADTSGKIDHLTLPQDWIEKMDHVESIQGHLDNSNDLAWGELKALLKSMHDYPESIAESIGRLLKAGDRTPVRGMRALHWRLRNEPETMPEVLSILDTWEAETCRREREMHRLRRKLINRRKDLYRNFAYKVANRYVLIRIRGLSLKKLAAVNLEDGSDNQMPQAVRNNRTRASLSELTLCLQQAAVKAGADFEKVFDVNSTTTCSTCGNQNLKMDREDIYFRCEKCDTLHDQDENAAKNLLRKEFYLAEQAVM

SEQ ID NO: 61792 - protein, 403 aa, Unknown
  Source - Accession No. Ga0209207_1006579
MKLVQRHLIKPNNQFYQEIDKLTFLSKNLYNCGIYLCRQAFFKGEKIPSQNQLYHQLKGGIDYRLLPSKVSQLVLKQVEKTFKSYQSAVKEYKQNPSKFTGKPKLPRYKDKVKGRNIVTYNYQAISVKYLKKGLVNPSKTSILIKTDIKEILEVRLIPKRGVYLVEIVYEKPEKETIISDNSAYIDLGLNNLAVLTSNKKGFQPKLICGRALKSCNHYYNKRIAQLKSQLNDQQKTSKRIQSLTLKRNNKVDYYLHTASRYIINNLLENNISLLIIGQNKNWKQGIKLGKKNNQNFVNIPHDKLIQQLTYKAQLVGIKVITTEESYTSKCSFLDLEPVKKQEKYLGKRVKRGLFEASNGYLYSADVNGSLNIGRKVVGESVFDRDSIVRFVVNPLRVKSYKAS

SEQ ID NO: 61793 - protein, 526 aa, Unknown
  Source - Accession No. Ga0209224_1000001
MSSKTTSDKKNGKRLGQKESDNKRSLTVRLNLSTEQQIYLTSLIKAYTTIARKLNNDAYAKFVELTTNGVVENIKQLKDVKKKFNLWFNEYFKTQRKWITDTLGSNVTDQLFQFLRGQYENFFANYENFFKHKIEGRPSFPTLPELFQIRDRGVEIDFDKKILTIKLKGKRLSLRFQADRLLYHGEPGAVTIKQLDGKFYAYIPFDFTPNLEKGKKAAIDIGLINFFAAVTEDGDVILVKAKEYTYVYNMYKEKIKELDRIIGKIRKHTLQMYITPPKSFKRYPFLGFTNNRQVSKIITSLYTSRYDVGRAKKKRLRREDMTSIVKKIHKVNYKLRIAKLNFMKLNGTVKLFPKKSPLVRDIYKDLPILHKLEYERKKLYEKRDRTLRHIRRTYINTLLCILKERGVTYVVVGYPYNINKNRNELTVNLFQYRKTINDLKIIGERYGIKVDEIMEYNTSITCSICGEVHKNGRIERGLYKCEKTGKMINADVNGALNIFYKAFSKMPKQLKKTETIKAKLHLLNVN

SEQ ID NO: 61794 - protein, 398 aa, Unknown
  Source - Accession No. Ga0209225_1002268
LDSETIKLCVKGVIPPRDPDLRKLMHEYSVYKRVLIPRVKQAVRQVIKDKSIAVYAQQKWMVDKKLSEYLKNLPFHPMPFHNQSVWLEEKDGRFWIHFKTKQGEAVCYLHVPIKYHSLIEKACGEDNPVLGQVELIEDKKYGWVNCHITLRLPKPEPYQPKGWLGVDVGWNKLATSIACTCNSHLRFFNPTFHGKEYKTRIIQLRRLLKDYARKGKAWKKWDYRLKHMVKYAVGSVAKEIVSKAKKLKFGIAMEKLTFKSTTKGYLVPRYKLMVAVETLCEREGIPFKLVPAQYTSMTCPKCSYKDDKNRVGERFRCLKCGYQADADIVGAMNISLKALTDAQMEGVMPQASGLRLKGLGLKPKPLGHVARPLRGMSDDLCKATRKPSKIESEVKKEG

SEQ ID NO: 61795 - protein, 633 aa, Unknown
  Source - Accession No. Ga0209399_10016114
ESPLHEPSRWKRRVLEHCSVLVSNATAALLAFIRERLVVTPDVEDATKIASADLAFEVGKEHASRIAALLAQVKHDRETGERLPFSNAYRFTACEPVPGTDRFRVVARLADGTWRERKLKRGGVRRTHGINCIHATTGFQQLLATYAAPKLLHVVPPALRAGVCQEVAQQVLSYLGQLESSKVRGDVAFPTVEDRDPVRRRQAYEDAIDALVADLTPFSYAKLRDKFPGEYAADDPRGDRLIVDDPRWFAVTTTPDPHPIPLLFSQGSAVRLLEGSTSFDAGVSKRNRHRGSSTASESVRQSRPDAVQRKGTTGLRQWYAAIPLLDADDDALRAIAAAAHERSGRQLDLALHPLPLDGGVRWRRRERDVLVPLSGDRKRLERILRNPNLHIAWSRLVQKRTGWVLQLTVRIPMQPAVEHRRVLGVSFGIDAVATWSLVDEDGVELEHGALAPNEQILTFLREKRQLEWDQEKGRWIGKQRFAMQLESIAHGVANTLLAIAEEHHAVLAVEDVSWVKKAGPNHAQNVLFTAWNFGQLRRILSYKSPMVGRGDPVTVSDYVVSYTCPTCGACRKPKQKPDHADTWRDGDTLSCRSCGFQGVLSPSDRARRVTANGLTIWQDRWQRSDERNGTETS

SEQ ID NO: 61796 - protein, 372 aa, Unknown
  Source - Accession No. Ga0209410_1010848
LELIKVTVPAVIPPRDYGLRVLMKEYKAYKKALISRVKRAVIDVIKDKSIRVYAQQKYMVERKLTTYLKNLPYHPMPIHNQSYWIEKENGSYRVHIKTKHGEASCLLIVPKKYRFLIERAIGKSCPYKANNNMCVFKECPFNTPKMCDSINPHLGQMELIEDTKYGWVNCHIVLRLPKPKSYEPKGWVGVDVGWNKLATSILATANPHLRFSNPSIHGKALKTRIIQLKYLMKQYARKGKSWKKWNFRLKHTIKYTVGVVAKEIVSKAKKYKAGVVMEDLTFKSHTKKWLIPRYKLMVAIKTLCEREGVPFKLVPSKYTSIRCPKCGHIDKRNRRDKRFRCVRCDYKADADIAAAMNIAAIGMGLAPIPKSS

SEQ ID NO: 61797 - protein, 1241 aa, Unknown
  Source - Accession No. Ga0209467_1000554
MQNKETFEKFTGLYELSKTLRFELKPIGGTKDLLSKNYIFEKDILVRENYLRAKKYFDCLHCEFINEALEKMSFEENDYQEYENLYLAYKQEKNQKNFKAWNDYVKKLRTKIKDNFTTIAIVWRDEYSKIVSDEKLQKKIKKISGIDLFFKKEIFGLLIKKYGEEEGAKIINLETGETETIFDCFSKRFSTYFINFHHSRQNFYKDEGIAGAIPTRIIDDNLTKFLDNRKIFQDKYGVLDLSEEEKIIFSLTYFNQCLTQVGIEKYNNQVARLKSKINEYRQKTKEKLPFLKELFKQILTEKNKQGTEQDEFIIKNDEQVFEILNNFLKEVKENNLKAELIFNKFIEKQNEYLLDKVFIKGNNINTISNKWFLNWSIFGSLLPKNRGNHNKVADFVSINQIKQAFDNPELPKDQKLLFKKEYFELKVVFENKNAFENFISIWQYEWNKSLDICNSSIIDVKKMIEEDKKYTNKKGVLKNCKKGELQKELIKDFSESALSVSQMMRYFELKKGKNSVNDLDEDANFYNEFNEWAEDDKVWLYFNEFRNYLTKKPYKEDKIKLNFEKGTLLMGWSANEDGNLQYYSSIFRQGGQYYLGIMSSASTFNLNKEEAFNIEDGFYELMEYNQLKSTTIYGSLYKGEYKTDYKTDKKILSDQELISRVKVILQKQEKHYPQLKEILKQNYETANDFAKVLGDLVLYNISFTKKVSKKYVDDLTQKNFYFFQIVNKDLISKGEKGKSNLHTRYFELLFDEQNLYNNQGLALKLSGGGEIFYRPKSLDDKKEIQTKKNKILLNKGDKAIEKKRYSEDKILFHLPIVFNAGLKNKQINFKVNQFIISQTKQRIIGIDRGEKHLLYVSVIDENGKVLETKSFNKIEVPNKKEPDDYHQLLDKKEKDRADARESWQEIENIKELKQGYISQVVNEINKLIFSYLEEEVLPIIIFEDLNIGFKRGRFKIEKQVYQKFELALAKKLNYLVSKVKENYLEALQLTPPIQNFQDIKKQTGIIFYVPASFTSAICSVCGFRKRLYGFLFKNIEQAKKLLTDHQFKIVYDGGNFNFECLASQENKKKTKNKNELFLEKELADKLIFSSDVERLINVRSKNNKGWETIKFDAKVELEKLFEDKIDLQGDIMEQILAEKLEANFYKQLMFIINTLLKLRNSHNVEDRDFIACPSCGFHSDKGFQGKEFNGDANGAYNIARKGVLISEKIRQFAKEGDLEKLKIIEDLQIEMREWDKFVQNN

SEQ ID NO: 61798 - protein, 1510 aa, Unknown
  Source - Accession No. Ga0209507_1000982
MAMQTIVTQRAYTLRLKGSDPQDQSWREALWQTHEAVNKGAKAFGDWLLTLRGGLCHTLERLPDITDSEIDSEHERAKHDAKENNKSEPTREDIAKKLHVKREQENQPDAIRDRRILLALSWLSVESERGAPAEYIVAHDLDKQSGKRSNWKTVEALKEILKKRGVDDEKEIQEWEKDCRESLAAHIRDDAVWVNRSQAFEEAARSTGISLTHDAIWDMLERFLGSAGTYLEPADISDDEASGSKNEESKDLVQKAGGWLCDRFGTGKGADFGRMAKAYDAIADWASEARTEASGTEIVAALASALKEFNPKSNDLPGLLRLISGPGHKSATRNLLRQIDGQSLVTRQNLDKLKEMAIDDAEKCRKREGSKGRRPYSDTILKDVESACKFTYLTDNGAARHSEFAVMLDHAARRVSLAHTWIKRAEAARRKFEEDARRMDSVPSETRTWLDEFCVERSGASGAQDQYRIRPRALGGKTRKAWKAIVQAWAKPDCQAEEDRVEAARLIQAEWDDDEKFGDIQLFEALADDDALCVWQKDGDSAKSPDPQHLIDYVLAADAIQKRHFKVPAYRHPDALLHPVFCDFGTSRWDIGFAIHEASDGVCKAKKNVERKKNAVQKAERSVKKASGNRQKEAKAQDELKKRQADLAEAETRMAWLSNMHALSMTLWTGSMVKSEPSLLWQSKRLTHDLAFDQGKPDGKVLEVTRADRLGRAAGNVPVNVSVAIAGLFEQNDWNGRLQAPRSQLDAIAARVAKHGWDAKAKQMRNHLRWLITFSAKLQPSGPWVKYAAGVPEDAVAKPFVSRKGDYAVRHQGNDTREGHAKIVLSRLPGLRVLSVDLGHRYAAACAVWETLSPEQLKAACQAVGHEPPRDGDLYLHLKNGEQTVVYRRVGADAIEAVDEGTGKVKTISHPAPWARLDRQFLIKLQGEDREVRRAIPAEVAAVQELEKTVGRESPDRRYLRVDDLMSETVRSVRLALQRHGRRARIAFNLTASKKLLPGGREECLTDEGRAALLADTLADWYALLTGKGWTDEWAKQQWETHVVPFLQSAALPQIPEDAETTPKARRKYRADLTEKLNPTAVSLAKNESLCRKLHCLWATRWREDDAALRKRLRWLRDWILPRGRAEDNRAIRHVGGLSLTRIATIKSLYQVQKAFRMQPEPDDLRKNIPSKGDDTLRDFGRSILDVMEHMREQRVKQLASRIAEAALGIGRMKRPKGGKDPKRPRARVDEPCHAVVIENLTNYRPEETRTRRENRQLMTWSSAKVKKYLAETCQLNGLHLREISANYTSRQDSRTGAPGIRCQDVTIKEFMQSPFWRKRVAQAEKKQAEGKGDAHERFLCDMNAKWKDKPEADWERAVAVRVPLKGGEIFVSANAESPVAKGLQADLNAAANIGLKALLDPDWPGRWWYVPCDPTTFKPAKDKVAGSTAICLDKPLKSVSAVQDMDGPEKKRGKAGEKSREIVNLWRDVSSHPIDSDEGWRESRDYWGDVEKRVLDILRESVEKDSIPF

SEQ ID NO: 61799 - protein, 1489 aa, Unknown
  Source - Accession No. Ga0209513_1002134
MADGKPPTFPRTYTMRLCPPDEGQADRNGLWDKLFATHYAVNAGARAFGEFLLDMRGGLSPDLSRMGLDRIKDDAKRRLALAGRRRMLALGWLSVEDDHGAGDHPHALPESSGQPLPRDVAEKLLRQILETKGVTDRATVDEWCDDCLGALTAAVRDDTVWVNRAESYRNLDSGPSPDQAFKILERLLGKNFLDLSLGKETRTRDRHRGQLGTDEGEDGEDKEEWRTTAASGNDPSENARQLICDLFGTGQKGDFRKTAGFAAKVKNWVNSLGDYKNCDQPSLENRIRETFRSVFSGGEYPSFPSKELKKSRPKPTSLYPQECVSGKKPGKLARRVRKLLVYLKVWDQMPGVEDGTIRDNRLHALVNEIDSACDEEIKKDRTDLKAPSWAPALLSRLEKASGIKLASRQQGSPSAGEFRILFAVLAARRLSQTQSWTRLNEMTRHEAQSDLDSAKSEIDRLDPKGKARGLLERWEDRRRQESGTRGEYRITRAAISALDDVLEAWATSTGPEERIGLLPEVQSRAEKFGDASFFEWLARTDNECLWKHASTGAISGEIITNWVKKREAEAAISLVKVPRYCHPDPFLHPVWCEFGNSKPDVRYFLRNELGQTNKRRKNSQHSEDLRNVELLLVNDRSGTVGMERLRWASDRLWKDLGVAATQSSDALARNDRLSRAALGLSTGSYRPIYPFTGQAKKWNARLQVDRNALEELRGLWDNRTRKWTDEGRRAHQVRWFLSFSPDLKASAGPWHRFVENNRDILNDLSTRPYKDKKTDELRVPLPWGKLNRKENRKGRAQLVLCRLPGLRVLSVDLGHRHAAACAVWETLSTAQINQLCYQHHQPPPGPSSLYHVYETSIPDTDGCTGEVRKLKRLKPKQFIYRRIGPDRVNGREHPAPWARLVRQFVIPLQGEKDEPRWPTEEEKRLAHTLRLTLELPESKVERPVRFDELMSGIIDMLERGIDRHKKASRVAYNLTAREIVEPGGKLVPVDGTDRYEVISSALKDWYSLASSPGLYSNFAREIWNAKCAGLKGGRPVPAETAADEPEKVSFSDLAKGLAESEHLTRELHDLWAGKWHENQPKWRPLLKEIRRRLVPSSGFARNNKRLLRHVGGLRLDRITLFQRFHRLQLSYRDCPPPEESGIKKGAENSTHEHFGQRLLDDIDRMRENRVKQLASRIVEAALGIGREPADSKRRREQTPGRGDHAPCHAIVIENLAYYRPSEEQTRRENRQLMSWSSARIRKYLQEACLLNGVLWYEIWSAYSSRQDSRTGAFGLRCRDIPVASFVDPQGFLRDHLRRVKLANSPEATMLRELEARWNAATRVWKVSPDEAWQLSDDGRRWAWAGPKPQMVGDRRKVPDPVRIPWRGGEIFVSSNERSPAAKGVNADMNAAANLGLRVLLDPDWPGAWWYWPARLTGKGRVPVDETCKGSACFPAGYEIETGESKEETVNLWRDITCASIESGGWQEYAGYSAQRRNAVINILRKHNGL

SEQ ID NO: 61800 - protein, 449 aa, Unknown
  Microbial source - Accession No. Ga0209542_10001012
MAKGKKKEGKPLYRAVRFEIFPTSDQITLFLRVSKNLQQVWNEAWQERQSCYEQFFGSIYERIGQAKKRAQEAGFSEVWENEAKKGLNKKLRQQEISMQLVSEKESLLQELSIAFQEHGVTLYDQINGLTARRIIGEFALIPRNWQEETLDSLDGSFKSFLALRKNGDPDAKPPRQRVSENSFYKIPGRSGFKVSNGQIYLSFGKIGQTLTSVIPEFQLKRLETAIKLKKFELCRDERDMAKPGRFWISVAYEIPKPEKVPVVSKQITYLAIGASRLGVVSPKGEFCLNLPRSDYHWKPQINALQERLEGVVKGSRKWKKRMAACTRMFAKLGHQQKQHGQYEVVKKLLRHGVHFVVTELKVRSKPGALADASKSDRKGSPTGPNWSAQNTGNIARLIQKLTDKASEHGGTVIKRNPPLLSLEERQLPDAQRKIFIAKKLREEFLADQK

SEQ ID NO: 61801 - protein, 447 aa, Unknown
  Microbial source - Accession No. Ga0209542_10007289
MAKGRKKEDKPLYRAVRFEVFPAPEEVALLFRVSENLRYVWNTALRDRQKSFEDFLKPIYEKIGQEKKRAQEAGFFDLWKDEICKDFNRLLRERDIPVNFISNKKSLLLELREVFKQHTITLYDQINELTQKRKDGEFGSVPRNWQEETLDSLDGSFKSFLALRKNGDVDAKPPRARADENGFYKIPGRYGFKVYEGKFQLSFGKLGQTLTFPIPEFQQERLAAAVKLKKFELYRDERNMAKAGRFWISIAYEIPKPVSLPLGNNVVFLSIGASRLGVVSSFGEFCFNLPRPDYHWKPEINVLDERIAKTVKGSRKWKKRIAARARMFAKLGHQQKQHGQYEVIQRLLQYGVHFVVTELQVRSKQGALADASDPTRGNSPFGANWSAQNTGNIGRFLQKLTDKAVENGGTVIKRKAPALSLQERSLTDDQRKILIARKLRDEFLAEK

SEQ ID NO: 61802 - protein, 722 aa, Unknown
  Microbial source - Accession No. Ga0209669_100016
MIGRVKLSTILILKLKYQNKQLYTRLRLSLISTQATARATTKVKAKKLTKTMLKLELKCEPNSLKFLDNLFNEYEQLVRIADSFIQHLYPYYANINEQEKLERLKELIKSLDEKAIRKNKRRKRELYEEEEQATTAKTKTETKHQYTHSNLLKTLLHRFIKYAKQYYGIDAKYAYLEMQGGLTDLMHSNAESAYKHRTIPNLRGLSNVMPIRVSKRPLLENRRSKDNNIDEYYQRTAEFIFNNGKIMFRIGSKRNGLTFKIAERFNDVERLGMLIDAIQGKNGLTIGDPSYLIRKDTDNGYRYYIMVSISKNVDVKVLREAVNNKNKIRIIGIDSNISKYIATMFCIEVDKENKEFKLVNAKGIDSKNYINAVKKYEEERRKLQQGRMKGKINKKKGSRYKEEEDYTVKNRCGDSKRIDIRRQLIGYICNQILEFANKNNADIILIEDLKGLNKELKTLRIIRNELGKLYNNVNDKGNNAIDDKINEVNKDKKYKNKIGKPLLEILNKIKECSNNNKNNTKVAKYILKQKQMIERRIFLLSIMAYYQFKQELEVEALWNGKLLYIINPKYTSQQCLRCNHTNKLNRITQRQFKCIRCKFEMNADFNASANIALRFATKLKLELELKQGESSSMMTITSATTPLHASINAGSKASEQGYRYNNANLVRNGSVAATMSSVASIALQGEGERRFPCLRGQTDEPCSAKRSIATLDEFLEKKGNGG

SEQ ID NO: 61803 - protein, 679 aa, Unknown
  Microbial source - Accession No. Ga0209669_101200
LSSKTKIKKITKTILKLELKCDPNSLKFLDNLFNEYEQLVRIADSFIQHLYPYYANINEQEKLERLKELVKSLDEKAIRKNKRRKREPYEEEEQTITAKTKTETKHQYTHSNLLKTLLHRFIKYAKKYYGIDTKYAWLEKQGGLADLMHSNAESAYKHRSIPNMRRRLTNVIPIRVSKIPLAENRRNKDKCNDDKPYERDTAFIFENGKIMFRIGRGKHKVTFKIATRFNDAERLGMLIHAIQGDSIFTIGDPCYLVRKDTDNGHRYYIMVSISKNVDKKALHERIENKSKIRIIGIDSNISKYIATMFCIEVDKENKTYKLVNAKGIDSKNYINAVKKYEEERRKLQQGRMKGKISKKKGSRYKEKEDYTIRNRCGDSKREDLRRQLIGYICNQILEFANENEADIIVIEDLKGLNKELKHLRIIKKELGKLYNDVNSKGNNAIDDKINEVNKNKKYKNKIRRPLLEILNKIKEYSNNKDRIKVAKYILKYKQRIEKRISLLSIMAYYQFKQELDVEALWNGKLLYTINPKYTSQQCLRCSHTSKFNRITQRQFKCIKCNFEMNADFNASANIALRFATKLKLELELKQGESSSMMTVTVTNATTPLHASINAGSKVGVVANNNTDGSVAPTMSSVASILQGCYEGRSLFMRGQTKQSCSARSIATLDEFLEKRGNGG

SEQ ID NO: 61804 - protein, 1184 aa, Unknown
  Microbial source - Accession No. Ga0209750-1000252
MFNKKKGYRLHLERIIYSGGEITRSIKYLLASHSDSQKNKELLNNFSQDLYNDDLKIRGCLNLNDLVNNNQIYNLADFWIDSLRAGVIWQSSASSLIDFIKRLNHQETIGEKIFNNANERIKRFFNSEKFIKEIILSEPKRISSKKQAFYNSLFDILKDEFKKQEKNEKIIIDNKAEQLIKEIVDAFYSNDGVFLMEGEEKQNKFWQENFNIDKNMIKKEKEDILKDVGDITAFIHPPLIILKGDVSQLIDERKKYFSEKDLEEILGLSDNFNAFSHYFNKFFLLLYQDKQEKIFECYQKIFSFSQEDRKRIKDALDFLLEKSKLLGLPKIVNSWSDYRSVFGGKIKSWFSNYLNREDKAKKQEKKIKEGLEKVNKFLLDFIQKNQVDSDLQQEIKFYYDKLNQFINSYQNQEFFHQQELFLLFSDLLAEYREKLNRFYQKYLSDKEKEEKKVDEFPLFKDLFEKYEGPISFYGKTKLEDNKKIIDLTFKTIKVGLNLIRRLLIDLYNSSDFKNSDNNNQERDLRRIFEFLLNKIPATKTFREKYLSILKDNFDQQTYKEMTLKPSRYTFVENIYSRENRKLIELPSKNFEELLSKIIKDLTDFSLSFKNDDLFVDIYLLSDLVELAKTLISLVINYSNKSQFDSYKNELIDDTYQKAKKYLETFKISFFNSKKEANYFYQTRVLSELKGAVALFSKKYYQAKYNIQILKSNEIFPLFVKFSDLLKKEEINDINKLKLIFKKPYRYLIALKKIKFKKKQQQSSVIHLDKKNKDLVLISPQDEDFLFKLTSSFYQLQFLDRFVYPVKKWLNVDITLSEWSFILEKKYKINWDFNNGKPEFSEIDSRLYLNIPFKIKAINQQKILKPKELFLGIDVGEYGVGYALVNFKDEEIKIIKSGFIRSKNIASIRDKYRLLQDRSKKGVYFSSTNVVQEVRENAIGEIRNQIHDILIKNNADLIYEYNISNFETGSGRITKIYDSIKKSDVYAENEADKSVIQHVWGIKKSIASHLSAYGSSYTCSNCGRSIFSFSENDIFSSKVIKRDGNIITIQTPKGEVFAYSKDKKFNIGYSFSQEKNKEEMKNLFMKIVKAYVRPPLLKSEVLLTQKKLDREFLEKFKKERGNSAIFVCPFFDCQSLADSDIQAAFIMALRGYLKKKKGKDINYLEESLNYLQNFKGKINFSNLLH

SEQ ID NO: 61805 - protein, 660 aa, Unknown
  Microbial source - Accession No. Ga0209827_10659006
VNGTETRDPTAVAEIKRENRVRVYRYGAREPLDVELVREQLRLAHQYRNVLVAIELTRRAEIDAALARLAPDLASVEREIGEPEREADPESGTPATEATGLLGEIAAAESAVRARRVKERGRPKDVGPLKSLRARLKSARARRKDLRAALFASPAWESERTRIEDANLLRCKAARAACGVYWGTYLAVETAARSFRRGPPPRFCAWRRRKDRLAVQIQGGLSISDLLSGEDTQARLVAEGRGARCCDGCRARVRRERRGQPEPTDARPCSCASLPPPSARRTDHATLWLRVGSTESSGPVWARVPIAYHRPMPPDARIKWIFLLRRSVGVDDVWSVSFVLERESWGDPERSSTGAVGIDVGWRRLEDGALRVAVWSGSDGREGEVALPAWWLREQRRVESIHGERDRIFDVARGALSAWLAGREGLTELLLEARKTLHAWRAQARLASLALRWRASRMEGDTETLSALESWRARDKHLLTFESHLRAQLQGSRRDLYRRVAADLSRRYATVVLEDMDLRTWHRLGPVEDGGSVEEDAARRYVRDACLSELCGAIEDRVREVRRVDPAGTTATCHACCRTQDVESLVHVCAGCGLRWDQDVNAARNLLAASGSVVSWGQESLAPVVRAGYSEDRNQRRRETEAGWAAARRAGREAAQNKGS

SEQ ID NO: 61806 - protein, 378 aa, Unknown
  Microbial source - Accession No. Ga0209980_10011112
VYIHSVEIRKTYRYRLYRSKRDKHLVRQIELAADIWNHFVALTRRYYSLYGSYPGYYRLKRHLAKLKKRNKGHWYGLGSQAAQNVIERLDRSYQRLFAGKGGRPGFKKRRKYPSFTLTQAGWKYLGGNRLRIMGHTYKFALSRPIDGQIKTLTIKRDRCGDLWVCFSVVQEAEPTIAQTGDAVGMDFGLRDLLTLSTGEQIESPQHLKQSLRELARLQRSLSRKQRGSNNWREACRDVAKLHRKIANQRRDFHFKTARRLLERYDIVAIEDLNLDGMKRLWGRKVSDLGFHQFVGILSHLAAMNGKQAVKIDRYFASSKTCSGCGWVKQDLTLADREWACAACSCVHDRDRNAALNIRDRALSHVVGDVRPARQAVAV

SEQ ID NO: 61807 - protein, 384 aa, Unknown
  Microbial source - Accession No. Ga2100049_1040060
MDTIKICVKGVISSRDKALQVLQKELKNYKKVLIPKVQKAVRKIAKDRSIKVYAQQKWMLDKKITGYVKNLPFHPMTFHNQSVWLERTEKGHFLIHFKTRQEEKEAVCHLQVPKKYRNQIEKACGKDNPVLGQVELIEDNKYGWINVHTTLRLPKPKPYEPKGWIGVDVGWSKLATSILVTANPHLHFTNPTVHGKDFKTRIIQLKYLLKQYARKGKSWKKWSFRLKQTVKYAVGTVAKEIVAKAKKHKAGVAMENLTFQSQTKRWLIPRYKLMIAVKTLCERKGIPFKLVSPRNTSITCPKCGYINAENRNGERFNCRKCGYQADSDIAAAMNIAAIGMGFTPMSKGVRLNAEASGHVARPLSTDETDDLYKGRCKPNIIEER

SEQ ID NO: 61808 - protein, 362 aa, Unknown
  Microbial source - Accession No. Ga210051_1028938
METIKFCVKSVISPKDKALQILQKEFKNYKKVLIPRVQKAVRAVVKDRNVKVYSQQKWMLDKKITEYVKNLPFHPIAFHNQSVWLERTEKGYFYIHFKTKQEEKEAVCYLRVPTKYHNQIEKACGKDNPVLGQVELIEDNKYGWINVHIILRLPKPEPYKPKGWVGVDIGWNKLATSILATANPHLHFTNPTVHGKDFKTRIIQLKYLLKDYARKGNAWKKWDFRLKQTVKYMVGTVAKEIVTKAEKHKAGVAMEDLTFQSQTKRWLIPRYKLMVAVKTLCERKGIRFKLVSPRNTSITCPKCGYINAENRNGERFTCRECGYQADADISAAMNIATIAMGFTPVAKEVRLYAEASGDVATP

SEQ ID NO: 61809 - protein, 641 aa, Unknown
  Microbial source - Accession No. Ga210057_1032582
NIDFYAPSSEILKIRKHSSHTKNGSPQKSFEKSEFKVSDCHKMISFFKKSLQKHPEWNCFGFRFSPTKTYGAIDEFYRELKNQSYSISYIPFDKNLLMEYIDQGKLYLFQIWNKDFSKHSKGKPNLHTIYWKALFDPKNLKNVMYQLNGEAEMFYRKKSIKNPKIHKANEPIKNKNPNNPKKESVFGYDLVKDRRYTVDKFQFHVPITLNFKATGTGRINDTVLRFIKNNPEVNIIGLDRGERHLIYLTLIDQKGNILKQQSLNIATRKIPASKKFNIETNYHELLDNKEKERDKSRKDWRVVENIKELKEGYISQIVYDISKMMVKHNAIVVMEDLNFGFKRGRFKVEKQIYQKLEKKLIDKLNYLVFKDKAENEIGGLYCALQLTNKFESFKKLGKQSGFLFYVPAWHTSKIDPTSGFVNLFNTRYESADKAKRFFNNFENIRYNKDRDYFEFEVKEYSKFNPKADGTRQEWVICTNGDRIKTSRNPSKNNQWNNEKIVLSDEFKNLFKKYKIEYEKDLKNSILSQTEKTFFEKLLNLFKYTVQMRNSVTGSEVDYIISPVMNAKGEFYDSRKAGGDLPKDADANGAYQIAKKGAWVLNQIKAHEGKDWKKLNLAISNKEWLQFAQAGEGSIYGKIQNN

SEQ ID NO: 61810 - protein, 606 aa, Unknown
  Microbial source - Accession No. Ga214474_1011027
MASKSIEAKVICRGNDQYTAEQKKQFLWLTHQTFNEGVRKVLPYVFKMKRGELGEEFQAIYYAISTSQDAIGKLEAIVNPEWKTKKIGKSQPDQWRQLLQYREIEREFREKIKSEGGKSTKKFRRELKKAKARLAKEVGQKDIWAAAAAILRQRQNLLFNRDKVLPNLPSEFRRKIYEMTIQLMHGNQELIANWEDEHAEWLMAREKWEEENPEYIKVRPILERFEKEQGKVKGSRIRWLAYLDYLSSHSQLAAWRGGKAEIIPLTSEERKSFRKPRQHFEAFFKKNPEIAELDKKHNYYQREFARTQSKRSRHLDGFKHKPTFTLPSATQHPAWYSFKKNATYDNLDLGNGSIDLKLLTGEGENIRGKITYQFEADSRLKRFRKVGTKDKGGKAKSYLYADPILDKERKAEIKGIKLIFRPARPDGIPYLVFTCDIEDEKPTVKIWKEDTPEESNKASTAKKKSKRVYPPELVTLAIDFGQRHLGAITVCKNNKCQPEPISFLPGYLKKKKGYESKPVKAWLATIPGLSFNALKMHELEISSGMSRRFKDPTSKRQAGAEGKTSRTRRIPEDEKSWAGLRDHIAGMKEDFYKKAAHLIVQTALQN

SEQ ID NO: 61811 - protein, 1124 aa, Unknown
  Microbial source - Accession No. Ga255343_1026926
TLRGGLDHALADTKIPVSKGKDKSDRDPTKDERKARRILLALSWLSVESKRGAPARHIVAHDLDEQSDTRSNWKTVEALKEILKHRGLGESEIQLWVEDCSASLTAAIRDDAVWVNRSKAFDEAVESLDSSLTRDEVWDMLERFFGSRDAYLAPGEDSEESSETEQEDKAKDLVQKAGQWLSSRFGTGKGADFCRIAKVYSRIAAWAGKAEVGMTGAAAIANLAAALDKFSPPSKDLKGVLNLISGPGYKSATRNLLNKIVDEINITEKDLEKLKKAATEDKRKCKANTQSKGQRSYANAILKDVEDVCGFAYRNDKDGRPVSVVDYPKYGDNYSWGPARHSEYAVMLDHAARRVSSTHTWLKRAEAERRRFEKDAKRMNSVPCSVKAWLDTFCMERSEAMGALEPYRIRRRAVDGWDKVVRAWAGCQTEAERREAVHTVQSECQANDEKFGDAQLFEALADDDSCGVWLLSDGDSENSPDPQPLIDYVLATDAEFRKRHFKVPAYRHPDALLHPIFCDFGLSRWDIKFAVHEARKNTTRKTQDAMSDDDPHALSMTLWTGRAIESRRFRWQSKRLTHDLALDETRQREDGASEISRADRLGRAAAGVSPHGAVRIAHIFSDKMIWNGRLQAPRGQLNAIAARVADHGWDAKAKQMRDHLQWLITFSARLEPVGPWIEYKTGFPDDAPAKPFVSRRGDYAVKHQSNDERKGHAKLILSRLPGLRVLSVDLGHRYAAACAVWEALSAEQATEACQAAGHEPPKDSDLYLHLKSKETDGKVRTIIYRRIGADTLPDGKPHPAPWARLDRQFLIKLQGEDRQARKASPAEIAAVEELEKAVGRKPPDRRSMQVDDLMAEAVRTMRLSLRHHGRRARIAFNLTAGKKLLPGGREEVLTDGTRADLLADTLADWYDLFTGQGWGDEWAQQQWEAHVTPLLQGTALPQAPEDDEATFKARKKYRANLIKNLQPAAESLARDASLCRQLHCLWATHWRENDAALRKRLRWLRDWILPRGKAKDDRAIRHVGGLSLMRIATVRLLSQVQKAFHTRSEPEDLRKNIPPKGDDALSDFDRSLLDTLEHMREQRVKQLASRIAEAALGIGREHVFPTKKEREKKCWCGKVHDKKD

SEQ ID NO: 61812 - protein, 1493 aa, Unknown
  Microbial source - Accession No. Ga0255346_1002844
MPQQAKPPVTQRAYTLRLRGAGPSDISWRKALWQTHEGVNKGAKAFGDWLLTLRGGLDHTLADTKVKGGKGKPDRDPTDEERKARRVLLALSWLSVESKLGAPEGYIIASGEEAAEDRNGKVVTVLEELLKSRNVPNNEISEWKNDCSASLSAAIRDDAVWVNRSKAFDDAVKSVGCSLTREEAWDMLERFFGSRDAYLAPVKGSEDESSETEQEDKAKDLVQKAGQWLSSRFGTGKGADFCRMADVYGKIAAWADNAQADTTGNDAINNLAAALNESTLASNDLQGVLGLISGPGYKSATRNLLNQLATKTIVTQQDLANLKDKAIKDAQKCNQNTGSKGKRPYSDAILKNVEAVCGFTYLQDGGSARHSEFAVILDHAARRVSLAHTWIKRAEAERRRFEEDTQRLANVPGPVKDWLDSFCSERSGTSGALEPYRIRRRAVDGWKEVVTAWSKSSCSTSADRIAAARALQDDPEIDKFGDIQLFEALAEDDAVCVWHKEGDAAKAPDPQPLIDYALAAEAEFKKRHFKVPAYRHPDALLHPIFCDFGKSRWDICFDVHKNAQTPFPRALCLTLWTGNGMVSVPLCWQSKRLAHDLALGQDVQNDGSSEVARADRLGRAASNVTKSDEVKISGLFEQADWNGRLQAPRQQLEAIAVVRDNLSLSDQERERRMSGMMDRIRWLVTFSAKLQPQGPWCEFAEKLQLRINPQYWPHADTNKDRKGHARLILSRLPGLRVLSVDLGHRYAAACAVWEAVAKGDFEKECSNAKGKGAEIHYGPDGCKPEDAIYAHLVWPEKASNSATKKAKTEGRDKFHPVTIYRRIGADTLPDGTQHPAPWARLDRQFLIRLQGEEEGVREASNEEVWKVHQMEAELGRTAPIIDRLVKAGWGQSGKQRTRLEALRELGWKPASEAAGVSDDMDADEGDDRKPSLSVDELMSSAVRTMRLALKRHGDRARIAHYLITDEKTKPGGTKEKLDENGRVDLLQDALVMWHDLFSSRGWRDDAARQLWDEHVAKLSGYKAPEEIGEEFSGPERKKKQKENREKLHDVAKAMAQDVTIREALHDAWKKRWKDDDERWKKQLRWFKDWVLPRGKHASDPTIRKVGGLSLPRLATLTEFRRKVQVGFFTRLQPDGTRAETKEQFGQSALDALEHLREQRVKQLASRIAEAALGIGSEGGKGWEGNKRPRQHINDPRFAPCHAIVIEDLTHYRPEETRTRRENRQLMTWSSSKVKKYLAEACQLHGLHLREVSASYTSRQDSRTGAPGIRCQDVPVKEFMRSPFWRKQIAQAEKKQAEGKGDARERFLRDLNAMWKDKTVANWEKAGVIRVPVRGGEIFVSASRDSQGAKSLQADLNAAANIGLRALTDPDWPGKWWYVPCDPAGFRPIKDKVEGSTAVKLDQALRQPAQAQSGDAAKDKKKRGNKGGGKSKEVVNLWRDISSSPLECIEFGEWKEYAAYQNEVQCRVIRILEEQIKGRHKQPHEGSEEDDISF

SEQ ID NO: 61813 - protein, 1505 aa, Unknown
  Microbial source - Accession No. Ga0255355_1000451
MATENGKEQPSVTTQRAYTLRLCGLDKHDNTWRDRLWNTHEAVNKGAKAFGDWLLTMRGGLCHTLAEVDIPGIGKKLARNPTQQEIKNRRIVLALSWLSVESIHGAPESHLVSHDLDTVTGERKNWKTVDALHEILRSRHLCEEEVNQWVVDCRDSLSAKIREDAVWVNRSKAFDLAKARKGASLSREDIWDFLQPFFGNNYSYLKMKTAVTNTSENSEADSEESKDEPSEEKAKDLSQKAGQWLSSRFGTGTGADFCRFYEVYDAMAKHCQNIQAGVSGAAVCGSLADALHGFSPSSRSINGILELISGPGYKSATRNVLQQINNMQSVSQLDIDRVRDASEKDAQQSREKVGGKGSRPYANAVLQDVEAASSITYHNAGNGPSHHWQYAVILDHAARRVSMAHSWIKRAEEERSKFEIEKDKLQCVPSDARAWLDAYCARRSSESGAIDAYRIRRSAVDGWKQVVAEWAALLAKAKNAGSEPPSEAESARIQAARKLQDTIEKFGDIQLFESLSLPDAKCVWLTNGKPDAQPLMDYVAGTDAVSKKQRFKVPAYRHPDAFLHPVFCDFGNSRWSIDYAVHRAPEKLARAQQLLEKKKEELTRAEQALSKASDPSKRSSIEKKLKTLNVAFKQQEAEVLWLESHHAMTMGLWNGSRIEDTPLLWQSKRFGSDIGQAGAEHPLVASRADRFGRAVAMAKDNAPVVPSGLFDLADWNGRLQAPRRQLDAIAAIHDRTDLSVEEKRQLVAKRIRTIRWLVTFSAKLQSRGPFIAYAAQHGFDWRYGAHGIENKSREGLAKLVLCRLPGLRILSVDLGHRYAAACAVWETLSAAQMQNACLEAGMEAPSQRTLYLHLKHFVNGKEKKTIYRRIGADTLPDGSPHPASWARLDRQFLIKLQGEDRDARPATCDEVVAVEQLETELGYVRPIKRKGREHLVDELMSDALRTLRLGLQRHGARARIAFNLTATKRTRPGGIQELLDQESRIGLLTETLLEWNELYAGERWADELARDMWNKHIQPLLGGTILQETNNQDVTPSAAKRRMQREETREKLRPVAKQIAENDSLCRQLNVLWSTRWQIEDAAWRMRLRWMRRWLLPRGINRDPQFRKSIRDVGGLSLIRIASFKSLYQVQKAYWMRPHPDDLRRNIPERGDSSLTSFGQRVLDAMERMRENRVKQLASRIAEAALGIGDETSVNAKNGRQKRPTERSNDPRFAPCHAVVIEDLTHYRPDETQTRRENRQLMSWSSSKVKKYLGEACQLNGLYLREVPPAYTSRQDSRTGAPGLRCNDVTVAEFYTSRFWRKQVEAAEKNQKDGKKGDARERYLLSIDERIRSEANDRDVFRIPVKGGEIFVSACGQDGGSNANRKAPPGLQADLNAAANIGLRAIFDPDWEGRWWYIPCDATTICPVAKKFNGCKAVDSSKPLRIVAEKVAVSSSGIDEKRSGRKGIALTDGSRIVNLWRDPSGAPIRRDVPSNSEWQDYAEYWNKVQSRVIANLRKSYGLREI

SEQ ID NO: 61814 - protein, 475 aa, Unknown
  Microbial source - Accession No. Ga0255811_11272827
MDEPRITKVLKLHILKPADTLTWKELGDILRDTRYRVFRLANLAVSEAYLHFHLWRTGKNDLFERRTVGRLNRELREMLEKEGVSKENLDMVSNTGALPANVTDALAQYKLRAITKTAKWNEIIRGKCSLPIYRLDMAIPVRCDKKDQRRLSRTKDGDIVVELMVRQRPYPKVMLATQRNSLGDGQRAILDRLVDGADGYRQRCFEIKEDKRTRKWHLFVTYDFPVTTSARVSEERVVGVDLGYSCPLYAAVNTGFARLGRRHFVALAGAVRSLQTQTMRRRREIQRGGNVTTGGQSARAGHGRKRKLAPIEKLEGRIDAAYKTLNHQMSAAVIKFAGDNGAGVIQMEKLEGLAAELTGTFLGERWRYEELQRFITYKAAEAGIKIRMIDPRYTSRRCSACGHINEKFTRQFRDTEGEKGRVTRFICPECGYTADPDYNAARNISTIGIEDLIQQQRIKQGLTQNDKEGGKTNSK

SEQ ID NO: 61815 - protein, 1554 aa, Unknown
  Microbial source - Accession No. Ga0255812_10127107
VYTGGQGLPLHAGNRKLCFEKFHNQEIASLAAMSFKGAVLHVSSENRKEMDMTQQNRPSVTQRAYTLRLYGANSEDASWRKALWLTHEAVNNGAKTFGDWLLTLRGGLDHTLADAKVKGAKGKPDRDPSIEERKKRRILLALSWLSVESKRGAPAAYIIATGREITENRNSKVVAAFEEILKSRGLTDTEIAEWRSDCTASLSATIRDDAVWVNRSKAFDDAAKSVGRSLTREQLWDMLDPFFGSRDAYLAPTKSSEDDSLEEEQGEKAKDLVQKAGKWLSSRFGTGEGADFSRIADVYEKITAWADAFQVGKTTTGDEAIKNLAAALSEFKPVSNDLTGVLRLISGPGYKSATRNHLNSLFGKKRINQEDIQILKTKAANDAQQCRQNTGSKGYRPYANAILKDVEDACGFTYRTDKDNKDVSVSDYSKFEDGYRWGPARHSEFAVMLDHAARRVSLAHTWIKRAEVERRRFEDDALKREQVPENVKKWLDDFCWKRSEASGALESYRIRRRAVDGWKNIVGAWSKAECRTMEDRITAARALQDDPDIEKFGDIQLFEALAEDDAVCVWYKDGDPAKEPEPQNLIDYALAAEADYKKRQFKVPAYRHPDALLHPVFCDFGESRWDISFSVHQQERNKSKLNNKKMITQGSPLRGLSLTLLTNIGIKPVLLCWQSKRLARDLALVSNADKGHVVNVSRADRLGRAASAVTENDTVAIESIFEEKKWNGRLQAPRRQLEAIAAVQNNSRFSAEERARRIQRMRERIRWVVTFSARLQPQGPWCEYAEKHRFKPDPRYWPHAEINKNRKGYARLILSRLPGLRVLSVDLGHRYAAACVVWEAVDAAHIKEACRAAGRESPNESDLYLHLKTKGQDGKERITIYRRIGADALPGNTPHPASWARLDRQFLIKLQGEEEGAREASNEEIWAVHRLESGLGRVAPLIDKLIAAGWGGTDKQKARLEALKQLGWSDRTAAASAGAGAEADEESGGIVPSLAVDELMSSAVRTMRLGLKRHGDRARIAFYLVTEEKTMPGGVKNKLDEQGKIDLITDALILWHDLFSSRGWCDDAAKKLWDDYIAKLSVYRALEEGDKDDSGSERRKQKDENRRKLYNVAEALLQDTDLQQRLHNAWKKRWEEDDEWWKRQLRWFRDWLLPRGKHTRDPGIRKAGGLSLIRIATLTEFRRKVQVGFFTRLRPDGTREEIKEQFGQSTLDALEHLREQRVKQLASRIVEGALGVGSESPRHWDGCKRPRRCINDQRFAPCHAVVIEDLTHYRPEETRTRRENRQLMIWSSSKVKKFLSEACQLYGLHLREVSPSYTSRQDSRTGAPGIRCQDVSVCEFMRSPFWRKQVKKAKAKQDKNEGDAREKFLCDVDALWNDKTAADWVKAGFIRVPINGGEIFVSADPNSPAANGLQADLNAAANIGLRALSDPDWPGRWWYVPCERADFRPVKDKVEGSAVVKLNQVLRQPTQGKKDGINKKKKDGDSRVVATNEVVNLWRDISSLPLESAEAGEWKEYAAYTKEVQYRVVNILKKQIQGRCGQPHDRHREDDISF

SEQ ID NO: 61816 - protein, 1154 aa, Unknown
  Microbial source - Accession No. Ga0272446_1000057
LHEDFICQSLEKANIDFSEYLRLFENLLELKGKKQRETDKELKIKIETTIKNEEEKKKKLEEILRKKICELYQITAKEWNNKFVDEKGKPLFKKKSYDILTEAPILKFLEMIYRDDKEKISIIHKFHGFFTYFTGFNQNRENYYSDKELSTGVANRIINENLPKFCQNICKFSKSRELFESEQELKKHFDIFELKYYNNALTQDGIDKYNGCIGEFNHFVSHYNQQHKNKTRLQSFNTLFKQIGSLKKKKEFIFEIDEKDNTLEKVLNQFVDQSARVNKKKKILKLSCILCSTEDLNGIYINKKSISEVSRMVLANWDTLSQELVEAEVWHLNKETEYPKEKENTSLQEIVDSLKGKESLFKEEFQKFDEKNRFLSALTHLLKLKFDFYESNLTKLKILLEKKSDLRKKESKDVIKGFCDSAIDLIRFVRLFSVKTPPENINTDFYNLHKEILEDPDYPVFKWYDAIRNNLTKKPYSLDKIKLNFDKGNLLGGWTDSPIGNTQYSAFLFRKESEYFLGICLNTRLFDENKNPHAYKKDGKMEKMVFTQLDAKTIYGSIYRGKYKSKYSDDKKVMSDSELIDRIKSILESQKKHYTKLDKIIQTKFDKATDLARVISTNKFYSLNFVNISEEYLRSSTVNADKPLYLFKITNKDFSKKDKSKKDNLHTKYWKVLFENKDNIIKLNGQAELFFRPASIKEKDKVKVETFEKKRIIDHAIKHARFARDHYEFHVPITLNFGCGEYKKITDKVRDLVKSKKAGMNIIGIDRGEKHLAYYSIIDPNGNILEQGSLNKDLLGKDYAQKLEKIAKERQEARKNWEEITRIKDIKEGYISQVVKRIADLAVKYEALIVFEDLNIGFKRGRQKIESSVYQKLELAIAKKLSFYVSKESEENEIGSVTKALQLVPPINNYGDIKGKQFGIILYTRANYTSQTDPLTGWRKSIYIKKGSNQYIKSQILDNFSDIYFDGEDYVFVYKDDNDKEWRLYSGINGRPLDRYRGKKGKSQNTWIIEKQDHVKILDTLFSKFDKKRSIHAQIKEGIELTKDSPNVTSYESLKYAIDLIMQIRNTGIEESDKDFILSPVRNEDGIHFDSRKAKKDQPDSGDANGAYNIARKGLLMCKRIIESEKPDLFIKEKEWDKAASNWDKEFVRQKWTM

SEQ ID NO: 61817 - protein, 1321 aa, Unknown
  Microbial source - Accession No. Ga02722446_1000164
MFDQFTNLYELSKTLRFELKPVGKTRENMNEHLKYDEVLKTFMADQKIEDAYQTLKPVLDALHERFINDSLELDEVKNIDFSEYLEKYRDKDLKNKDFEALERKLRVKFKKLYEKVGENWIAKAGFNDKGKPVFKEKSFKILTEKGVLDFIKKNADNFTFVSKEQLEGAIKVFENFFTYFTGFNRNRENYYETGKEAYTAVATRIIHDNLPKFCDNLIVFESRSKDYLGAYELLKGRGLSLVTKEGRPLMPIVDNIFRIDYFRKCLSQAQIEEYNKQIGNANFVVNLYNQVFSGNSDFKKLLSFKLLYKQIGCGKRRSFFVELTHDTIAEADKARGEGKKAFSVEELVLLAKQAGEIYFQGKSDDGIINTVPELLDYLEKKSDYRGIYWSKTAINTVSGKYFANWFDLKNKFKEAKVFEKNKKGSEEEVKIPDVVELEDLFSVLNEWSDWKTTLFKSSIMQDAKKRELIEKSPNASTALLSLLFADIKDHAECFIDEANEVSQVKDFKKEENKILIKLWMDHALVVCKMLKYFLVREDKVKKVKGALMDATIVEALNNILSGQVEVDKNGKKIAAEVDWFEWYNYFRNYLTKKPQDDAKKNKLKLNFECASLLGGWSDGQEKEKGAVLLKKDNFYYLGILKKKNLFDTEKENNPVYQNPTFSAGRLILANLKFSTLAGKGFLYEFGKAYGDMGAEDPDKAIKCLKKIIKDRYEEKYPLLARIAATHYSDKKVFDKDIQETLKECYVCRFEPVSWIKVEEYVDDGELYLFQIYSKDFATNNTGKNDLQTLYWKAIFDEYSSFQLNGRGEIFYRKQAIKEKIVKVGYEGKPWVIADKRFTLEEGKFAFHCPIKINYKAKNYSQPKFAFSEINKIINDGFGKFSNIYFLGIDRGEKHLAYYCLVDQNSKIIEQGSLNMPFVDASGNPRMVKTERKFIQEDGKEQLEIVECKDYNELLEARAGNRDYARKNWQVIGTIKELKEGYISQVVHKIAGLCANKEHPVFIVLEDLNTGFKRGRQKIEKSVYQKLELALAKKLNFLVDKNAKLGEVGSVTKALQLTPPVNHYADIKNKKQVGVMLYTRANYTSQTDPKTGWRKSVYLKPGSEENIKNQILEQFSDILFDGKDFVFVYADANTGTEWKLYSGINGISLDRFTVKKGVKNEWCIEKQDIVEILEGVFSKFEKNRSFLSQIKDEGRELTKISDHTAWESLRFAIELIQKIRNTGITSRDNDFLLSPVRDSAGNHFDSRVYLDKEQRGEKIDLPSCGDANGAYNIARKGIIMWEHINRGYRPYVSDDEWDAWLAGVTNWEKWREGNEKLLKYNK

SEQ ID NO: 61818 - protein, 1174 aa, Unknown
  Microbial source - Accession No. Ga0272446_1001728
MQNYKITKTIRFKLEANPEQTEALLNQVEKSNQAFDLVFFTSKLKNFADGMRDYLMFQKGKEPEKWQFRKNFTIKKDWLKVYAKEELANIKQKQKEEQDKKSRRQPIQLNEGAKEIIQKSLGEVYAIYQELIQDVSKELNERARRERTGLLLKRLQEKNNLPLLCDLTEHISSGNETDNSIYELLKEKEMLQKELLQGIAEFLPAQSSGLPIAKATFNYYTINKKPTDYAQKIEEQLKELSISDYSKKIQINSKLFLGNDNFKKVMEDIRNRLKKDNITHLLFGHVPASISLGYEYRSLRQILKNIKAEQKKKFNELMMEDDFTYDKLKKEQDLYLFTSIKKEQFDEYLDKTRKIQELADKINDKSLSKEEKENLTSKKQTIAKKRGELLRDKFIDWKKFMEIYRSVAQKHGKILASLKGIEKEKVESQLLKYWALILKVNAQYKLVLIPRDKVQDAKKWIENHKNNKKTDTQELPQLYWFESLTFKSLQKLCWGHAETDNNEFRKNIISIIPKNKNNKPYTGEHEFEGKEQDKINFYKKVLQDKYTRDVLHLPFAQIDKEIISKNFDTLEDFKITLEKICYRRQVILNQDAEETLTKQFKAQILNITSLDLSRKSNESALKPHTQIWKNFWSDSNEKQHFDIRLNPEITITYRKPKPSRVHKYGKNSQNYDEKKKNRYLNPQFTLVTTMSEHCNAPQKNLSFITEEELKKEIDTFNQKFREKNQIKFAIGLDNGETELSTLGIFVPDFNKNTNEERLAQLRKVQEYGFEALTIKNLNYAERDYNGNPRKMIDNPSYFLNKSLYMRTFIKTEQEYERMFAEQFEKKHLLSLDLSAAKVICGHIVTNGDTRALFNLWMRHAERLIYFANDHIKEETAKKVLIKTIQELLPAEKEKLAESISKEKKYAKLSEQEKLRYFTWLFEDRKLYSFNEEENKKFNDILERKGNYAIGTVFSVTYLGEELVDVKSVFDIRLIFKKREEFYSILSEEEIMKELSRYNTNRTSHDLSNQELDLKLKTYKETIVANAIGVIDFLYKQYKQRFGGEGLIVKEDFDTPKIQEDLERFSGNIYRILERKLYQKFQNYGLVPPIKSLLSLRNQKVALDSIFNLGVVSFANPDKTSQQCPVCLEGKLYHGKKCDKCGFRATMMHSNDGIAGYNIAKRGFNNFQSLLPLKQ

SEQ ID NO: 61819 - protein, 1267 aa, Unknown
  Microbial source - Accession No. Ga0272446_1001728
MKNFIAKYSVSKTLRFELKPIGKTLENIQKNGLISKDEMLAENYKEMKKTIDEFHKEFIHKTLSNASLDKENLKEIAELYTAPAEKRKEDNYKNQLKAYQKALRKEIVDHFKNDELFKNLFAEKLIKNHLQGFAQQKGLRFYSEFNNFTTYFVGFHENRKNIYTDEDKRTSIAYRLIHENLPKFIHNIAVFEKIQEKKIPLTILENQFMSKLGNDTLADVFRLEYYNCLLTQNSIDFINQLIGGYVNENQEKIQGLNEYINLYNQQQKDKKDRLPKMKMLYKQILSDRESISFLPQSFKESQEVLDAIRDYYLSNLLEYRAEDKEEPENVLEKIQERLSHIADYDLSKIYIRNDKAITDISQTIFGHWGLIHSALEFDFRQKNVGKKTTQKQEEDVEKYLKSDYYSIAEIENALISYKESTQNEKLVEVFNKTSHPIADYFKTYFKAKEKSKEGKEYTLIANIQAKYTCVEGLLNTDYPKDKKLHTDKDNLRNLKAFLDAILELLHFVKPLIISKNDFLEKDENFYSSIEPYYKQLELLIPLYNKVRNFATQKPYSTEKIKLNFENSTLLNGWDKNKESDNTCVLFRKGEDFYLGIMNKKYNKIFENVPKPKSDTTFLKMEYKLLPGANKMLPKVFFSKKNIAYYAPDSEILRIRNHSTHTKDGEPQKGYEKQAFKLEDCHKMIDFFKSSIEKHPEWKNFNFTFSNTQSYQSIDEFYREVEEQGYSISFVEVDEEYINQCVNEGKLYLFQIYNKDFSKNKKSKGKPNLHTLYWKALFDPENLKDVIYKLNGEAEVFYRKKSISAENIIVHKAQKPIENKNPLNLTKYSIFQYDIIKDRHYTEDKFLFHVPITLNFKSKKGKENINQEVLDYLKENPDVNIIGIDRGERHLLYLTVINSKGQILHQESLNTLKNETYNIQTDYHALLHEKEKDRDKARKEWGVIENIKELKEGYLSAIIHNIAKLMVQYNAIVVMEDLNSGFKRGRIKVEKQVYQKFEKMLIEKLNYLVFKDVPNYEPGGLYNALQLTSKFESFEKLGKQSGFLFYIPAWNTSKIDPTTGFVNLFGGIKYESIHQAVNFFEKFQSIRYNTKEAYFEFAFDYNDFTTKAEGTKTQWTVCTHGERIINFRNTEKNSEWDSKTVQLTQQIKNLLNEYHIAYEQGQDIKPAITAQNDKKFFEELLKQFKNTLQMRNSVINSDVDYLISPVMNAKGEFFDTRKTDSTLPQNADANGAYHIAKKGLLHVQQIIDGVKKTDLTNKKWLKFVQNNL

SEQ ID NO: 61820 - protein, 583 aa, Unknown
  Microbial source - Accession No. Ga0272446_1001929
MKVVEFKLQLTDDQASKVDTWLNQLRWVWNEALRRVNEERQRYYRKQVNEDGTFGKVEDTGEVWQVWYNKEIKEKAYCCHIADKTRYADYAPCCEIRPYRHQQYANLKELKKWARNAATQKCNPDKPWLKDIPSCFSDFVARDLIKAWEQALSKTNPARYPRFKGNRDTLRSLTDENGHDHLRKDIRGKRNWLVKLNNKLGFMRIIGKHDRFPKDFTVVRICKRASGYYLQVTSKDLEDKTLKRNDRPVGIDVGLKFIVATDQGRVVEPKRYARVAERRLRLLQRKAARRRDAVQKLEGCKGKNLEKVNQQIALLHENIKYRRRQFNHKLSTKLVREYGAIAVEKLQLKNLMRRPEPKLKENGTGYARNNAAAKSGLNKSFADAGLGQLLEMLKTKAEAAGRLFKEVDPSYTSQECSNCHEQVKKSLSTRTHVCPSCGFVEDRDVNAAKNILEKANFSSDYRCWDKREVKPASASSVEGQQESDSGSLDLGKELRAEDALRLTQSQKNNDHLLVEVNSPSKEAVIPTGSGLDEVRLLQQMHVNSETSTPLASEAVIDQVKASTPKPKPRKVKRCLQNQPEAPT

SEQ ID NO: 61821 - protein, 979 aa, Unknown
  Microbial source - Accession No. Ga0272446_1017314
MAELDPTQRAYTLRLQGQRREDYSWSDALWATHEAVNKGVKVFGDWLLTLRGGLDPGLAERPVKDKKGERPPEDKERKNRRILLALSWLSVESEQGAPEKYIVASGRDLTSERIEKVKTAFHEILKCKGLDENQIQAWTTDCLPSLSAAIREDAVWVNRNKAFEDAKRQYDITDEDVWDILEPFLGNVDAYFFIKDLPADDQDESAEESSGGGEEPKDLVKQAGQWLSSRFGTGKGADFDRMSAVYEKMAELTSRLEGEMTSGAFFESLAEHLSEFNPDSSEPQAILKLVSGPGYKSATRNLIKKFAEQPTLNSDDLMNFTNAAREDAQESRNKVGSKGQRNYADAILSSVERVCGFTYLTASDGSDVSVETRYQLPENYTWGTSRHKEFAVMLDHAARRVSIAHSWIKKAEARRNKFEADAQKIKDIHPDVKAYLDAYCESRASLVGSLEEYLIRPRAVSGWEEVVKAWAKLEKQPGWDNKEPDQRKQARVDVARELQDQIEKFGDIQLFESLASDDATLVWHKDGKADGEPDPELLKNYVKATVANFNKQRFKVPAYRHPDAYYHPVFCDFGNSRWDVRFSVHEAHTVLAEKKAQLERLQQEMQTTRNLTKKSKLQSQIKDLEEELRWLENPRLVQMKLWTGKSIAPVILRWQSKRLVQDLALKQNASTAPEVVSVSRADRLGRAAAGLSANHIVQVKNIFDEDHWNGRLQAPREQLEELARHVEKHGWDARAIKLRRSIQWLVTFSPKLEPWGPWCEYVNTHPDFKGLKTKNPSAWPHAEENKKRSGDARLILCRLPNLRVLSVDLGHRYAAACAVWETLSKEDFIKQTEGKKIKAGGTGSDSLYCHVEHECDGKKRTIIFRRIGSDILPDGSEHPAPWARLDRQFFIKLQGEQEGAREASNEEIWQVHELEKELGVNTPLIDRLVTTGWGETDGQQARLEDLRKRGWKPKTSLGITVDESAEEHDEEEARFRRFP

SEQ ID NO: 61822 - protein, 552 aa, Unknown
  Microbial source - Accession No. Ga0272447_1003507
LGDVLTKETTRVIVPLVGFEAKLLNTKSTYVAVHAKLEFLSNEDKREVLDLMRRFSSAYRWIYNRLIEGVNPAEVKRVSGPVSRFGLNSEYNNSALQLARYKILSLNSKGANPRKIIFGTRTLFNRLCRKGSLNSRARAKRVWRERRNGNLLSLGNKRNVSGNYVLTLSLINGELWLRINMGTSENSESGKKESRYIYAKVKTSHPYLNHILEVVGKSGIASVNVYLKLIDGKVYAIFTKKIDLPEPVLTKYYGVLGVDINARPFHLALAVAEPDGNLRKYSTISLEEAIRIRERYRGESSAKVLDNFYWLVAHQVVDLAKNEGVAIAIENIFNLPKGFRGDGNKKLRRILGRFAYRSILERIVRVASREGVEVWGVNPAYTSVIGMLKYAPMYSLSKDVAAAYVIGRRALGFPEKVPKRYLQLMASPEYREAVINWFNQELRTLEEKIGGERNEYKLNRLKREKESLEKAFNHLNKFLSLEDSPEGLQRGLTYGRNPEEPKGDSLHLWKALQVGVLRPLLGQKVPRDLSVLKPLLVGGVWKGRGGTHLGPS

SEQ ID NO: 61823 - protein, 1392 aa, Unknown
  Microbial source - Accession No. Ga0272448_1000001
MAESLPATQRAYTLRLRGADPDDESWREALWRTHEAVNKGAKAFGDWLLTLRGGLSHELADEPVKAKGGRRQPSADEKRDRRIVLALSWLSVESERGAPQQFIVASGKDNDKQRQHKLVKALRDILQKRGVGKAELDEWVKACEGPLGAAIREDAVWVNRSAAFDQAVKRIGKSLSRDQVWDLLERFFGSKNAYLAPIVLKDEAEPSEKAKDLVQKAGQWLSSRFGKGKGAKFEVLSGAYQEIERWAKSARPSSPAHLMAHLARLLKAPSEDLDGVLSIISGPGYKSATRNLLKKLSGQQRVSSEDLARLAKTAADDRVKCKSKVGEKGKRPWADTILEDVQRACGFKYIPDGGPARHRQFAVMLDHAARRVSVAHTWIKRAEAKRRSFEEDARKIGQVPSQAKQWLDDFCLERSRSSGSLEGYRIRKRAADGWEHVVSRWAGADCTTVADRIAVVRELQSDPEIDKFGDIQLFEALAEDDATCVWKPEGEPDPQPLKDYVAAKDAEFKRRRFKVPAYRHPDPLLHPIFCDFGCSRWDIKFDVHEAYKRKERKSTQTQTNPHGLTMRLWDGTDVSDVRLRWRTKRLFGDLNLGGAGAGKDVSRADRLGRAAAGAQEGEAVQIAGLFEDKDWNGRLQAPRPQLDAIARRVDAHGWDKQAVRMRARLEWLLTFSARLRPRGPWTEFAKKNDLRPDPVYWPHAAENKNRQGRGRLILSRLPGLRLLSVDLGHRYAAACAVWEAVSAEAVKKACKEAGHPNVKEDDLYLHLKRKDQGKLRTTIYRRIGADRLGQPTPRKEVAHPAPWARLERQFLIKLQGEDETPRKARKDEFKAVENLERELGRERSEADKLPHRIDELMSEAVRTVRLALGRHGNRARIAHYLVATEKTMPGGVVQSLDQSGRVRQIAYALELWYELAASSKWKDDWAAELWEKQAWAKDVPLQKRDEETVTRQALKKEKKERCGKLEAAAENLLRDGARCRDLSARWAKRWGEEDKKFRERLRWLRDWILPRGKKAAKNPAIRHVGGLSLTRLATIRSLWQVQKAFFTRMTPEGRRRDEDGRPLTAGEGFGQKVLDALDRMRDQRVKQLASRIVEAALGVGKEQEKCANRDPRRPRECVFEPCHAIVIENLTNYRPEETRTRRENRQLMRWSAGKVKKYLSELCQLHGLHLREVGAEYTSRQDSRTGAPGIRCQDVPVREFMRSPFWRKQVAQAEKKLEKGEGGARERLLCELNANWKDSSEKELKEAGVIRVPLNSGEIFVSADAKSPAAKGLQADLNAAANIGLRALLDPDWPGAWWYVPCDAKTMKPSKEEASGSAAVDMEKPLVQVSEAKPGARGGRGKSEKPVVNLWRDVSARALEPGDWRRWEPYWNDVSARVVRLLRKQQGLPDFA

SEQ ID NO: 61824 - protein, 634 aa, Unknown
  Microbial source - Accession No. Ga0272448_1000002
MVSEEGIMLALKLKIIPTEKQAEILDAMFWKWASICSRMAKMKKMMSIKEIREELSRKTPSNSDIWFSKTQLWQAKDNVENHKKALKNFEKRQESVLDKLKNKVKDIKEAIDDESKRDIDPNDSSKFRIKAWIKEGNLNSSKFYTLKKWQKFLQEDEKRVKKIESTIEKLKKGNIVFSPTKISLHKDEYSINFGSSKLLLNFFYKYNKKSGINLMDQLENKFNEFQNGLKIIFSPLQPIRGSSKRSAEFLRNNIINFLMYSLYAKLFGIPRSIKALKKSNKDENKLKLEEKLKKKMSSFNETIKEFEKMIGRKLSDNESKILNDESKKFFEIIKSDNKHIPSEECLKLLKDISEEIYNSNIDFKPYKYLILIRKPLSKFKSKKLYNLKPTDYKYYLQLSYELFPKQLIATKTILGIDRGVNHLLAVSVFDPLQNRFVYNKLIENPVFKWKKRYRNLKRSIRNRERRIRALTGAHIHENQLIKKLKSMKNKINVLYHNVSKNIVDLAKKYESTIVLERLENLKQHGRSKGKRYKKLNYVLSNFDYKKIESLISYKAKKEGVPVSNINPRYTSKTCAKCLLEVNQSELKNEYNRDSKNPKIGRCNIHGQIDADLNAARVIALCYFKNLNEPGILSP

SEQ ID NO: 61825 - protein, 1437 aa, Unknown
  Microbial source - Accession No. Ga0272448_1000009
MAKQVPVRQRAYTLRLRGLDAQDQSWRDALWRTHEAVNKGAKAFGDWLLTLRGGLDHALADAKVEAGKAKPDRDPTDEERKGRRILLALSWLSVESEKGAPEKYVVPHDLDKESGMRSNWKTVDALREILKGRGLDEREIESWVQDCSASLSATIRDDAVWVNRSKAFDEAVKSIGSSLTRDEVWDMLQPFFGSREAYLAPAEPPEEESADVRQEDKAKDLVQKAGQWLSSRFGTGKGANFRRMATIYEKIANWAGKARSGMSGDKAIADLATALSEFSPASNDLQGVLGLISGPGHKSATRNLLNGFPTKTSVTQGDFQNLQDKARQDAQKCKNKTGSKGQRDYADAVLRYVESACGFTYLQNSGSARHSEFAVMLDHAARQVSSVHTWIKRAEAERRRFEEDAKRMANVPGPAKKWLDSYCRERSRRSGALDRYRIHRRAVDGWKEVVAAWSKADCKTAEDRIAAARALQDDPEIQKFGDIQLFEALADDDALCVWHKDGDSAKAADPQPLIDYVLATDAEFKKRDFKVPAYRHPDALLHPVFCDFGCSRWDIEFAVHEARRKTRRKHKPIPTDDPHALSMTLWTGSTFKSQKLRWQSKRLTHDLALGQVKQDDGAAEVVARADRLGRAAADVGASATVRIAGIFEQKDWNGRLQAPRAQLNAIAARVTRHGWDDKAKQMRDRLRWLIAFSARLQPSGPWVEYARAFPDDAPAKPFVSRKGDYAVRHQDNDARKGHAKLILSRLPGLRLLSVDLGHRYAAACAVWETLSTEQVRKACQEAGNEPPKDSDLYLHLKNGQRTVVYRRIGPDTIEAVDESTGEIKPVPHPAPWARLDRQFLIKLQGEDHEARKASPAEAEAVQELERAVGREPPDQRSLRVDDLMSKTVHTVRLALQRHGRRASIAFNLTAAKRLLPGGREEDLDEEGRVELLADRLSDWYTLFKGKGWNDEWAKEQWETHIAPLLQGAALPQISEDAEATPKARKKYRADLTEQLKPAAESLARNPSLCKKLHCLWATRWRDDDGALRKRLRWLRDWILPRGKNARRDPAIRHVGGLSLTRIATIKALYQVQKAFRTRPEPDDLRKNIPAKGDDALRDFGRSVLDVMEHMREQRVKQLASRIAEAALGVGRVKRFAGGKDPKRPREQVDRPCHAIVIENLAHYRPEETRTRRENRQLMTWSSSKVRKYLAEACQLYGLHLSEVNAGYTSRQDSRTGAPGIRCQDVPVQKFMQSPSWRREVAHAEKKHAEGKSEARERFLCDLNAKWKGREAEWEKAGTVRIPLNGGEIFVSAGPCKCCERNDRNGPAGLQADLNAAANIGLKALTDPDWPGKWWYVPCDPKTFKPVKDKVAGSAAIRLDKPLKDLPAAQGTDGARKKPSKTKAQQREIVNLWRDVSSQPISANDDWREYKPYWDHVQERVVKILRQWAGLTPNYKNQ

SEQ ID NO: 61826 - protein, 1355 aa, Unknown
  Microbial source - Accession No. Ga0272448_1000011
MSKVNNGFSSLCVWSDFTRKFSLSKTLRFELKPVGRTEDFLKQNKVFEKDKTIDDSYNQAKFYFDKLHQKFINESLSPSSDSSNLKNIDLEYFAKQFLKLKSEIQKLKSEKKQKEANNKEKEINNLRKAYYKEIKSLLDKKAEEWREVYKKRGIKFSKTDLRQRGTDLLMKSGILGILKYEFPKEKEEEFKSKDWPSLFVDDKANPGNKVYIFDSFDDFATYLIKFQETRKNLYKDDGTSTAVATRVISNFEKFLNNKKIFEDKYINHWKQIEITDEEKKIFEIDYYYSCFTQGGIDEYNKIIGQINQKTKQYRDKNKIEKSELPLFKVLDKQILGEVIKERELIAETETEEEVFINRFKEFIDQNKQRILRAQNLMNDLINEEFENEYSGIYLKNSAINTIANRWFKNTTEFLLKLPQASKSKENKESPKVKPFVSLLDIKNALDDFEKEKDSLGTIFKDKYYKTKESDEVPLNSDSQESYWKQFLKIWGYEFNQLFEDKFNEEGVKIFWGYTKDLVEQAESLNSFSRKKEEIILVKNHCDAALRIYQMMKYFALEAKKQDDIPLDYSTEFYNRFNEYYQDFKFIRYYDAIRNFVTKKPSNEDKIKLNFESGSLLTGFDKNKESEKLGIILKNKNNNKYFLGIINKKHNKIFESKNENEFIGNPAKDLYEKMELKLFPDPKKMIPKIAFADKNKKDFGWTQEIQKIKEDFENFQENKKDNKDLKFDKNKLSKLIEYYQNCLEKGNYKKEFEFELKRPEEYQSMSEFNQDIEKKNYKIKFIPVKDSYIDDKVKNGELYLFEISNKDFIWPNQKKNIHTLYFLSLFSEKNIQKPIFRLGANAEIFYRQKSEKATKEKRGEKEIIKYKRYTEDKIFLHLPIEINYGCPKDTNKNEYNKKIIEFLNKNKDEINIIGIDRGEKNLLYYTAINQKGKILDHRSLNEINGVNYLEKLIEREKERQINRQSWEPVVKIKDLKKGYLSYVVREIADLVEKYNAIIVLEDLNMRFKQVRGGIERSIYQQFEKQLIDKLGYLVFKDDRGPESPGAVLNGYQLVAPFTTFKDLGKQTGIIFYTNAEYTSKTDPITGYRRNIYISNSASQKKIKENLINKLKEICWDEKENSYFFTYNQKDFGSPISKEWTLYSKVPRVRREKNNSTGYWEYKPIDLNKEFEDLFKKCEINEKSIDIFSEIKELIKNNEGKLTQKQEFDGKNKNFYERFIYLFNLLLEIRNTISLQVKLDKRGNEIKLDEIDYGVDFFASPVKPFFTTAGVRLVGRQIEGGKIQKEKKEEFTIKNFADFERLFKGCSSDGFDSDGVGAYNIARKGIMILERIKQNPKDPDLYISKEDWDSFVLRNLS

SEQ ID NO: 61827 - protein, 1069 aa, Unknown
  Microbial source - Accession No. Ga0272448_100062
MANISLKKALQQFPQTTLSKVTNPKTGKVQTRNVLKTMQCGLAISLTPKQRKVELEELSPDKKKLLDEYIDTFENKKQLILEDFYHYYEKSIWDFLIYCSRIKDTTETTYIVIPELPEITTKIKKSDGTYLKVKAYKGISNTTGNIHKTLYWFADDIDTKDGCTKVQFQYTEQRKEYITTDNYEKYNFDPALFELQPDTQQISNRISFFYMTNAQKKDKNGIYHETPKYQEYKKKGISIKGIVDDIEIDIKEPLRTKTAAVLKAFVDKLQESIKEIESVISEKNERIALLNKEDPKNNFPEFFVTNLKEDDKKLLSELTQLQIEDRDVKKFSELYNTLAKSFNQILNNAIQTYISIKLKESKIKQSDKEQEGKRLWDTYHLNHLKGIPSFPQMKNESQGKITAEMIYHFIQEQLQQYKNFSAFDHLLLDKNDFIFTDQKRKLSEDTVEQEQEWKEQWKTIKEKENNSFILTLRKILWRKNNIPGKKLMHYAHYLVQQGKITTNSAIVKALIEYALQELLKKQEHLSCEQFSSDQKAKREFCDYARIIISFIAYQLKKEEKRKEARNLELQIDDMSGNYKGTAFDLLKKGESNILPLSGFDFDNHGTKKGACLVFRNTTDHGNIRTHWYFALNLYNKIHFEEFDQQYDHPLEYPVDQYFVLASKGNDKTVSHHIYQLSPKEFDPGSKTMLIPLLLGTRQLREYITNFEISPFKNLLYFNSAEIQRIRNHKEEQYFLNLVTTRPEVEAYELTQEKKKGLIGIDRGENTVAWAALVNTQGNPLFEGKDERNFIELAPKFGKKFREEYKEISKRQSHGSVKKLNIQGRVKKVIEGVGAKIISNALEYGLQIVLENLDRGFGRHGKNTFVGVRQFTHLQKFIESKLKQNNISFKKDSILQTVPAAYTSKMCSNCGVINSLTGKEDFIAAVIEQFKDHPQQKDPKISCNKLCINLDQEITSWDRNKKREVVENSFEKIKAIFSNTKIQKHEAYVEIILKKLLNPRKEKADLFKCNFCGHTCHADKQAALNIARFSLLPYRSESEKKKGITAISKLEEEYQQRLNDGIFQRGSLIL

SEQ ID NO: 61828 - protein, 1472 aa, Unknown
  Microbial source - Accession No. Ga0272448_1000167
MAHQAAVTQRAYTLRLRGEDPQDRSWRDALWATHEAVNKGAKAFGDWLLTLRGGLDHALADAKVEGGKGKPDRDPTDEERKGRRILLALSWLSVESEKGAPEEYLVPHDLDKQSGARSNWKTVDALREILKGRGLGESEIESWVQDCSASLTAAIRDDAVWVNRSKAFDDLCPRFRGLDRDYAAKTISFFFGNQGTYLALPNRDNDEDATTAVQSGDSSDFRERARQWVSTNFGTGTKSDNARICSALHTLATSNLMSFDGCSKADFLKHLATLLGRSEPNKEPEEVLRIAIGWTTGRPSAGLLAIKSLPDPVTANDIDTLQRKFADEKAKKEEKADLLRVPEWIRTFRETVERECGIPYVGKRDHIGEYSVMLDHAARRVSIVHSWIKRAEAERRRFDEDAKRMANVPEPAKNWLETFCLERSGASGARDQYRIRRRAVDGWEEVVAAWSKADCKTAEDRIAAARALQDDPEIQKFGDIQLFEALADDDALCVWHKDGDSAKAPDPQPLIDYVLASDAESKKGRFKVPAYRHPDALLHPVFCDFGKSRWDIKFDVHEARKSTARKKEGATQNSDPHALSMTLWTGSTFKSQKLRWQSKRLTHDLALGQGKQDHRAPEVARADRLGRAAAGVPASATVRIAGIFEQKDWNGRLQAPRARLNAIAARVARHGWDDKAKRMRARLRWLITFSARLQPSGPWVEYTATFPDDASAKPFVSRKGDYAVRHQGNDAREGHAKLVLSRLPGLRVLSVDLGHRYAAACAVWETLAKEVFEKERHDAEAKGAHVVLGPEGCKPEEAIYAHFVWPEKESNAATKKARQEGREKFHPVTVYRRIGPDELVDTSTGEVKEHPAPWARLDRQFLIKLQGEDHEARKASPAEVEAVQELERAVGREPPDQRSLRVDDLMSETVRTVRLALQRHGRRARIAFNLTASKRLLPGGREEVLTDEGRVGLLADTLADWYALFAGKGWNDEWARQQWETYVTPLLQGAALPQIPEDAEATPKARKKYRADLTENLKPAAESLAQNEPLRMKLHCLWATRWSKDDIALRKCLRWLRDWILPRGKKVKEKAGRAIRHVGGLSLTRIATIKSLYQVQKAFHMRPEPEDLRKNAPSKGDDALLDFGRSILDVMEHLREQRVKQLASRIVEAALGIGIERQVGKKTPKRPRQRLYWKDEKGNEHGDRRFAPCHAVVIENLTHYRPDETRTRRENRQLMSWSSSKVKKYLAEACQLNGLHLREVQAGYTSRQDSRTGAPGVRCQDVPVKEFMRSPFWRKQVAQAEKKQAGDKGDARERLLCDLNAEWKGKPEADWEKAGTVRVPLKGGEIFVSARPCSCCKHGKRGGAPGLQADLNAAANIGLKALTDPDWPGKWWYVPCDPTNFKPARDKVAGSAAICLDKPLKNAPAAQDTEGPRKKRDEAGARSRGVVYLWRDVSSRPISANDAWREFTPYWNDVQARVVNILQQLAKNQGVR

SEQ ID NO: 61829 - protein, 1470 aa, Unknown
  Microbial source - Accession No. Ga0272448_1002516
MVKQAAVTQRAYTLRLRGVDPQDQSWRDALWATHEAVNKGAKAFGDWLLTLRGGLDHALADAKVKGGKGKPDRDPTDEERKGRRILLALSWLSVESEKGAPEEYLVPHDLDKQSGTRSNWKTVDALREILRGRRLDESEIESWVRDCSASLSAAIRDDAVWVNRSKAFDDAVESVSSSLTRDEVWDMLERFFGSREAYLAPAKGAEDESAEVEQEDKAKDLVQKAGQWLSSRFGTGKGADFSRMATVYKEIANWAGKAQPGMTGDKAIADLAGALSEFSPTSNDLRGVLSLISGPGYKSATRNFLSQLATRTVVAESDLQSLQKSAKHDAQKCTANTGAKGQRPYSRVVLEQVESACGFTYLQDGGPARHSEFAVMLDHAARRVSLAHTWLKRAEAERRRFEEDAGRMGNVPASVKQWLDSFCADRSEASGALEPYRIRRRAVDGWKEVVAAWSKADCKTAEDRIAAARALQDDPEIQKFGDIQLFEVLADDEALCVWHKDGDSAKAPDPQPLIDYVLATDAEFKKRQFKVPAYRHPDALLHPVFCDFGNSRWDISFAVHEAGKSTVRKKKGQWQNSDPHALSMTLWTGSTVEPRRLRWQSKRLTRDLAFKEGKQNGNAPTVGRADRLGRAAAGVPEHGAVSIAGIFELEDWNGRLQAPRAQLNAIAARVARHDWDAKAKQMRDHLRWLITFSAKLQPSGPWLEYAAAFPDDAPAKPFVSRKGDYAVRHQGNDAREGHAKLILSRLPGLRVLSVDLGHRYAAACAVWETLSAKQVKAACQAAGHEPPKDSDVYLHLTKKVKKQKKGKEVEVEETTIYRRIGADTLPDGKPHPAPWARLDRQFLIKLQGEEEGAREASNQEIWAVHQMETVLGLSVPFIDRLIAAGWGCTEKQKSRLEELKKIGWTPAPKAESSGVQKENEEVDVCKPSLAVDELMSGAVRTVRLALQRHGRRARIAFNLTASKKLLSGGREEGLTDEGRVELLADTLADWYALFTGKGWTDEWARQQWETHVTPLLQGAALPKIPEDAEAAPKARKEYRADLTEHLKPVAETLAKDESLCARLHCLWATRWRENDVALRKRLRWLRDWILPRGRKAEADRAIRRVGGLSLTRIATIKSLYQVQKAFHMRPEPEDLRKNIPSKGDDALLDFGRSILDVMEHLREQRVKQLASRIAEAALGIGRMKRFAGGKDPKRPRERVDRPCHAVVIENLTHYRPDETRTRRENRQLMSWSSSKVKKYLAEACQLNGLHLREVSASYTSRQDSRTGAPGVRCQDVPVKEFMQSPFWRKQVAQAEKKQAKGKGDARERFLCDLNAKWKGRPEADWEKAGAVRVPLKGGEIFVSADEKSPAAKGLQADLNAAANIGLRALTDPDWPGKWWYVPCDPTNFKPAKDKVAGSPAICLDKPLKDTDGKAGARSREVVNLWRDVSSQPISANDDWREFTPYWNDAEARVVNILRQSAGLARDQGER

SEQ ID NO: 61830 - protein, 347 aa, Unknown
  Microbial source - Accession No. Ga0272448_1011735
METVKLCVKAVIPPRDIGLRRLMREYNVYKRVLIPRVKQTVRQVIKDKSITVYAQQKWMVDKKLNEYLKNLPFHPMPFHNQSVQLENKDGRFWIHFKTKEGETVCYLHVPAKYRDVIQKACGEDNPVLGQVELIEDRRYGWVNCHITLRLPKPEPYEPKGWIGVDVGWNKLATSIACTCNPHLKFFNPTFHGKEFKTRIIQLRHLLKQYAIKGKAWKKWNFRLQHTVKNAVGTVAKEIVSKAKRFKAGVAMENLTFKPVTKGYVVPRYKLMIAVKTLCEREGVPFKLVPAQYTSITCPKCSFKDEKNRDDEWFKCQKCGFQTDADLAGAMNIALKALTDAQMEGVMA

SEQ ID NO: 61831 - protein, 401 aa, Unknown
  Microbial source - Accession No. Ga0272448_1059621
MEEKLKLCVRAVIPPKDLGLRRLMREYSVYKKVLIPRVKQAVRQVVKDKNIAVYAQQKWMLDKKLNEYLKNLPFHPMPFHNQSVWLQNKDGRFWIHFKTKQGETVCYLHVPAKYHELIEKACGKDNPVLGQVELIEDQKYGWVNCHITLRLPKPKPYEPKGWVGVDVGWNKLATSIACTCNPHLRFFNPTFHGKEFKSQIIQLRHLLKEFQRKDKSVKKWENRLRNTIKYAVGVVAKETVSKAKKLKLGVAMEKLTFKSTTKGYLVPRYKLMVAIKTLCEREGIPFKLVPAQYTSITCPKCGFKDYRNRNGERFRCLKCGYQADADVVGAMNITQKAFDCSPDGGENDVGFTPASKADRGLPREAGHVASPQAPMNDDPYKARRKPNKIENEVRKEGLSRL

SEQ ID NO: 61832 - protein, 474 aa, Unknown
  Microbial source - Accession No. Ga0272448_1067731
MDKGEKELAEQPRHTKVLKLHILKPSGDMTWKELLELLREARYRVFRLANLAVSEAYLNFHQKRISPDFNSKRQTIGQLNRALREMLEQEGKKNNDRFSKNGALPDTVASALSRYRLHPLTSKKKWSEVLRGNISLPTFRRDMAIPVRCDKPGQKRLEKTNDGQVEVDLMICTHPYPRVVLATQDKSLGDGARTILAHLLENKDQSKNGYRQRYFEIKEDKLSHKWFLLVSYDFPASTPSLSKERIVGVDLGISCPLYVAINNGYARLGWRQFHALAARIRAIQNQTIRRRREILRGGNTIISDDRARSGHGLKRKLLPIEKLQGRIDRAYTTINHQFSSAVIKFAKDHGAGMIQIEKLDGLKEILSGTFLGERWRYSELQQFIKYKAKENGIEVKEVNPQYTSQRCSQCGYINEQFTFNYRQEQRQKLGKPVPFTCPECKYEANADYNAARNLATLDIEQLIMRQLDKQGIKN

SEQ ID NO: 61833 - protein, 401 aa, Unknown
  Microbial source - Accession No. Ga0272449_10022361
MASTVETDTIKLCVRATISPKDSGIRRLMREYTTYKKILIPRVQQAVRQVVKDRSITVYAQQKWMADKKINEYLKNLPFHPMPFHNQSVYIENKEGKFWVHFKTKVGEAVCYLHVPVKYHDLIEKACGDDYISNPVLGQVELIEDRKYGWINCHIVLRLPKPKPYEPKGWVGVDVGWNKLATSIACTNNPVKFFDPTFHGKEFKTRIIQLRRLLKEFQRKDKSVKKWEHRLQNTVKYAVGVTAKEIVAKAKKHKMGVAMESLTFRSVTKGYLVPRYKLMVAIRTLCEREGVPFKLVPAQFTSVTCPYCRHRDHENRDGERFKCLNCGYQADADLVGAMNVALTAAQMEGRLVWSLLPYLKGTAGLPAVQGDVATPLRGMSDDLYKATRKPEKIESEVSREG

SEQ ID NO: 61834 - protein, 427 aa, Unknown
  Microbial source - Accession No. Ga0272449_1004365
MRRVNVYRVIADRALLLLLRIIADRCARLWNTAQYICRQRFLAGEKVPSYARLCSLLKEHEAYRALPSDIAQEVLKMVRESWNSFFKNRKNYRAGKIPEPPGLPGYCKDRRTGHRLIRCIPIKCTRSYSIHGSEFSMTAPSDLSSDRLRMRVRGCTRWNGKPGRAELLWDAARNVWYLHQSVKVNAPTRRPRRRRWAAVDRGARIPLALAIEGVPEVLVFRARELWKDFLYWSRQIAGLQSRLRTRGMHASRELRRMYARRRERLLAAYRGLARTVVDILKRHGVTDLIVGDLTGIRENMDFGPLNELVHNFWSFAELLRILKDACERAGIRVHEKPEGGTSSHCVLCGEDAARPIRSRVLCRNGHELHADINGALNLLYREPEVRARVEGRPGWRTLRWNGHRWVPIESACRVPSPAATSRLPPGG

SEQ ID NO: 61835 - protein, 1399 aa, Unknown
  Microbial source - Accession No. Ga0272449_1006528
MSNKITNQKSIWSEFTKQYALNKTLRFELKPVGRTEDFLRQNKVFEKDKTIDDSYNQAKFYFDKLHQKFINESLSSNNARAIDLKYFAEKFLELKSEIQKLKSEKKQKEANNKEKEINNLRKAYYKEIKSLLDKKAEEWKEIYKKKEIKFSKTDLKQKGTDFLMKSGILGILKYEFPKEKEEEFKSKDWPSLFVEDKANPGNKVYIFDSFDDFTTYLLKFQETRKNLYKNDGTSTAVATRVISNFEKFLNNKKIFEDKYINYWKQVGITEEEKKIFEIDYYYSCFTQEGIDEYNKIIGQINQKTKQYRDKNKIEKSELPLFKVLDKQILGEVIKERELIAETETETEEEVFIKRFKEFIDQNKQRIPRVQNLMNDLINEKFESEYAGIYLKRSAINTIANRWFKNTTEFLLKLPQASKYKENKESPKVKSFVSLLDIKNALDEFEKERESLGAIFKDKYYKIKESDELPLDNDSQESYWKQFLKIWGYEFNQLFEDKFNEEGIKTFWGYTKDLEKEAENLNSFSRKKEEITVVKNYCDASLRIYQMMKYFALEAKKQEDIPSDFSTEFYNRFDEYYKDFEFVRYYNAIRNFVTKKPSNKDKIKINFESGELLRGWDISKIKGCLGIILIKNNEYYLGVVKKGKDKLFDYYENKNDTEKDIQRKNNLKKEIIAKPNEYYYIRVKYKQIADAGKDIYNLVLMPDGNVERFTDKEKKEKYWPEEIKRIKKEGSFKNNKRDLVKFIDYFKKCASIYWKEFNLEFKSSEEYENFKEFTDSINIQGYKISLDEENENKIKSEYIEKQVNEGNLYLFKIINKDFYKNKKQNSKKNIHTLYWEYLFSKDNLIKNEYPLIRLSGGAEIFYRKSFNIKKEPVVLKKDSIEKQVLRENKPIFHLNRYLEDKYLFHCPIKLNSLYTEVPNNEKQKRSFAAKYNKKLVEFLSKNVNEINIIGIDRGEKNLLYYTVINQQGEILDHGSLNEINGVNYLEKLIEREKERQINRQSWEPVVKIKDLKRGYLSYVVRKIADLVEKYNAIIVLEDLNMRFKQVRGGIERSIYQQFEKQLIDKLGYLVFKDDRDSDAPGGVLNGYQLVAPFTTFKDLGKQTGIIFYTNAEYTSKTDPITGYRKNIYNISNSASQKTIKENLINKLKALGWDEKEKSYFFTYNQKDFNSKDFNSPISKEWTLYSKVPRVRREKNNSTGYWEYKPIDLNKEFEDLFKKYEINEKSRDILSKIKELIKNNEEKLIQKQEFDGKNKNFYERFIYLFNLLLEARNTISLQVKLDKRGNEIKLDEIDYGVDFFASPVKPFFTTAGVRFVGKQIEGGKIQKEKKEEFAIKNFADFEKLFKGCSSDGFDSDGVGAYNIARKGIMILEKIKQNPKNPDLYILKEDWDDFAIKNALVK

SEQ ID NO: 61836 - protein, 359 aa, Unknown
  Microbial source - Accession No. Ga0272449_1019852
MKVSSQYRTVIVRLYPTEQQEKLLLKAEKEVLKFLETSRFELQKMLYHKIGEEVGISRRSLALLVQRFTGSLGEKAILPFDDNARFVNDNRIWFLEVQLFAGKGNRVRIPLAKTKVPYYSVLDELDGLPIVITRENSDWFAYVSIPVSQASNDLVVGVDFNYRKWLASPYEGKPLFFEVEDYATKIDRLQRMASRFQSRREEEKVREYHRLIRETVKLAHGNFLSRIRERFGVCTIAMEDVEKMYKMIEEIDSKTTNNWLNTKTALRQFILRAMAKGFEVVEVDPKDTSRTCHKCGNPVKIYGKHSRLVSCGFCDYRDYNRDLNAARNIARRGIELLSVMKGTCSITQILKTELHQLHQ

SEQ ID NO: 61837 - protein, 374 aa, Unknown
  Microbial source - Accession No. Ga0302046_10000852
MEVRKTYKYRLYRSKRDKHLAEQIELASEIWNHSVALSRRYYSLYRKHLGYYQLKRHLAKLKKRDKGRWYGLNSQAGQNVIERLRMSYQRFFSDPKAGRPGFKKRTKYPSFTLTQTGWKYLGGNRLRIGKHNFKFVLSRPLGGEVKTVTIKRDRCGDLWVCFSVVEDIQPSIPQTGSAVGVDFGLKEFLVESDGERVESPQHLRASLTEMARRGRDLSRKKKGSNNRRKARRRVAKLHRRIANQRRDFHFKTARTVLERHDFIAVEDLNLDGMKRLWGRKVFDLGFYQFVGILEHLAAMNGKRVVKVDRFFASSKTCHDCGWVKRDLTLADREWACEGCGSVHERDENAAKNIRDRALSHVVGDVRPAERAIAA

SEQ ID NO: 61838 - protein, 1088 aa, Unknown
  Microbial source - Accession No. Ga0302192_10026063
KVGGKGSRPYANAVLQDVEAASGITYHNACNGPSHHWQYAVILDHAARRVSMAHSWIKRAEEERSKFEIEKDKLQCVPSDARAWLDAYCARRSSESGAIDAYRIRRSAVDGWKQVVAEWAALLAKAKNAGSELPSEAESARIQAARELQDTIEKFGDIQLFEALSLPDAKCVWLTNGKPDAQPLMDYVAGTDAVSKKQRFKVPAYRHPDAFLHPVFCDFGNSRWSIDYAVHRAPEKLARAQQLLEKKKEELTRAEQALSKASDPSKRSSIEKKLKTLNVAFKQQEAEVLWLESHHAMTMGLWNGSRIEDTPLLWQSKRFGSDIGQAGAEHPLVASRADRFGRAVAMAKDNAPVVPSGLFDLADWNGRLQAPRRQLDAIAAIHDRTDLSVEEKRQLVAKRIRTIRWLVTFSAKLQSRGPFIAYAAQHGFDWRYGAHGIENKSREGLAKLVLCRLPGLRILSVDLGHRYAAACAVWETLSAAQMQNACLEAGMEAPSQRTLYLHLKHFVNGKEKKTIYRRIGAETLPDGSPHPASWARLDRQFLIKLQGEDRDARQATCDEVVAVEQLETELGYVRPIKRKGREHLVDELMSDALRTLRLGLQRHGARARIAFNLTATKRTRPGGIQELLDQESRIGLLTETLLEWNELYAGERWADELARDMWNKHIQPLLGGTILQETNNQDVTPSAAKRRMQREETREKLRPVAKQIAENDSLCRQLNVLWSTRWQIEDAAWRMRLRWMRRWLLPRGINRDPQFRKSIRDVGGLSLIRIASFKSLYQVQKAYWMRPHPDDLRRNIPERGDSSLTSFGQRVLDAMERMRENRVKQLASRIAEAALGIGDETSVNAKNGRRKRPTERSNDPRFAPCHAVVIEDLTHYRPDETQTRRENRQLMSWSSSKVKKYLGEACQLNGLYLREVPPAYTSRQDSRTGAPGLRCNDVAVPEFNSSRFWRKQVEAAEKNQKDGKKGDARERYLLSIDERIRSEANDRDVFRIPVKGGEIFVSACGQDGGSNANRKAPPGLQADLNAAANIGLRAIFDPDWEGRWWYIPCDATTICPVEKKFNGCKAVDSSKPLRIVAEKVAVSSSGID

SEQ ID NO: 61839 - protein, 1473 aa, Unknown
  Microbial source - Accession No. Ga0302246_1000265
MPQQAKPPVTQRAYTLRLRGAGPSDISWRKALWQTHEAVNKGAKAFGDWLLTLRGGLDHTLADAKVKGEKGNPDRDPTDEKRKARRILLALSWLSVESKLGAPAGFIIASGTEAAEDRNGKVVAALEEILKSRNLAENEIDEWKNDCSASLTAAIRDDAVWVNRSRAFDDAVESVGCSLTREEAWDMLERFFGSRDAYLAPAKVTEDESSEEEQEEKAKDLVQKAGQWLSSRFGTGKGADFSRMAAVYGKIAAWADNAQAGTTGNQAINKLAADLSEFTPASNDLQGVLGLISGPGYKSATRNLLNGLATKTTVTQQDFGSLRDKAADDAQKCKQNTGSKGQRPYSDAILKDVEAVCGFTYLQQDGGAARHSEFAVILDHAARRVSLAHTWIKRAEAERRRFEEDTQRLANVPGPVKAWLDSFCSERSATSGALEPYRIRRRAVDGWKEVVTAWSKSSCSTSADRIAAARALQDDPEIDKFGDIQLFEALAEDDAVCVWHKDGDAAKAPDPQSLIDYALAAEAEFKKRHFKVPAYRHPDALLHPIFCDFGKSRWDICFDVHKNVQTPFPRALCLTLWTGSGMVSVPLCWQSKRLARDLAIGSNATNAGYVEVARADRLGRAASNVTKSDEVKISGLFEQADWNGRLQAPRQQLEAIAVVRDNLSLSAQERERRMSSMKDRIRWLVTFSAKLQPQGPWCEFAKTNQLRIDPQYWPHADSNKTRKGQARLILSRLPGLRVLSVDLGHRYAAACAVWEAVNAEQVKKACQVAGHEAPKASDLYLHLKRKATKRKKGNQVVVEETTIYRRIGADTLPDGTQHPAPWARLDRQFLIKLQGEEEGVREASNEEVLKVYHLEAELGRTAPIIDRLVKAGWGQSGKQRTRLEALRELGWKPASEAVVSDGMGADEGEVRKPSLSVDELMSSAVRTMRLALKRHGDRARIAHYLITDEKTRPGGVKEKLNENGRIDLLQDALLMWHDLFSSRGWRDDVARQLWDNHVAKLSGYKAPEEIGEESSGPERKKRQKENREKLHDVAKALAQDVTLREALHDAWKKRWKDDDERWKKQLRWFKDWVLPRGKHASDPAIRKVGGLSLPRLATLTEFRRKVQVGFFTRLQPDGTRAETKEQFGQSALDALEHLREQRVKQLASRIAEAALGIGRMRRPMGGKDPKRPNGRVDEPCHAIVIEDLTHYRPEETRTRRENRQLMTWSSSKVKKYLAEACQLHGLHLREVSASYTSRQDSRTGAPGIRCQDVPVKEFMRLPFWRKQIAQTEKKQAEGKGDARERFLCYLNAKWKGKSEADWEKAGVIRVPVRGGEIFVSASRDSQGAKSLQADLNAAANIGLRALTDPDWPGKWWYVPCDPASFRPIKDKVEGSAAVKPDQALRQSAQAQSGDAAKDKKKRGNKSAGKSKEVINLWRNISSSPLECIEFGEWKEYAAYQNEVQCRVIRILEEQIKGRDKQLHEGAKEDDISF

SEQ ID NO: 61840 - protein, 1536 aa, Unknown
  Microbial source - Accession No. Ga030221_1001844
MPDQTNPPLTQRAYTLRLKGAQKDDTSWRCALWQTHEAVNKGARVFGDWLLTLRGGLDHTLADASLKSGQEKPDSTLTDEERKARRILLALSWLSVESKTGAPENFIVASGQDSEKNRADCVISALKEILESRKVDKNELDAWINDCSASLSSAIRDDAVWVNRSKAFDEAVKSIGPSLTREEVWDILGCFFGSREAYLAPGQSSDEDESSEAEQEDKAKDLVQKAGQWLSSRFGTGKGANFSHMSKVYEKISGWADSAQAEMTSKEAINDLAAALSEFAPASNDSAGVLALIKGPGYKSATRNLLSLIALQTTVTQEDLTKLKELAAKDKVECATKIGAKGHRAYSDKILEDVESACGFTYLQQSEEESARHSEFAVMLDHAARRVSLAHTWIKRAEAERKKFEKDSKKINCLPEAVRTWFDNFCIDRSELSGALEPYRIRRRAIDGWEKVVAEWSKPSCGNCADRITAARMLQDDPDIGKFGDIQLFEALAEDDALCVWHKNGNINEASDPQLLIDYAAATEADFKKRKFKVPAYRHPDALLHPVFCDFGNSRWDIDFSIKKAFNDLDKQKALLNKKEEEIIRAEQKLNIKNSKDVESQKKLQQEKEKLKKIQQKIAWLEEKNGVEMALLNNGKIGKMALRWQSKRLTRDLALDQSDNDCGVSHDVSRADRLGRAASNATGGKVNILEIFNQDYWNGRLQAPRQQLQDIAAVRDNPSLQAAERERRMSIMKDRIQWIVTFSAKLRPKGPWCEFAELNQLNIDPKYYPHAKENRGRKGMAKLILCRLPGLRILSVDLGHRYAAACAVWEAVSADDVKLSCACAGHEEPNERELYLHLKEKKSVEQKNGGKTETEQTIIYRRIASDTLPDGTPHPAPWARLERQFLIRLQGEDEIVREASNEEIFNVHRAEAELGRTVPLIDRLDKAGWGKSRKQKERLDGLRKLGWERVSDGTAQDVPDTGEDYWAKPSLSVDELMSSALRTLCIALKRHSDRARIASAMTAEYKTMPGGRKYYFTGPRELSASDDKSTIDNKHIEFIQDALVLWDGLMTSRGWRDDAAKQLWNNHIAKLSGYKAPEEISDESSKTERKNKQKENREKLRGAAAALVSDTNLREALHAAWKKIWEDDDELWKKRLRWFKDWILPRGKAAKDPAIRKVGGLSLARIATLTEFRRKVQVGFFTRLHPDGTKTEITEQFGQSALDALDRLREQRVKQLASRIAEAALGVGRVPRTKGGKTPKRPSARVDEPCHAIVIEDLSNYRPEETRTRRENRQLMSWSSSKVKKYLSEACQLYGLHLREVSAGYTSRQDSRTGAPGIRCQDVPLTEFILSPFWRKQVAQAEGKGDARDVLIRDLNHMLEDKSASDGEKPKVLRIPLKGGELFVSADKKSPASKGLQADLNAAANIGLRALTDPDWPGRWWYIPCEPGSFRPVKDRVEGSAAVDPNRALRQDAQPQGSDAAADKKKRAKKSTGKSQEKEIINLWRDISSSRPDDTAAGKWQTYDEYQNRVQYRVVDILREQANERKKRTSSRCDKP

SEQ ID NO: 61841 - protein, 1503 aa, Unknown
  Microbial source - Accession No. Ga0302253_1002416
MPQQDKPPVTQRAYTLRLRGTDPSDTSWRDVLWRTHEAVNKGAKEFGDWLLTLRGGLDHTLADTKVKGGKGKPDRDPTDEERKARRILLALSWLSVESKLGAPAGLIIASGKETTEDRNGRVVAALEEILKSRGAEDKIDEWKNDCSASLSAAIRDDAVWVNRSKAFDEAVKSVGCSLTREEVWDMLERFFGSRDAYLAPAKGSEDESSQTEQEDKAKDLVQKAGQWLSSRFGTGKGADFSRMAGVYQKIADWAGAHSPNNAGTGAIAGLASALSEFTPASNDLNGVLGLISGPGYKSATRNLLTQIDAKTTVTQADLTKLNETAAADKGKCETNTGSKGRRPYSDAILKDVESVCGLTYRVDENGNAVSVSNYSLYGDEYNWGSARHSEFAVILDHAARRVSLAHTWIKRAEAERSKFEEDAKKVDQVSKAAKDWLDKFCLERSGMSGALEPYRIRRRAVDGWKEVVAAWSKSSCSTSADRIATARALQDDPEIDKFGDIQLFEALAEDDAVCVWHKDGDAAKAPDPQPLIDYALAAEAEFKKRHFKVPAYRHPVALLHPIFCDFGKSRWDICFDVHKNVQTPFPRALCLTLWTGSEMKPVPLCWQSKRLACDLALGNNERNAGASAVTRADRLGRAASNVTKNDEVNIAGLFEQADWNGRLQAPRQQFEAIAAVRDNLSLSAKEREQRMSGMKDRIRWLVTFSARLQPQGPWCDFAETNQLRIDPQYWPHADANKTRKGQARLILSRLPGLRVLSVDLGHRYAAACAVWEALSAEKVKEACHAAGRKEPTENDLYLHLKKKVKKQKKAKAVEVEETTVYRRIGADTLLGGTQHPAPWARLDRQFLIKLQGEEEGVREASNEEVWKVYQLEAELGRTSPIIDRLVKAGWGQSNKQQTRLDALRELGWKPASGAGVSDGTDEDEAEVRKPSLSIDELMSSAVRTMRLALKRHGDRARIAFAMTAEYKPMPGDRKYYFTEAKELSANDDQATRDNKHIEFIQDALVLWHGLASSRGWRDDAAKQLWDDHVAKLSGYKAPEEIGEDASGVERKKKQKENRERLHDVAKALAEDTTLRKTLHDAWETRWEDDDEQWRKQLRWFKDWILPRGKAVDDPAIRKVGGLSLTRLATLTEFRRKVQVGFFTRLHPDGTRAETKEQFGQSALDALEHLREQRVKQLASRIAEAALGIGRMRRPMGGKDPKRPDVRIDEPCQAIVIEDLTHYRPEETRTRRENRQLMTWSSSKVKKYLAEACQLHGLHLREVSASYTSRQDSRTGTPGIRCQDVPVKEFMRSPFWRKQIAQAERKQAEGKGDSRERFLCDLNVMWKDKAVADWEKAGVARVPLKGGEIFVSADPASPAAKGLQADLNAAANIGLRALTDPDWPGKWWYVPCEPGSFSPVKDKVEGSAAVKPDQALRQPAPAQSSDAKDKKKRGKKGAGKSKEVVNLWRDISSSPLECIEFGEWKEYAAYQNEVQCRVVRVLEEEIKGRDKQPHDGAKEDDILF

SEQ ID NO: 61842 - protein, 1042 aa, Unknown
  Microbial source - Accession No. Ga0307340_100872
QQSEEESARHSEFAVMLDHAARRVSLAHTWIKRAEAERNKFEKDSKKINCLPEAVRTWFDNFCIDRSELSGALEPYRIRRRAIDGWEKVVAEWSKPSCGNCADRITAARMLQDDPDIGKFGDIQLFEALAEDDALCVWHKNGNINEASDPQLLIDYAAATEADFKKRKFKVPAYRHPDALLHPVFCDFGNSRWDIDFSIKKAFNDLDKQKALLNKKEEEIIRAKQKLNIKNSKDVESQKKLQQEKEKLKKIQQKIAWLEEKNGVEMALLNNGKIGKMALRWQSKRLTRDLALDQSDNDCGVSHDVSRADRLGRAASNATGGKVNILEIFNQDYWNGRLQAPRQQLQDIAAVRDNPSLQAAERERRMSIMKDRIQWIVTFSAKLRPKGPWCEFAELNQLNIDPKYYPHAKENRGRKGMAKLILCRLPGLRILSVDLGHRYAAACAVWEAVSADDVKLSCACAGHEEPNERELYLHLKEKKSVEQKNGGKTETEQTIIYRRIASDTLPDGTPHPAPWARLERQFLIRLQGEDEIVREASNEEIFNVHRAEAELGRTVPLIDRLDKAGWGKSRKQKERLDGLRKLGWERVSDGTAQDVPDTGEDYWAKPSLSVDELMSSALRTLCIALKRHSDRARIASAMTAEYKTMPGGRKYYFTGPRELSASDDKSTIDNKHIEFIQDALVLWHGLMTSRGWRDDVAKQLWNNHIAKLSGYKAPEEISDESSKTERKNKQKENREKLRGAAAALVSDTNLREALHAAWKKRWEEDDEMWRKRLRWFKDWILPRGKAAKDPAIRKVGGLSLARIATLTEFRRKVQVGFFTRLHPDGTKTEITEQFGQSALDALDRLREQRVKQLASRIAEAALGVGRVPRTKGGKTPKRPSARVDEPCHAIVIEDLTNYRPEETRTRRENRQLMSWSSSKVKKYLSEACQLYGLHLREVSAGYTSRQDSRTGAPGIRCQDVPLTEFILSPFWRKQVAQAEGKGDARDVLIRDLNHMLEDKSASDGEKPKVLRIPLKGGELFVSADKKSPASKGLQADLNAAAN

SEQ ID NO: 61843 - protein, 550 aa, Unknown
  Microbial source - Accession No. Ga0308310_1004946
LGDVLTKQTTRVIVPLVGFEARLLNIKSTHVAVHAKLEFLSNEDKREVLDLMRRFSSAYRWIYKRIVEGGNPAELKRAFGPMDKFGLNSRYKDSAVQLALVKLRTMESLGVNPKKVIFGSRRLFERLCRKGDLKSRAKAKRKWRERRKGVLKGLGSKADISGNVNLTPLLINGELWLRINIKTGTNPESGKKESRYVYAKVKTSHPYLSHILEVVGKRGAVPISVHLKLIDGKVYAIFTKKIDLPEPVLTKYYGVLGVDINARPLHLALAVVEPDGNLRKYTTISLEEVIRIRERYKGKSSNVLDNFYWLVAHQVVDLAKNEGVAIAIEDISNLPKGFRGDGNKKLRRILHRFAYRSILERIVRVASREGVEVWGVNPAYTSVIGMLKYAPMYSLSKDVAAAYVIGRRALGFSEKVPKRYLQLMASPEYRGSVINWFNQELSALEKRIGGERNEYKLNRLRKEKESLEKAFNWLNRFLSPGGSPEGLQRGLTYGRNPEEPKGDSLHLWKALQVGVLRPLLGQKVPRDLSVLKPLLVGGVWKCGKVEEGYT

SEQ ID NO: 61844 - protein, 552 aa, Unknown
  Microbial source - Accession No. Ga0308310_1013800
LGDVLTKETTRVIVPLVGFEAKLLNIKSTHVAVHAKLEFLSNEDKREVLDLMRRFSSAYRWIYNRLVEGGNPSEIIQVSGPVSRFGLNSYYYLSARELALYKISSLEAKGVNPRKIIFGTRTLFNRLCRKGSLKSRAEAKRVWRERRKGILLNFGNKKSVSGNYALTLSLINRELWLKINMGTSKNPKSGKKKSRYIYAKVKTSHPYLNHIMEVVGRSGIAPISVYLKLIDGKVYAIFTKKIDLPEPVLTRYYGVLGVDINARPLHLALAVVEPDGNLRKYTTISLEEVIRIRERYKEESSKVLDNFYWQVAHQVVDLAKNEGVAIAIENIFNLPKGFRGDGNKKLRRILGRFAYRSILERIVRVASREGVEVWGVNPAYTSVIGMLKYAPMHSLSKDVAAAYVIGRRALGFSEKVPKRYLQLMASPEYREAVINWFNQELRALEEKMGGERNEYKLNRLRREKESLEKAFNHLNRFLSLEGSPEGLQRGLTCGRNPEEPNKGDSLHLWKALQVGVLRPLLGQKVPRDLSVLKPLLIGGVWKGGGGLHLGPS

SEQ ID NO: 61845 - protein, 556 aa, Unknown
  Microbial source - Accession No. Ga0308411_10001123
MAFGRMAGPTIVYRYGAKKPTTNAEAMLEQLRKAHQYRNKLVELELQRRKLVEDAVKSIESEVRQMADKIEQLELDIDYVARKISSHKQKNRTRTVPTELKEQLKALKAQRRETLRQMREAKKAAYTRPETQEALSRIEGKARAEHKKARSLCGLYWGTYCHVEQIISQIRKGPPPKFRRFDGSGVLAVQLQKGEDIARLESGEDRRIRIEGYGKRRILWLRIGSDENHNPIWATIPFTYHREIPHNAKIKWVKVKAKRIACQIDWEVLFTLERSSGWKKPDLAQDGAVAIDIGWRNFDDRIRVAYWVGSDGFEGEIALPSNMVSKALEQVEHLRSLRDKNFNEIKQQLLDAIGALQIPEWLTEATKTLHQWRSQGRLASLTIRWRQQRFEGDNDIFNLLETWRVRDKHLYEWEAHLRMKAIRRRDDYFANVAADLSRRYKTAIVEDFDLRNVTQIDPTQTEQIGDGRQRYRARIAAAGNLRQMIKNRFAETQIVSAALTTQTCTECGEIMNFDAAESVFGKCPHCGHAFDQDRAAAINLMRRYEGKLVAASGEVR

SEQ ID NO: 61846 - protein, 1193 aa, Unknown
  Microbial source - Accession No. Ga0308411_10021369
DKNEVKMFNDIKARMRHHISKALTAHEGFSKLNKDDLFKKKKNANESLLENFLNQNEKVRNKLNELLRDNEGDRVDLFELLRAFENFTTYFRNFHENRQNLYSPEDKFSTIPHRLIHENLPRFCDNIKIYNQAKAAGLNMNDIEKELRLNNNSLDEIFSIKYFTKTLTQSGIDFYNYIIGGGAIQSGSQNIKGINNFINNDINQNVNNSSGRIPIMKTLYKLPLFERTSYSFRYEPIENDKDLIERIKNFYYEDLKNHRDVDDNENNQVNVISAIKSLIENIHDYREGLYVNGGITLTQISQKIFGSWHYIRDVLSEYYDKSIVPVKLDKKRTKAEEKAKEKWLKQKQFSVKIIEDALCAYKKEKETNEEIIKKITETTICDFFKLAGADDNGSNNLFERIESKLTIKNEYDESLADLLGKEFQNERNLMQDKPRTLLIKNFLDTLQGYKDDITAGLLHFIKSLLPSEEISDKNELFYSEFEKYYNILKEVTPLYNKVRNYLTQKPYSVEKVKLNFENNTLLAGWDENKEADNSCVLLRKNNNYYLGIMKKEFNNVFKKDKYLIANDNEPCYEKMIYKLLPGANKMLPKVFFADRNINEFNPSEEILRIRNTASFSKNGTPQEGFNKAQFNLEDCRKLIDFYKKCISNHCDWKNFNFQFSDTDSYQSIDEFYREVEQQGYKVNFVKIPDRYINQLVDEGQLFLFKIYNKDFSDKKKTNGKPNLHTLYWKMLFDENNLKNVRFKLNGEAEIFFRPKSINYTDEIWEKGHHYDKLKDKFNFPIISNKRYALDKFHFHVPITINFKSNNQENINEIVNNYLKNSDKYNIIGIDRGERNLLYVTVINLKGEIIEQFSLNEISTNYRDKCFSKDYHEELDKRESQRDRARKDWQTIEGIRNLKEGFLSHVIHKISQLVIKYNGVVVMEDLNFGFKRGRQKVEKQVYQNFEKMLINKLNYLVFKDKEPDEPGGVLNGYQLVNKFKTFKELGKQSGIVFYVPAAYTSSIDPLTGYVQYLFPIKHANSVEKARNFYSKFKSIYYNPEKEWFEFVFDYIDFNIRFEGKSDWKICTANTERYVWNKNLNSGRGGQEKINVTEGLKLLFREYNILYCDGKNLRELISEVRSINNENTDKKFYNRLNYLLNATLKLRHNNGKQGAEEKDYILSPVKPFFDSRSANKTLPKNADANGAYNIARKGL

SEQ ID NO: 61847 - protein, 1261 aa, Unknown
  Microbial source - Accession No. Ga0308414_1002480
MNFDEFTNLYSISKTLRFELKPVGKTLDWITKNKLVEEDEKRAEDYKTVKKIIDRYHKEFIEEAFESALNANSFQRDMKDLIESYSELYYKEDKSDKDKKELENISSQMRQEIVSCFEGNYSDEVKKKFSNLFKKELIKQDLLNFCQPSEKEVIEKFADFTTYFGGFHENRKNMYSSEEKSTAISHRIVHENLPRFLDNLKVFNSLKEEYQDFPWNQLEFNLKNIDPSLKLEDYFSKKGFILTFTQKGIDRYNLILGGKSLDSGQKVQGLNELINLYRQKKCLDRRKIPNLKELYKQILSDRVKFSFIPEKFLSDNSLLEAIRNFHEEVINAKIEIDSKQVNFLEALKNTIQGIKAHKLEKIYISNDLGLTNISNFLYGEWSKIKSALFYYYDEKIADKGKGDKQSKKYQEGREKWIKKDYYSVQKLNEAITLYSKYSEDGFEATPLEEYFSKFKTRDENRAELDILSNIEQSYSELKPLLEKEYLKNKNLKSDKYNIEKIKNYMDSIKILQNFLKPLTPKKILEEKDLGFYNEFETYVESLQSFNRLYNKVRNYLTEKEYSVEKFKLNFENSTLLNGWDENKESANLGIILRDEDKYYLGIMNKNYKKIFSNIPKLKSSEAYYEKMVYKLLPGANKMLPKVFFAKSNIGFFQPSQKILDIKNSESFKKGDNFNLKDCHELIDFYKESISKHEDWSKFNFHFSETSSYQDISEFFREVEAQGYKITFNQVSKDYIHSLVEYGKLYLFQIYSKDFSEKKKSNGKPNLHTIYFKALFDEENLKDVVVKLNGEAEVFYRKKSINYDPEIREKGHHYEELKDKFTYPIIKDKRYAEDKFHFHFPITLNFKPKERSNFNLEVRKFLKASKDVNIIGIDRGERHLLYLVMINQEGKILKQLSLNTIQNEKQAVNYKEILQKREIARNQARKSWRTVENIKELKEGYLSQVVHKISKMMVEHKAIVVLEDLNLGFKRGRQKVERQVYQKFEKMLIDKLNFLVLKDRKNNEPGGILKAYQLTDKFVSFENIGKQTGFLFYVPAWNTSKIDPKTGFVNFLHLKYENVQQAKDLIGKFDSIRYNKQKDWFEFQVTTDKFFTKENLPESRTWTICSTPTTRYYTEKTTNSSIVTNEINVNEKLKELLSEFHFEDGKELKEKILQKDTKDFFSKLIFYLRVLTSLRQNNGKIGDQEKDFILSPVADSKGNFFNSLEAKDDEPNDADANGAYHIALKGLMNLQVLKQTQEENLDKPNWKIKNTDWLHFVWNRQN

SEQ ID NO: 61848 - protein, 427 aa, Unknown
  Microbial source - Accession No. Ga0308414_1007395
MNQRILTKRETQQRHKQMICKSYELKIDKSHLSKELANHLRQLFLEAKWFTNYAIANGIFEVDYKIKTVQIKVKDTFEERQIKHLSSQMKQAIIDKLKQDVKNLSILKNNGHKVGKIKFKRFVKTIPLKQFGVTYAICDKNHVRIQGIGKKVRVRGIKQIPTGAEFSNAYLIQDHGDYYLRGITYQNPENTVPKENSKNNAVGIDFGLRNQITLSNGISIQYRIPVITKKLRRLYKKFTRTQKGSNNRLKLNFKIQKQFAKSNNIKKDIKNKIVHCIRENFSIVCFQNDDIRQWQRIWGSKILDTAIGKFKDILKKRIPISIAVDKTFPSTYLCSHCGTINEISLAEEIYKCPVCGFTMHRDLKAARDIFSEGLKQLLMEHREAALLYQGRYACGEETSTRMLEYLNSIPYIRASFLYETGSLTASA

SEQ ID NO: 61849 - protein, 1024 aa, Unknown
  Microbial source - Accession No. Ga0308414_1018540
MDKQVAATQRAYTLRLQGADPRDQSWREALWQTHEAVNKGARAFGDWLLTLRGGLDHTLADAKVKGRKGKPARDPTDEERRDRRILLALSWLSVESAPKDGDTHKPFVTATGQDSQAIREEKVLCALRGILEKRGVRGADLEGWIKDCTPSLSAAIRDDAVWVNRSEAFDKAVDSIGSSLTRDEVWDMLERFFGSRQAYLAPAEGAEDESAEAEQEDKAKDLVQKAGQWLSSRFGTGKGADFSRMAAVYEKIADWAGKARAGMTGDAAVAGLAAALSEFSPASNDLQGVLRLISGPGYKSATRNLLNKLRARPSVAQEDLENLRDSACDDAEKCKAKTGSKGQRAYADAILKEVESVCGFTYLQEGGPARHSEFAVMLDHAARRVSLAHTWIKRAEAERRRFEEDARRMDKLPARVKQWLDAFCFERSEASGAMEPYRIRRRAVDGWKELVAAWSNADCKTAEDRIAAARALQDDPEIEKFGDIQLFEALAHDEALCVWHKDGDLAKSPDPQPLIDYVLATDAEFKKRQFKVPAYRHPDALLHPVFCDFGNSRWDISFDVHEAVKTGGRNRKNMMPPQDPHALSMTLWTGSTVEPQRLRWQSKRLARDLALKGRQGSNAPEVTRADRLGRAAAGVPERATVSIAGVFEQEDWNGRLQAPRAQLDAIAARVARHGWDDKARQMRDHLRWLITFSAKLQPSGPWLDYAAAFPDDAPAKSFVSRKGGYAVRHQDNDAREGHAKLVLSRLPGLRVLSVDLGHRYAAACAVWETLSAEQLKAACRAAGQEPPKDSDLYLHLKKKVKKQKKGREVEVEETTIYRRIGADTLPDGKPHPAPWARLDRQFLIKLQGEDTEARKASPAELQAVQRVEKEVGRVPPDQRALRVDDLMSETVRTVRLALQRHGRRARIAFNLTAGTKLLPGGREEVLTAEERVRLLADTLADWYDLFTGNGWSDQWARQQWETHITPLLKGAALPQMPHDAEDIAKSLAGNESLRRQLHCLWATRWRDYDVTLQKCLRRLRDWIL

SEQ ID NO: 61850 - protein, 683 aa, Unknown
  Microbial source - Accession No. Ga0308415_1006042
MLTRARTRVKKITKTILKLELKGDPNSMKFLDNLFNEYEQLVRIADTFIYHLYPYYANINEQEKFEGLNKLIRSIERKAIIKRRKDKKRETDDDFVYQQLPYLFAWLEGKISKESRYIYSHSDLLKTLLYTFIKYAKQYYGIDVKYVLLEKQGGLADLMHSNAENAYKHRSIPNMRRRLINVIPIRVSKRPLPENRRNKDKRNDDKPYERDTAFIFENGKIMFRIGRGKHKVVFKIATRFNDDERLSMFIKAIKGNDGLTIGDPCYLVRKDTDNGYRYYIMVSISKNVDVKALYEAIKNKSKIRIVGIDSNISKYITTMFCIEVDKENKTYKLVNAKGINSKDYINAVKKYEEDKRKLQQGRMKGKKQKKKKDSRYKEKEDYTIRNRCGDSKRIDIRRQLIGYICNQILEFANENYADIIVIEDLKGLNKELKTLRIIKKELGKLYNDVNTKGNNAIDDKINESKKYKNKIRKPLLGILNKIKEYSNAKDKVKVAKYILKQRQIIERRIFLLSMMAYYQFKQELDVEALWNGKLLYIINPKYTSQQCLRCGHTNKLNRITQRQFKCIKCNFEMNADFNASANIALRFATKVLKLELNLKQVEQGESSSMMTITKTNATTPLHASINAGSKLGVVADTLSSVASILQGCDEGRSPYLGGQTDEPCSVKSIATLDEFLEKKGNGG

SEQ ID NO: 61851 - protein, 1229 aa, Unknown
  Microbial source - Accession No. Ga0308419_1006240
IRKDAVWVNRSKAFDNAVKSIPYFSREEIWDLLHRFFVSQKKYLAPLDSPTEDKPDTTKKNSSKRLIKSARNWLSNRFGTGKGADFERSAAVYEAISRWASEAKPNKTNVLIDDLAKALQKFGVKTRDIKGISNVLKKSGRKSKTRSLLLQLSAKPNIEDKDLQRLKDTAEKDSKKERSKIGVKGHRDYASEILKAVEAACGFTYLQEGDRAKHREFAVMLDHAARRVSSLHTWIKQAEAERRRFEIDTKKKDQLPASVKQWLDTYCQKRSEETGAVEPYRIRRGAIEGWKEIVEAWSKPAITTSEERIQEARRLQDNPEIDKFGDVKLFEDLAREDALPVWHANGDPDKPPDPQLLIDYVEASEAEFKKRAYKVPAYCHPDPFLHPVFCDYGCSRWNISFTIHKEKAPDDPHGLSLDVWDGRAIRSVALRWQSKRFVRDLALNPKRSSDKPKVTRADRFGRALAECPSSDEVCIRGLFEDEDWNGRLQAPRPELTALAKHVAKYGWDEKANKLRNRLNWFITFSAKLRPSGPWEEYTKYAGGKHASPNKRGTMAKLRLSRLPELRVLSVDLGHRYAAACAVWETLSKAAFEQEIRERQILRGGTGPNDLFCHTRHVTDGQAKVTIYRRIGADTLPDGTLHPAPWARLDRQFLIKLPGEEREARKASPTELAQVEKLEKGLGRKTPDNRVKRIDDLMSDTLRTVRLALQRHNRRAQIAFKLTTTKRHLPGGRVESLGEQDRVTLLCETLKMWHSLFMGDDWTDDWAKTLWDEHIVPLLPPFDNQKADDLKWLKPAAEELASNPTKTQELHILWASRWQEDEQLWKERLRWLRHWILPRGIQTSAQKASIRHVGGLSLTRLATIKTLYQVLKAYHMRPEPDNPRKNIPAEGDEALQNFGQKILDDLEHMREQRVKQLASRIVEAALGLGRMKRATNKRDPKRPRERVDQSCHAVVIEDLTHYRPEERQTRRENRQLMNWSANRVKKYLGEGCELHGLHLIKVPASYTSRQDSRTGAPGIRCQEVPLIDFLKEPFWCKKVKCAKQRLSVGKANACDRYLCQLYERWENTPVTKAQTAIRLQIPLKGGELFVSADQNSPASKGIQADLNAAANIGLRAITDPDWSGAWWYVPCEANTFKPVKNKVAGSAAIDPNVPLKKDSPNSEKPASGQKHLVQRSRASKSIINLWCDISSKSISERDQWQESVPYWEDVAVRVIKILQASLVCSTTNSQ

SEQ ID NO: 61852 - protein, 488 aa, Unknown
  Microbial source - Accession No. Ga0308419_1011938
LQKAFKNYHLLYDRLLKVIYNELSSFYSAIAYSTKNGEARCSDKKAVQYINSQYRNVLNSFVLSSGLKESLCKDLADNLISYKELLAQRPNTSYPSLQKLKERVKERTLEELYESLKACIDTETYNHLRDAIARQSKENAKLKPLSFIRCDTTHQNMTFLYSPDRKKYYALLYVLPSSKKKLVIIKEDELYDVRTGQLFSRPKGTTTGLIFPIETGQRIVERYLNEKSQPKEGKLVYDSKNNEYYLHLAFEFKPEKIPTETIIGIDRGIEAICAYSVINMNYNLLESGLYEGKTLKELLKSEEKRMAEMQRRGVNYRFKVRRNWANRIIHEATNMIADIASKYKSQVYVEDLQGITDRTKARRKSSFNKMLNRSQFQKILMTLDYKLEGKGLPRAKKVHPAYTSMTCVQCGLIKPENRPKFDENGNPIQDKFKCVGCGYEDNADKNASRAIALKGIWTYIKKEDKIRQEIESFQSFLNKKLNKKVIAL

SEQ ID NO: 61853 - protein, 1476 aa, Unknown
  Microbial source - Accession No. Ga031036_000087
MAKQVAVTQRAYTLRLRGVDTQDQSWREALWLTHEMVNKGAKVFGDWLLTLRGGLDHTLADTKGKDGKEKHGCNPTDEERKARRILLALSWLSVESRLGAPEKFIIASGQDAAEERNGKVVAALEEILNSRGVEPNEINAWKINCSASLSAAIRDDAVWVNRSKAFDDAVKSIGCPLPRDKAWDMLGRFFESEDAYLAPLEGSEDESSDTEQEDKAKDLVKKAGEWLSNRFGKGKGADFSRMADVYGKIAAWAGNAQAGTTGNNAINELATALSEFTPASNDLQGVLGLISGPGYKSKTRNLLTQLAQTPVVTQDNLKDLNKRAAADTKKCKEKIGSKGQQPYANAILKEVESVCGFTYLQNGGTARHCEFAVMLDHAARRVSLVHTWIKRAEAERRRFEKDLQMLGQVPSAVKEWLDKYCEERSNSSGALEPYRIRRRAVDGWEKVVAAWSKTGCKTPEDRITAARVLQDDPAIDKFGDIQLFEALAEDDAVCVWHKDGDPNREPDPQPLIDYVRATEANFKKQQFKVPAYRHPDAFLHPVFCDFGKSRWDIEFAIHEARKVKATKSALRRKNRQCFDSSRELFMTLWTGNEMKRVPMGWQSKRLARDLALGQNTPNDGAPEVPRADRLGRAASNVTKSNEVKIAGLFEEAEWNGRLQAPRRQLEAIARRVDKHQWDAKAKKMRDQLHWLITFSPKLRPTGPWFEYAATFPDNALAKPSVSRKGTFFVKYRDNERPRKGGLILSRLPGLRLLSVDLGHRYAAACAVWETLSKEKFEGEIKGRKVRYSDSETGGLFCHTEHGNNAVTIYRRIGADMLPDGTPHPAPWARLDRQFLIKLQGEEEETRAASNQEIWAVHQLEAELGRTSPIIDRLVKAGWGQSGQQRTRLDVLCKLGWKPISEDRVSDGTDEGEYEVRKPSLSVDELMFSAVRTMRLALKRHGDRARIAFAMTAEYKPMPGDRKYYFTEAKDLSTNDDQVAREHKQIEFIQDALVLWHGLFSSRGWQDDAARKLWDDHVAKLSGYNAPEEIREDASGVERKKKQKENREKLYSVAKALAGDATLRKALHDAWKTRWKEDDERWKRQIRWFKDWILPRGKASNDPAIRKVGGLSLTRLATLTEFRRKVQVGFFTRLHPDGTKAETKEHLGQSVLDTLEHLREQRVKQLASRIAEAALGIGSENRKKHWDGRKRARERIKDPRFIPCHAIVIENLTYYRPEETRTRRENRQLMSWSSSKVKKYLAEACQLHGLHLREVSAGYTSRQDSRTGAPGIRCQDVSIKEFMQLPFWRKEVARAEKKRAEGKGDARECFLCELNAQWKDKSKAAWGEAGIVRIPLKGGEIFVSADKNSPAAKGLQADLNAAANIGLKALADPDWPGKWWFVPCNSTTFEPLKDKVGGFAAIRLNESLKKAPASWEGEETKKKRSRDVVNLWRDVSSQPISASDDWREFTPYWNGVQTRVVNILRQSAGPIMNHGER

SEQ ID NO: 61854 - protein, 457 aa, Unknown
  Microbial source - Accession No. Ga031038_009337
MAKRKRDKNAVVKTLKLELVDVLNYEPPPKKDGEEYTEKEKKRMFRKELRNLQKRIAQTSNYIMREYFLWELKRIEASKNGIILNEKEELGTTLQNKGYRIATETLKGLNTRNISALTSWLWENWRKYKKKVFNGSMSLPSYGLKQPIHIIKENYKIMPYKNNNEYIVEITFLSPSEGRNRTLKFVTVRQDKYRQNIINKILSGEYRQGSAQLILENNPNKNLSAQKIFFHFNYEFVPQVKEELSDKILGLDLGLKNVVVMQVYDPQQGKFEDLDENECMIDGTELVIYKNKIEALRKKANKATKWKGQGNTGHGRKKRTKNALNIGHKIKNSKSTYNYKLAKYIIDFALKYQCKYIKMEKLTRHGFSDTLLQNWAFNDLQNKIKNKAKENGIEVLFVEPQYTSQQCSKCGYIDKENRETRDNFKCKKCGFEIDADINAARNIALSEKIIKEDDDDE

SEQ ID NO: 61855 - protein, 457 aa, Unknown
  Microbial source - Accession No. Ga031046_00181
MAKRKKEKRTIIKTLKLELVDVLNYQPPISTDEKEYTKKEKERMLKKELRDLQKRIAQTSNYIMREYFLWELRKNAASKNGIVLNEKEELGTTLQNKGYRIAAETLKGLNTSNISALTSWLWENWKKARKRVLNGSISLPSYGNKQPIHINGKNYKIIAYKNNNEYIIEITFLSPSEKRNRTLKFVTAKQDKYHQDIMNKILNGEYRQGSAQLILEDNPNKNLSAQKIFFHFNYEFIPKQKEEISDRILGIDLGLKNVIAMQVYDPQHQQFISLDNNECVIDGLELVIYRNKIEALRNKISKATKWKGKGNVGHGYKKRNKNVLNIRKKISNFRKTYNYKLAKYIIDFALKYQCKYIKMEKLTRHGFSDTLLQNWTFNDLQNKIKNKAKENGIEVLFVEPQYTSQQCSKCGYIDKENRETRDNFKCKKCGFEIDADINAARNIALSEKIIKEDDDDE

SEQ ID NO: 61856 - protein, 672 aa, Unknown
  Microbial source - Accession No. Ga0310828_1006812
KHGFSYYHKGINYELKGTLGGARIQFDRDHLLRRQGVKAGNVGRIFLNVTLNIEPMQPFSRSGNLQTSVGKALKVYVDGYPKVVNFKPKELTEHIKESEKNTLTLGVESLPTGLRVMSVDLGQRQAAAISIFEVVSEKPDDNKLFYPVKDTDLFAVHRTSFNIKLPGEKRTERRMLEQQKRDQAIRDLSRKLKFLKNVLNMQKLEKTDEREKRVNRWIKDREREEENPVYVQEFEMIRKVLYSPHSVWVDQLKSIHRKLEEQLGKEISKWRQSISQGRQGVYGISLRNIEDIEKTRRLLFRWSMRPDNPGEVKQLQPGERFAIDQQNHLNHLKDDRIKKLANQIVMTALGYRYDGKRKKWIAKHPACQLVLFEDLSRYAFYDERSRLENRNLMRWSRREIPKQVAQIGGLYGLLVGEVGAQYSSRFHAKSGAPGIRCRVVKEHELYITEGDQKVRNQKFLDSLVENNIIEPDDARRLEPGDLIRDQGGDKFATLDERGELVITHADINAAQNLQKRFWTRTHGLYRISCESREIKDAVVLVPSDKDQKEKMENLFGIGYLQPFKQENDVYKWVKGEKIKGKKTSSQSDDKELVSEILQEASVMADELKGNRKTLFRDPSGYVFPKDRWYTGGRYFGTLEHLLKRKLAERRLSDGGSFKRGLSNGTDSDSNVE

SEQ ID NO: 61857 - protein, 1215 aa, Unknown
  Microbial source - Accession No. Ga0311022_13670299
VLLVYTGGQGLPLHAGNRKLCFEKFHNQEIASLAAMSFKGAVLHVSSENRKEMDMTQQNRPSVTQRAYTLRLYGANSEDASWRKALWLTHEAVNNGAKTFGDWLLTLRGGLDHTLADAKVKGAKGKPDRDPSIEERKKRRILLALSWLSVESKRGAPAAYIIATGREITENRNSKVVAAFEEILKSRGLTDTEIAEWRSDCTASLSATIRDDAVWVNRSKAFDDAAKSVGRSLTREQLWDMLDPFFGSRDAYLAPTKSSEDDSLEEEQGEKAKDLVQKAGKWLSSRFGTGEGADFSRIADVYEKITAWADAFQVGKTTTGDEAIKNLAAALSEFKPVSNDLTGVLRLISGPGYKSATRNHLNSLFGKKRINQEDIQILKTKAANDAQQCRQNTGSKGYRPYANAILKDVEDACGFTYRTDKDNKDVSVSDYSKFEDGYRWGPARHSEFAVMLDHAARRVSLAHTWIKRAEVERRRFEDDALKREQVPENVKKWLDDFCWKRSEASGALESYRIRRRAVDGWKNIVGAWSKAECRTMEDRITAARALQDDPDIEKFGDIQLFEALAEDDAVCVWYKDGDPAKEPEPQNLIDYALAAEADYKKRQFKVPAYRHPDALLHPVFCDFGESRWDISFSVHQQERNKSKLNNKKMITQGSPLRGLSLTLLTNIGIKPVLLCWQSKRLARDLALVSNADKGHVVNVSRADRLGRAASAVTENDTVAIESIFEEKKWNGRLQAPRRQLEAIAAVQNNSRFSAEERARRIQRMRERIRWVVTFSARLQPQGPWCEYAEKHRFKPDPRYWPHAEINKNRKGYARLILSRLPGLRVLSVDLGHRYAAACVVWEAVDAAHIKEACRAAGRESPNESDLYLHLKTKGQDGKERITIYRRIGADALPGNTPHPASWARLDRQFLIKLQGEEEGAREASNEEIWAVHRLESGLGRVAPLIDKLIAAGWGGTDKQKARLEALKQLGWSDRTAAASAGAGAEADEESGGIVPSLAVDELMSSAVRTMRLGLKRHGDRARIAFYLVTEEKTMPGGVKNKLDEQGKIDLITDALILWHDLFSSRGWCDDAAKKLWDDYIAKLSVYRALEEGDKDDSGSERRKQKDENRRKLYNVAEALLQDTDLQQRLHNAWKKRWEEDDEWWKRQLRWFRDWLLPRGKHTRAPGIRKAGGLSLIRIATLTEFRRKVQVGFFTRLRPDGTREEIKEQFGQSTLD

SEQ ID NO: 61858 - protein, 347 aa, Unknown
  Microbial source - Accession No. Ga0315269_0011078
METIKICVRGVISPRDMGLRKLMREYDVYKKVLIPRVKQTVRGIIKDKSLAVYSQQKWMIDKKLNEYLKNLSFHPMPFHNQSVYIESKDGKFWIHFRTKQGNVVCHLQVPMKYKSLIEKACGEDFADNPILGQVELIDDKKYGWINCHITLRLPKPEPYEPKGWIGVDIGWNKLATSILATKNPHLCFSSPIFHGKEFKTRIIQLRRLIKEYSRKGKSWKKWNFRLKNTIKYAVGVVAKEIVFKAKKFNAGISMEKLTFKSTTKGYLVPRYKLMIAIKTLSEREGVPFKLVSPQYTSITCPKCNYKDEKNRDKQWFKCQKCGYQTDADLVGAMNIALRALTASQMEG

SEQ ID NO: 61859 - protein, 371 aa, Unknown
  Microbial source - Accession No. Ga0315269_0014929
VARVETAYRTVILRLYPTPKQARMLKRAEAEVFKFLEVSRYQLMKLIYHKAGEAGVGVGRYSLSLLAQRFTGSLGNKAIIPLNTAYNARFIRENGVWFLEAQLLKGRGNRVKIPVAKTENKYYAAIGELGDLPLYVTREDDKWFAYVSIPVNAENNGRVIGVDFNLRKWVAAPAEGGPVLFFDASWYCREIDRLQRMRARLQSKGDLEGVQAACKGMVDAVTLAHGNFLARIQEKFGVCVIGMESVETLYKLTEKDNTMINNWLYSKTALRQFALRAMGKGFEVVEVDPRYTTRTCHRCGAPVKINGRRGRSITCPSCGLTNYHRDLNAARNIAKKAAEEWSKRVESRRRMEKLQPIAVAANGGGEEAAEK

SEQ ID NO: 61860 - protein, 439 aa, Unknown
  Microbial source - Accession No. Ga0315269_0030078
MENTIKMCVKAVIPPRDAGLRKLMHEYSVYKRILIPKVQRAVRQVVKDKSIAVYAQQKWMMDKKVNEYLKNLPFHPMPFHNQSFYIEDKDGKFWIHFKTKQGEAVCYLRVPARDHDLIEEACGNDYASNPILGQAELIEDRRFGWVKCHITLRLPKPEPYTPKGWVGVDIGWNKLATSILATTNPHIRFIKPAVHGKDFKTRIIQLKHLLKQYARRGNAWKKWDYRLKDSIKYAVGVVAKEIVAKAKKHKAGVAMEKLTFKSTTKGYLVPRYKLMMAVKTLCERSGVPFKLVSPKNTSLLCPKCENKQSRSWAEENGKDEKEQRKLFQTRIRKNREKARFRCIDCGYQADADIVGAMNIAQKALDSFPYEGENDVGFTPTSKADRGLPRKAGHVASPQAPMTDDPYKARRKPNKIENEVRNRLKWALNGHRTDLTQRLQ

SEQ ID NO: 61861 - protein, 796 aa, Unknown
  Microbial source - Accession No. Ga0315277_10001015
MATKSFEARVLCRDDPPDKKGEKYSAEQKKQFLWYTHQVFNESIRKVLPYVFKMKRGELGDEFQAIYYAISSSQDAVGKLEAITSLDWSSKKIGKSEPEKWKEILRYRELEKEFRQKLKDEEKNTKKFRKELQKKKKALANEIGQKDIWADAASIIQQKNNLLFDREKILPNLPSEFRRKIFEMCIQLIHGHQELVANWQDEHAEWLQEKDKFEEEHPDYMKVRPILEEFEKEAGKVKGSRIRWLKYLDYMSSHPELAGWRGGEAKVEPLTSAERAKFRKPREHFEAFFKKNPELSALDSIHKQYQEKFARTQTKRTPNPDGFKHRPTFTLPSANLHPAWYSFKGATDPTKGATYKLNFREDRRVDSFMNLKVLTDMEGEGRNPKGMITYDFEPDDRIRDFRYIGTTEKGKKAKGFVYYDKILEKERPAKIQGIKLVFRPPRSDGVPYLIFSCSIEDEKSKIKIWQDKESEEGPDEARKGKKAKKIYPPELVTLAIDFGQRHLGAITICKNNNGKPEQIKFIPAYPKRKQGKQTKPVSAWLAKVPGLTFNAIGMHEKEIRAGMHQRFQDPKSIRQAGEKEGRASKPRHIPETETSFAHLRDHIAGMKEDHYKKAANLIIKTALQNGAQVILLEDLKKYRPMLEKESRENRRRMQWAVRQTAEFLKKTAKPLGLLIYDRINPAYTSSMCSVCGNPGARISLPSKRNWEKYYAEYYGKERRMIAVVGGQFFCCPVCKKIINADINASQNMHKVFYNTFNWPPKMEKKEKKIFWESVREQAQNILDQKAEPKREEDISY

SEQ ID NO: 61862 - protein, 478 aa, Unknown
  Microbial source - Accession No. Ga0315280_10009663
MEDLRMAKKTENRHIKVLKLRILKPAGEMTWADLGEILREARYRVFRLANLGVSEAYLNYHLWRSKRASDFKIRTMGELNRELRETLRNEGKNEDQLNRFSKTGALPATVTDALSQYKLRAVTKKSKWKEVINGKSSLPTFRLDMAIPVRCDKKDQRRLEKTASNEVELDLMISARPYPRVVLATQEGSLGEGARAILEKLLENENQSKAGYCQRCFEIKQDTLSRKWFLFITYDFPATEVLSSKDRIVGVDLGVSCPVYVAINNGYARLGRRQFNPLMARLRALQNQTIRRRREIQRGGNEIISEERARSGHGRKRKLMPIEKLQGRIDRAYTTLNHQMSAAVIKFAKNNGSGVIQMENLDGLKEELTGTYLGERWRYAELQHFIGYKAKEAGIEVRKIDPKYTSRRCSECGYIYIEFNRAFRNTEHEKGKAAKFRCPVCNYEADADYNAARNIATLDIENIIKLQLEKQRVNPGDH

SEQ ID NO: 61863 - protein, 383 aa, Unknown
  Microbial source - Accession No. Ga0315280_10032046
MENTLKLCVKAVISPRDMGLRTLQKEYANYKKVLIPKVQKAVRQVAKDRSIKVYAQQKWMLDRKITEYVKNLPFHPMTFHNQSVWLERMEKGHFRIHFKTKQEEKEAVCYLQVPSKYRDQIEKTCGKDNPVLGQVELIEDRKYGWINVHITLRLPKPESYEPKGWVGVDVGWNKLATSILTTVNPHLHFANPTVHGKDFKTRIIQLKYLLKQYARKGRSWKKWDFRLKQSVKYAVGTVAKEIVGKAEKHKAGISMENLTFQSQTKRWLIPRYKLMIAIKTLCERKGIPFKLVPPRNTSITCPKCGFADSGNRNGERFNCRKCGYKADADISAAMNIAAIAIGFMPLAKEVRLHAKTSGDVATPLSTDEPMTSIKAGANPTESK

SEQ ID NO: 61864 - protein, 446 aa, Unknown
  Microbial source - Accession No. Ga031528_10053614
METIKFCVKGIISPKDKALQILQKELKNYKNALIPKIQNAVRKVVKDRVFQVYAQQKWMLDKKITGYIKNLPFHPMTFHNQSVRLEKTEEGQFYIHFKTRQEEKEAVCHLQIPMKYRSQVEKACGEDNPVLGQVELIEDNKYGWINVHITLRLPKPEPYEPKGWIGVDVGFCKLATSILAVPYVEARSIGHISSPLKGVTESPSSEALSSIAFNQQHKADGNTPNQGYKNRLNTIIIKFSNPTIHGKDYKTRIIQLKYLLKDYARKGKGWKKWNFRLKQTVKYAVGTVAKEIIAKAEKHKAGVAMENLTFQSQTKRWLIPRYKLMVAIKTYCERKGIPFKTVPPRNTSITCPKCRYVDAENRDGERFTCRRCGYQADADISAAMNIAHLAIYEEVEHLNSRKSAIAIGFTPMVKEARLHAETSGDVATPLSTNEPMTFIRTGANPV

SEQ ID NO: 61865 - protein, 389 aa, Unknown
  Microbial source - Accession No. Ga0315282_10053614
VETIKFCVKAVISPKDKALQILQKELKNYKKMLIPKVQKAVRKVAKDRSINVYAQQKWMLDKKLTEYLKNLPFHPMTFHNQSVWLERTEKGYFLIHFKTKQEEKEAVCHLQVPSKYHSQIEKACGKDNPILGQVELIEDNKYGWINVHITLRLPKPEPYTPKGWVGVDVGWNKLAASILVTANPHLHFSNPTVHGKDFKTRIIQLKYLLKQYARKGRSWKKWDFRLKQTVKYAVGTVAKEITVKAEKHKAGVALENLTFQSQTKRWLIPRYKLMVAVKTLCERKGIPFKLVPPRNTSITCPKCGYIDAKNRNGERFNCKKCGYQADADITAAENIAAIAIGFMPVVKEVRLHAEASGDVATPLNTDETDDLIKGRCKPSKIENEVTVKG

SEQ ID NO: 61866 - protein, 488 aa, Unknown
  Microbial source - Accession No. Ga0315285_10079970
VSVLLTAKLKVHNPSARKRQILDRALEEYTRAYAELLQWAKDNLSTIEEKGRYNGRFTETAIRSVFPNPSAFNHYYLHSSARDALWVDVAGTLCSYFRLREQNPSTAFPSCRDPSPETYPNALDDFAAVLDDEQQEKDCRARLLKVARGSVMPMYFSRPDAVPRNRNFSLLHDPQRQRYYALLYLEPGANNSDGCLRGKGNLVRVGWPQGKNAGDPRPAFRARAPCAVLLPLALGDWHVETFLNTSLRGDANVRSAFLSRRERGGREPEYYVHITFEFSPERVQTETALGVDRGLANLIALTVTDEAGKILHQELHPGRDLIDYQKYVYTVYRSRQKRGRSVAGQAMVARVNEEVCHRLANVIVETAVEHKSQVVMEDLKWFKERRRDFGQLKRAPLQRIQQILEYKLPMRGLPRPWYVGSAYTSRECPLCGYGFQVKGRGINRPSQDRFKCERCGYQTHADLNGSHNVARRWLQRKAERARPSTLTA

SEQ ID NO: 61867 - protein, 473 aa, Unknown
  Microbial source - Accession No. Ga0315288_10142264
MTEKEIAKRHVKVLKLHILKPADGMTWPELGKILKEARYRVFRLANLAVSEYYLGFHLWRAKKTEQFSTRTIGELNRELREMLKEGKSAEELDLFSKTGALPDYVAGALSQYKLRAVTSKSKWKEVINGKAALPTFRLDMSIPVRCDKPNQRRLERAANDDVQVALMVCSKPYPKVVIATGEPSLGGGPREVLKRLLENKSQSKDGYCQRCFEIKQDRLSGKWFLFVTYDFPVTQIAVSKERVVGVDLGVSCPIYVAINNGHARLGYKQFSSLMARLRALQIQTITRRREIQRGGKTIVSDDRARSGHGRRRKLLPIEKLEGRIDRAYTTINHQLSAAVIKFAKNNGSGVIQIEDLKGLGQELSGTYLGERWRYAELERFIEYKAKEAGVEVRRVQPQYTSRRCSECGNINMEFTYEFRKAEKEKGNRLKFKCPKCNYEADPDYNAARNIATIDIESIIRLQLDKQDHQDVDL

SEQ ID NO: 61868 - protein, 636 aa, Unknown
  Microbial Source - Accession No. Ga0315298_1000517
MDGLRGQRTRLRVGSWRRSWDLRDVPDERKRTVHRTAHRLTIRAETAIRDDHACTKASYLRPTMGMKRREGESMFGNPSEPSCVYRYGAYAPTTNIEIVHEQMRIGSRYRNKLCEIELARRAERDAFLQEASGEVNAAEKALADICAEIDKIKTEIAEYRKRARKRKLPPELSARRKELFAARKAARQRRNAAKKAAYKSSEFKEGLHKIDVAAIEKIKQARAESGLYWGTYSHVEQSMKGTQKGPPPKFKSYRNGEGTIAVQVQHGLTVREAESCKDTRIRIEGTGRKRILHIRVGSNGRKPIWATVPFVYHRPLPEDALIKWVRVTSRRVACHFHWYVLFTVSRPSGWKKADLAPDGVVAMDIGWRLFRDRFRVAYWVGSDGQEGEICLPLEYLDRRDKKNDLRKIRDEKFNAIRDKLADWIEAKTDALPQWLKEDTTSLRQWKSQARLAGLVLRWSRQRFTGDEEIFPELEDWRSDDRHLYEWEVNQERKAIAWRNEQYRIIAAELSRRYRKAVIEDINLHELSDSEKATDSANNATRDGKVGDGKQAWRRMVASVGRLKQFIKERFDSTVEVKCEWTTQDCAYCGERMNVDAAHNVVIKCPSCGVEIDQDRNAALNLLKRAGVPLESILVCS

SEQ ID NO: 61869 - protein, 583 aa, Unknown
  Microbial source - Accession No. Ga0315298_1001941
MQEQIKTFFCEKCNKEKKIPRNLLGKADAVEKARERHYHKEHTLILGIKFKIYPEKKDLEKINEYFDEYAKAVNFAARLIDKLKGQFLFMGKRNKEDEERKYIFPIARCDFCGEEKEISYQNKRGKKICFSCYQNEFGENGIRKKLYATKGRKVNASYNIKNATNKLCATHYNYVIRDAFQLLDALKKQREKRISRLIRDKGKLKKFEEMLEQEDKRYELPKKERQREPRFIHISLKDRAQEFEGRGYTIKRIKEKIKVLRRNIEREEKSLNKKTPIEFSGKRITLSSSLKFNIEKSLVRIPLTKELTKDYKFGGMNVANEHGRKFFEEKLKLIKENKPKYSYLIRKQINKDPDKPFYDYYLQYTVEFLPEVKQNYKRVIGIDRGIDHLACLVLLENGKEKPSFVKFFSGKDILKLRNQRRKQLSFLIGVHNKKRKQKKIRPIEPKIHQILHTISKQIVMLSKQKEAAISLEQLEKPKKGKYKQSKSTKYKLGQFVFKALSDYIEYKAKKEGIRVIYVPPEMTSQICSHCAIKGKVHVDTKRPYKNSYKLFKCNKDGCGVELNADYNAAFNIAQKGLKILNSK

SEQ ID NO: 61870 - protein, 1470 aa, Unknown
  Microbial source - Accession No. Ga0315298_1005332
MPKQNKPPVTQRAYTLRLRGTDLNDQSWRDALWKTHEAINKGAKAFGDRLLTLRGGLDHSLVDTKVKGGKGNPDRDPTDEERKTRRILLALSWLSVESKLGAPENFIVASGEESAQDRNNKVIAALEEILKSRGVAENEIDQWKKDCSASLSAAIREDAVWVNRSKAFDCICGNEDKKKAREDAQTLLWFLLTDDYLAIPKKPVKASETTVLDDKKEETGDDSSGELIVKSGKGAGKRTRHPFSHIFGRETTKGFGNPLRTFNLRNFWRQYLKPKIEAAGIPLSDPNAKAKKKDPPSPTELHREMFSQAAARLAQIWTKQKQQELERVQRAAADDELKKLENDPAYNTVLKRLEMFCRERGQATGSLEEYRINPRAIEGWDRVVTAWENISETDNDRATEKRIEKAKDLKKDNPDKKFGDINLFIHLAEPEYEPVWRHNGQADPSILKTYVKGWKARTDAIRLKVAAFRHPDPYFHPVFCHFGVSRPPIKHNRLNKRSVDDTRIVQMLLWTECKAEYVQLLAISKRFDAEIGSAAESSRDASANVPEVARRSRLGVAAITKQGGGDTFCVANVFDQQEVRPRKGEDKDGTQEEGCNNESQDRKKKEPTWNGTLQADRLKLEAIGRLQSSEPQKALLAKQHLRWWLIVSLELQPTGPWYDYITVLSDKSPFLRTARKDEDKGEKRKQGAKYISWSGWPHDEVNKPLRKNKNGTGLEADPTSHRQSMAALILSRLPGLRVLSVDLGHRYAAACAVWEALSAEAFKKDIDGKKILRGGTDEKDLYCHTEHEADGKKHVTIYRRIGADKLPDGTPHPAPWARLDRQFLIKLQGEEEGVRQASNEEIWQVHQLEAALGRSKPLINRLISSGWGITKNQQSRIEALKKLGWCPPEQPESGDVSDADEEEIAYKPPLSVDELMSSAVRTMRLALKRHGDRARIAHYLITDEKTKPGGVKEKLDANGRTEMLQDALVLWHDLFSSRSWRDDAAKQLWDEHIIKLTGDKLPEEIGEDASESERGKKKKENREKLHDAAKALAQDESLRKTLHDLWKTRWEEDDRQWKKHLRWFSDWVLPRGKAAEDPAIRKVGGLSLTRLATLTEFRRKVQVGFFTRLHPDGTRAETKEQFGQSTLDALERMREQRVKQLASRIAEAALGIGSQDKRHWEGGNRPRRRINDPRFAPCHAVVIEDLTHYRPEETRTRRENRQLMTWSSSKVKKYLAEACQLYGLHFREIFAGYTSVQDSRTGAPGIRCQDVPVKEFMRSPFWRKQVKQAETKLLENKGDARERFLCSLNAMWKDKAVTDWERAGVVRLPLKGGEVFVSADPLSPAARGLQADLNAAANIGLRALTDSDWPGKWWYVPCESSSLRPVKEKVEGSAAVNPTQALPQSAQKQNDGAGAKKKRKGSGTGKPKEVVNLWRDVSSSPLDDPNAGEWKEYTAYQNEVQWRVVRILEEELKGRFQRLYEGAKEDGIPF

SEQ ID NO: 61871 - protein, 1362 aa, Unknown
  Microbial source - Accession No. Ga0315298_1007399
MTNNIKNQKSIWSEFIKQYALNKTLRFELKPVGRTEDFLKQNKVFEKDKTIDDSYNQAKFYFDKLHQKFINEALFSESVKSINLKDFAEKFLGLKSEIQKLKSEKKQEEANKKEKEVNDIRNDYYKKIKSLLDKKAEEWKKKYKDGGLKFRKTDLKQKGTDFLMKSGILGILKYEFPKEKEEEFKNKDWPSLFVEDKANPGNKVYIFDSFNATYLLKFQETRKNLYKDDGTSTAVATRVISNFEKFLNNRKIFEDKYINHWKEVGITEEEKKIFEIDYYYNCFIQEGINKYNDLIGQINQKTKQYRDKNKIEKSELPLFKVLDKQLLGEVIKERELITKTENETEEDVFVKRFKEFVDRNKQIIPRAENLMNDLINEKFESDYYGIYLKRAAINTIANRWFKNTTEFLLKLPQASKSKENKESPKVKPFISLLDIKNALDDFEKEKESLGTIFKDKYYKTKESDEAPLNNDSQESYWKQFLKIWNYEFNQLFEDKFKEKGIKVFLGYTEALKKQVENLKSFSRKKEEIVLVKNYCDAALRIYQMMKYFALEAKKQDDIPLDYATEFYNRFDEYYKDFKFIRYYDAIRNFVTKKPSNEDKIKLNFESGSLLTGFDKNKESEKLGVILRNRNSDKYFLGIINKEHNKIFDSKNESKFIGDDNKDLYEKMELKLFPDPKRMIPKIAFADKNKKDFGWTQEIQKIKKDFENFQKNKKDNKDLKFDKNKLSKLIEYYQNCLEKGNYKKEFDFEWKKPEEYQSMSEFNQDIEKKNYKIKFIPVKDSYIEEKVANGELYLFAISNKDFIWPDQKKNIHTLYFFNLFSDKNIQKPIFRLGANAEVFYRPASVKKELDKGRSKEGKEIIKYKRYTEDKIFLHLPIEINYGCPKVPNEEARKKAFAAKYNNKLIEFLSKNINKINIIGIDRGEKNLLYYTVINQKGEILAHKSLNEINGVNYLEKLIEREKKRQIDRQSWEPVVKIKDLKKGYLSYVVRKIADLVEKYNAIIVLEDLNFGFKQKRTKIERTIYQQFEKQLIDKLGYLVFKDDRGSESPGGVLSGYQLVAPFTNFKDLGKQTGIIFYTNAEYTSKTDPITGYRKNIYISNSASQKTIKENLINKLKSLGWDEKEKSYFFTYNQKDFGSPISKEWTLYSKVPRVRREKNNSNGYWDYQPIDLNEKFEDLFEKYGINKKSSDILSEIKELIKNNEEKLIQKQEFDGKSKKFYERFIYLFNLLLEARNTMSLKVKLDKRGNEIKLDEIDYGVDFFASPVKPFFTTAGIRFIGKQNEDKKIEKQIKEKFAEENFADFKGLFKDCSSDGFDSDGVGAYNIARKGIMILERVKQNPQKPDLYISKEDWDDFALKNAIIK

SEQ ID NO: 61872 - protein, 767 aa, Unknown
  Microbial source - Accession No. Ga0315298_1007594
MARTRYREERTLVRRLCRLPREEEERSEFNHKVLKLREQFKKFNLDASETCQWLMGIRPDGKRANERTKLFWDFFLEPEKFLKEEDKDKSDRCRRVVFDFVAGFEKDTALSEFSFSKELMDSIQAIKSMPRIPCAEKLFQRLVQLNPAHRQVLLKASSEWIFAHYQKAKDNWEFQHKHWEEEKKGWENRYPDLTDEIRKEFTEIFKQMDIREKRPRICPWERLKESKDNCLYAGEKIGKKNHAQLCKKYKDFLDDCKRNNVKKFFAENAEKYLSLKRNQPYLPKEIIIKEFLNKNPKAKWFTDAWDKYLKAMGITEQTILSRGSLPHCVEFGDDKECQFNQHTEKCRQYKALLDAKPELQALEGLYRKWREKYLSGPSKPSFKYPSAKKLSMPKIFGAGFFEVDFNKSILKLRLDDMPEGKFLEFGFIPWPKDYKPQPNETEITSCQVNFIGTRPRVGFRFKTPHKKSRFTISQDEIDELRSRKYPRQEQDQKFLDEARKRLLESFPQDPKKELKILAVDLGEKTGGAVLFKGTDFQKYFPLKVVKMKKLLEIRPEDEKDKNDKISKEEKKELRKKGLGKWHIALHLEARREQAKAIAEKRQKEKEKAELRNFDLRKLTLHTRWMIRDWVRLNASQIIQLAEQNQVDLIVFESMRGFSVPGREEIGKEDKKLAFLAAGQIRRKVAEKAVERGMRIITVPYLESSKHCSICKKLQKDEKIWRKNKLDEHKFRCEKCKAEMNSEENAARVLARVFWGEITLPGQLPDHT

SEQ ID NO: 61873 - protein, 1380 aa, Unknown
  Microbial source - Accession No. Ga0315298_1015991
MPETPAYTTRAYTLRLAGATPEDHAWRGRLWQTHEAVNKGARVFGEWLLTMRGGLDHTLADQQDPQQRRDHRVALALSWLSVESPAEAVASDLIVSRGKDPHEDRSQALEIALREILQQRGLSDADIDSWLVDCRATLGARIRDDAVWVNRSKAFDAITEQPRRPQARVDCQVLLWHLFTHDYLTLPRASLRRRQEQQAQREGADQDPDEGQGEDKRSAVVRSGRGAGTRTRHLFSHIFGGSPTFGKDKHKEKEKERVLALRGHWLAYLQPLVEGAGIPLRDPSQPRRANDGAVPTELHREMLSKAAARLAQIHTKQKQQEIEREQRERADEALRRLEDDPAYKEALALLEAYCDDRRAEWGDYTIRPRALEGWRDVVAAWALCGSEEERVDEVKRLQDEDPDRKFGDPNLFCELAQEKYVPVWRHCGKEDPDLLTRFVKGNAARADAKRLRVAAYRHPDPCFNPVFCQFGISRPAIKFARLGQLRKSKEPGSERSTAVSLLLWDGKAARTTILQALGARLDREIGTVDQQQPLDRDPTLVTRRTRQGFAVAAQESASGEGSRVIGVFDEQDIEKRRPEHDQAAAGKVARKAPEWNGTLQADRRALAAIGRAADAREAARAREQLQWWLTVSIELRPQGPWPTYADKHGIELDRGREGIVTLPTKKADEWRGLAYPCWVDDNKGRHGRDRLVLARLPGLRVLSVDLGHRAAASCAIWETLTRPQVEEICRACGHDAPGEGDIYLHLKRKVLKQDKGGSAREAEATTIYRRLAADTLPDGSPHPAPWARLDRWFTIRLQGEEAQARFATRAEQAAVRDFEKWLGWQAGNRRRSQRIDELVAHAVDLARRGLRRHADHARIAWGLAAPKKQLPGGRRPDGEMSREERVAHLQGVLLRWHDIAFSTQWKDDWAQELWNATLPDYQKPEPIAENASAKEKKAARERNLETLRPAATALAEDSARRLALHEAWKSRWAQDDGAPAQVDRQASGCKQSQGTGWHAHLRWLHDWLLPRGNKSRKRTLRQVGGLSLMRLGTIRDFHRKVQKAFFTRLRPDGTKAEAPESFGQRTLDDLAAMRENRIKQLASRIVEAALGVGSENPLHREGRRRPRQRIADPRFAPCHAVVIEYLANYRPHQSRMRRENRQLMDWSTGRFKQYLAEACALNGLHLREVSAAYTSQQDSRTGAPGIRCEQVVLREFLQSPFWRKKVSSAAKRAGNPFTQLWRDLVNRARKSSPADAATTVLYLPREGGRLFVSASPCLCCQPSSQGLAPINADLNAAANVGLRALSDPDWPGTWWYSPYNLTQSQPCLDKAKGSAAISAGSPPAAPAQATTQEKVINLWRDVSAKPITPENGQPYSRYWNGVQERVVARLRPALGLHHEP

SEQ ID NO: 61874 - protein, 847 aa, Unknown
  Microbial source - Accession No. Ga0315903_10087816
EVRKKYTPTCLADYFHTHFKAQKKTDSEKDYTLTANVEAKHSAIKGILNIPYPNDKKLYQQQKDIDNIKLFLDSVMELLHFVKPLSLNKDSALEKDNSFYGQFEVLFEQLDMLTPLYNKVRNYATQKAYSTEKIKLNFDNSTLLKGWDINKETDNTSVILRKDDQYYIAIMPQDYKKAFQSIPKAIDGESTFEKMDYKQIALPMGVGAFVRKCYGTAMQYGWVCPDDCKNEEGKIIIRQDEIKGNLAALIDCYKDFFDKYEKEGFQYKEYNFKFKDSAAYENLNQFFLEVEQQGYKISFREVAETYINQLVEEGKLYLFKIHSKDFSAHSKGKPNLHTLYWKALFEPENIKDVVYKLLGQAELFYRKASITSDKIIVHRAHEAIDNKNPEKKKATSTFAYDLVKDRRYTVDKFQFHVPITLNFKATGNNYINQDVLTYLQRNPEVNIIGLDRGERHLIYLTLINQRGEILKQLSLNDIINTYKDAAGNTVDVKTPYHTLLDTREKQRAEARENWGAIETIKELKEGYISQVVHIIAKMMVEHNAIVVMEDLNFGFKRGRFKVEKQVYQKLEKMLIEKLNYLVFKDKAPSETGGLYHALQLANKFTSFKEMGKQSGFLFYVPAWNTSKIDPTTGFVNLFDTRYESIEKTKSFFDKFKSICFNPIKNYFEFAFDYTDFTTKADDTKTNWTVCTHGDRIRTYRNPDKVNQWDNKPIQLTQEFEDLLGKYNITYGAGACLKAQIAEQKDKEFFASLLHLFKLTLQMRNSITNSEVDYLISPVANERTGLFYDSRKKNEKLPKDADANGAYHIAKKGLWWLEQIHELEGQEWKKLDLDKSNKGWLAYVQQSK

SEQ ID NO: 61875 - protein, 1000 aa, Unknown
  Microbial source - Accession No. Ga0334883_1024988
AAIRDDAVWVDRSKAFDEAAKSIGCSLTREEVWDMLKGFFGSHEAYLNPAKGSDEESSDTGQEEKAKDLVQKAGQWLSSRFGTGKGADFSRMVGVYQKVADWAGACPGNNAGTDAIANLAAALSEFTPISNDLQGVLGLISGPGYKSATRNLLTQIDAKTTVTQADLTKLKDTAATDKEKCEPKIGSKGQRPYSNAILKDVESVCGFTYRVDKDGQPVSVAHYSKYDDDCSWGSARHSEFAVILDHAARRVSLAHTWIKRAEAERRKFEEDAQKVDQVPKAAKDWLDQFCLERSGMSGALEPYRIRRRAVGGWKEVVAAWSKNSCTSYDDRIGVARALQHDPEIDKFGDIQLLEALAENDAVCVWHKDGDAAKAPDPQPLIDYALAAEAEFKKRHFKVPAYRHPDALLHPIFCDFGNSRWDIRFEIHENVQTSSPHALLLTLWTGSGMNSVQLCWRSKRLAHDLALGQNAQNAGVSEVARADRLGRAASNATKSDKVKIAGLFEQETWNGRLQAPRQQLEAIAKRVEKHGWDENAKKMRDRLQWLVTFSARLQPQGPWCEFAKTNQLRIDPQYWPHADANKTRKGQARIILSRLSGLRVLSVDLGHRYAAACAVWEAVNAEQVEKACQVVGHEAPKASDLYLHLKSKAMKRKKGNQVEVEETIVYRRIGADILPDGMPHPAPWARLDRQFLIKLQGEEEGVREASNKEIWAVHQMEADLGRPVSLIDHLVASGWGGSDKQRARLEGLKQLGWNPAEKFESGGESDLGEASDAYRPSLSVDELMSSAVRTMRLALKRHGDRARIAFAMTAACKPMPGDRKYYFTEAKELSMNDDQVTRSNKHVEFIQDALVLWHGLTSSRGWRDDAAKQLWNDHITRLSGYKAPEEIGEDTSAAERKKKQKENREKLHDVAKVLAEDATLRKVLHDAWKKRWKEDDERWKKELRWFKDWILPRGKAVDDPAIRKVGGLSLLRLATLTEFRRKVQVGFFTRLQPDGIRAETK

SEQ ID NO: 61876 - protein, 1490 aa, Unknown
  Microbial source - Accession No. Ga0334884_1015165
MPQQNKPPVTQRAYTLRLRGAAPNGQSWRDALWQTHEAVNKGAKAFGDWLLTLRGGLDHTLADTKVKGGKGKPDRDPTDEERKARRILLALSWLSVESRLGAPESLIIASGKEPTKDRNDKVVAALEKILKARRVEQNEINAWKNDCLASLSAAIRDDAVWVDRSKAFDEAAKSIGCSLTREEVWDMLKGFFGSHEAYLNPAKGSDEESSDTGQEEKAKDLVQKAGQWLSSRFGTGKGADFSRMVGVYQKVADWAGACPGNNAGTDAIANLAAALSEFTPISNDLQGVLGLISGPGYKSATRNLLTQIDAKTTVTQADLTKLKDTAATDKEKCEPKIGSKGQRPYSNAILKDVESVCGFTYRVDKDGQPVSVAHYSKYDDDCSWGSARHSEFAVILDHAARRVSLAHTWIKRAEAERRKFEEDAQKVDQVPKAAKDWLDQFCLERSGMSGALEPYRIRRRAVGGWKEVVAAWSKNSCTSYDDRIGVARALQHDPEIDKFGDIQLLEALAENDAVCVWHKDGDAAKAPDPQPLIDYALAAEAEFKKRHFKVPAYRHPDALLHPIFCDFGNSRWDIRFEIHENVQTSSPHALLLTLWTGSGMNSVQLCWRSKRLAHDLALGQNAQNAGVSEVARADRLGRAASNATKSDKVKIAGLFEQETWNGRLQAPRQQLEAIAKRVEKHGWDENAKKMRDRLQWLVTFSARLQPQGPWCEFAKTNQLRIDPQYWPHADANKTRKGQARIILSRLSGLRVLSVDLGHRYAAACAVWEAVNAEQVEKACQVVGHEAPKASDLYLHLKSKAMKRKKGNQVEVEETIVYRRIGADILPDGMPHPAPWARLDRQFLIKLQGEEEGVREASNKEIWAVHQMEADLGRPVSLIDHLVASGWGGSDKQRARLEGLKQLGWNPAEKFESGGESDLGEASDAYRPSLSVDELMSSAVRTMRLALKRHGDRARIAFAMTAACKPMPGDRKYYFTEAKELSMNDDQVTRSNKHVEFIQDALVLWHGLTSSRGWRDDAAKQLWNDHITRLSGYKAPEEIGEDTSAAERKKKQKENREKLHDVAKVLAEDATLRKVLHDAWKKRWKEDDERWKKELRWFKDWILPRGKAVDDPAIRKVGGLSLLRLATLTEFRRKVQVGFFTRLQPDGIRAETKEQFGQSALDALEHLREQRVKQLASRIAEAALGIGRMRRPMGGKDPKRPNGRVDEPCHAIVIEDLSHYRPKETRTRRENRQLMTWSSSKVKKYLAEACQLYGLHLREVSAGYTSRQDSRTGAPGIRCQDVPIKEFMRSAFWRKQVAWAEKKRAEGKGDSRERFLCNLNAIWKDKTMADWEQAGVVRVPLSGGEIFVSADPVSPVVKGLQADLNAAANIGLRALTDPDWPGKWWYVPCEPGSFKPVKDKVDGSAAVKPEQALRQSAGVRSGGAGKSKEVINLWRDISSSPLECIECGEWKEYTAYQNEVQCQVIRVLGEQIKGHHKQSYGRVKEDGILFR

SEQ ID NO: 61877 - protein, 664 aa, Unknown
  Microbial source - Accession No. Ga0370516_000963
MLARTRVKKITKTMLKLELKGDPKSLEFLDNLFNEYERLVRIADSFVYYLYPYYANITEQEKLERLKELVQSLDEKAIRKNKRRKREPQEIEEQTITETETKHKYTHSNLLKTLLHRFIKYTKQYYGIDAKYAWLEKQGGLADIMHSNAESAYKHRSIPNMRRRLTNVMPITMSKSPLDENRKDKKNNGRYYKKDAEFIFGNGKIMFRIGRGKHKVTFKIATRFNDAERLGMLIHAIQGDNGFTIGDPCYLVRKETYNGYRYYIMVSISKNVDVKALYEASKNKSKIRIVGVDSNISKYIATMFCIEVDKENKEFKLINAKGINSKDYINAVKKYEEERRKLQQGRMKGKISKKKCSRYKEKEDYTIRNRCGDSKRIDIRRQLIGYICNQILEFTDENNADIIVIEDLKGLNKELKHLRIIKKELGKLYNDVNDKGNNAIDDKINEINKKYKNKIRRPLLEILNKIKEYSNAKDKVKVAKYILKQRQIIEKRIFLLSIMAYYQFKQELEVEALWNGKLLYTINPKYTSQQCLRCGHTNKLNRITQRQFKCIKCKFEMNADFNASANIALMFATKILKLNLKQEEQGESSSMMTVTSATTPLHASINAGSKLGVVADTLSSVASILQGCYEERSPCLGGQTEQPCSARRSIATLDEFLEKRGNGG

SEQ ID NO: 61878 - protein, 687 aa, Unknown
  Microbial source - Accession No. Ga0370516_004838
MLTITKARTRVKKITKTMLKLELKGDPNSLEFLDNLFNEYERLVRIADSFVYYLYPYYANITEQEKLERLKELVKSLDEKAIRKNKRRKREPQEIEEQTITETETKHKYTHSNLLKTLLHRFIKYTKQYYGIDAKYAWLEKQGGLADLMHSNAESAYKHRSIPNMRRRLTNVIPIRVSKIPLAENRRNKDKCNDDKPYERDTAFIFENGKIMFRIGRGKHKVTFKIATRFNDAERLGMLIHAIQGDNGFTIGDPCYLVRKETYNGYRYYIMVSISKNVDVKALYESIKNKSKIRIVGVDSNISKYTATMFCIEVDKENKEYKLINAKGIKSKDYINAVNKYEEERKKLQQGRMKGKKQKKKGSKYKEKEDYTIRNRCGDSKRIDLRRQLIGYICNQILKFADENKADIIVIEDLKGLNKELKHLRIIKKELGKLYNDVNSKGNNAIDDKINEINKKYKNKIRRPLLELLNKIKEYSKNKDRIKVAKYILKQRQIIERRISLLSMMAYYQFKQELEVEALWNGKLLYTINPKYTSQQCLRCNHTNKLNRITQRQFKCIKCKFEMNADFNASANIALRFASEILKLELELKQGESSSMMTATNATTPLHASMNAGSKVSEQGHNDDLVRNGSVASTMSSVASILQDCYERRSPCLGGQTKQSCSVRSIATLDEFLEQKGNVFAMKGNGG

SEQ ID NO: 61879 - protein, 686 aa, Unknown
  Microbial source - Accession No. Ga0370516_008232
MLTITRARTKKITKTMLKLELKGEPNSNSLKFLDNLFNEYKQLVRIADTFIYHLYPYYANITEREKLEGLNKLIRSMERKAIINRRKEKEKKKETDDDFAYQRLPYLFAWLEGKISKESRYTYSHSYLLKTLLHRFIKYAKQYYGIDVKYANLEKQSGLVDIMHNNAENAYKHRTIPNMRRRLINVMPIRVSKRPLPENRRNKDKCNDDKPYERDTAFIFENGKIMFRIGRGKHKVVFKIATRFNDIERLGMLIHAIQGDSIFTIGDPCYLVRKETDNRYRYYIMVSISKNVDVKALYESIKNKSKNKIRIIGIDSNISKYIATMFCIEVDKENKTYKLINAKGIDSKAYINAVNKYEEERRKLQQGRMKGKKQKKKGSRYKEEEDYTIRNRCGDSKRIDLRRQLIGYICNQILEFANENDADIIVIEDLKGLNKELKTLRIIKKELGKLYKDVNSKGNNAIDDKINEINKSKKYKTRRPLLEILNKIKEYSNTKDKVKVAKYIIKQRQIIEKRMSLLSMMAYYQFKQELEVEALWNGKLLYTINPKYTSQQCLRCNHTNKLNRITQRQFKCIKCNFGMNADFNASANIALMFATKILKLKLELNPKQGKDSSTVTSTAIPLHASINAGSKLGVVADTLSSVASTALQGEGEGRLPCLRGQTDKPCSAKRSIATLDEFLEKKGNGG

SEQ ID NO: 61880 - protein, 672 aa, Unknown
  Microbial source - Accession No. Ga0370516_009639
MLTDTRTKVKKITKTMLKLELKGDPKNLKFLDNLFNEYGQLVRIADSFVYYLYPYYANINEQEKLERLKELVQSLDEKAIRKNKRRKREPQEIEEQTITETETKHKYTHSNLLKTLLHRFIKYTKQYYGIDAKYAWLEKQGGLADLMHSNSESAYKHRSIPNLRGLSNVMPIRVSKRPLLENRKSKDNDEYYKRTAEFIFNNGKIMFRIGSKHKGLTFKIAERFNDTERLVILIDAIQGKNDLTIGDPCYLVRKETDNRYRYYIMVSISKNVDVKALYESIKNKSKIRIVGIDSNISKYIATMFCIEVDKENKEFKLINAKGIKSKNYINAVKKYEEERRKLQQGRMKGKKQKKKGSRYKEKEDYTIKNRCGDSKRIDLRRQLIGYICNQILEFADENNADIIVIEDLKGLNKELKHLRIIKKELGKLYNDVNSKGNNAIDDKINEINKKYKNKIRRPLLELLNKIKEYSNAKDKVKVAKYIIKQRQIIEKRMSLLSMMAYYQFKQELEVEALWNGKLLYTINPKYTSQQCLRCGHINKLNRITQRQFKCIRCNFEMNADFNASANIALRFATKILKLNLKQEQGESSSMMTATNATTPLHASINAGSKLGVVIANNNTDGSVASTMSSVASNLQGCDEGRSPCSRGQTKQSCSAKRLVTLGEFIEKKGNGG

SEQ ID NO: 61881 - protein, 405 aa, Unknown
  Microbial source - Accession No. Ga0370516_018229
VGLKPKLLNPRTTFVAVHARLVFTSPEDERAVLDLMRRFSAAYRWIYKRLLEGHDPNELKREGGPMERRFGLNVKYNEGARDLALWKIAVMKELGRPPEKVVFGGRGLFRRLGRKGDLKARLEAKRLWRERRNGLLYCPGDRSQYSGNRNLQLFTRDGALWLRIVLDTTPLTPEERAQSRLFPGESGRTKGHYVDALVQTRSQNLPAILEVVGQKGVAPIGVNLRLHDGRVYATFSRQLPLPVPVYTRQHGVLGVDVNARPFHLALAVVGPDGNLRRYTTIPLEEADRIRERKQGETSRNALENFYWHVAHQVVRLAKEEGVAIAVEDIRRLPKGRRGEGNKRFRRKLHRFAYRAILERIVRVASREGVEVWGVNPAYTSVIGALKYAPMRGLTKDVAAAWVIAR

SEQ ID NO: 61882 - protein, 348 aa, Unknown
  Microbial source - Accession No. Ga0370516_020865
MRVNTKYRTVIIRLYPTPKQEVLLKKAEEEVLKFLHLSRLELQKMLYHKMKEMGIELSMYTVSLLTQRFTGSLGEKAIIPFDTDYNAKFVNDDGIWFVEVQLFKGKGNRIRIPIAKTELPYYEAIDEIQGLPFVITRENNDWFAYVSVPVKAEPSDLVVGVDFNLRMWVASPYEGRPVFFDVREYDQKIDRLQRLRTRYQKRGEEENVNECLRKMKEIVKLAHGNFLARIMERYGVCNLAIEDIEVIYKLTEKDSRMINNWLYSKTALRQFALRAMAKGFNVIEVDPKDTSRLCHKCGNPVRIYGKHERLIACETCGYRDYNRDLNAARNIAKRGSESRNIICPHPSG

SEQ ID NO: 61883 - protein, 422 aa, Unknown
  Microbial source - Accession No. Ga0373397_000168
MKHTKVMRYQIIKPINDTWETLGHVLREIQRETRAALNKTIQLAWEWQGFRAEYKQRYEEYPKTKDHLGYSALHGYAYNRLKDEFYRMNTANLSQTVKRAADKWKSDLKDVMRGDKSIASFKKDCPIDIVSQALRIRKDGSDYILTLSLVSIKYRKELERKQSSFDVLISANDKTQRDILDRLIAGEYKLGASQLLYHKKKWFVNVNYQFEKEETAFDQDNIMGVDLGIVYPVYMAFNNSLHRYKIEGGEIERFRAQVERRKKQLLQQAKYCGEGRRGHGTKTRIQPIEVVSDKVANFRDTVNHRYSRYVVDMAIKHRCGTIQMEDLTGIATDNTFLKSWPYYDLQQKIEYKAHEAGIQVVYIKPDYTSQRCSKCGHIERDNRTEQATFECKSCGFKTNADFNAARNIATKDIEKIIAETLK

SEQ ID NO: 61884 - protein, 426 aa, Unknown
  Microbial source - Accession No. Ga0373621_000479
MGANKEMETIKVTVKATISLKDKGIRKLMREYDAYKKVLISRVKQAVRPIIKDKSIRVYAQQKWMVDKKLNEYLKNLSFHPMPFHRQSVWIEYRKGFLIHFKTAEGEAVCHLHVPEKYYDMILEACGEDNPILGQVELIEDPKYEWINCHIVLRYPKPEPYEPKGWLGVDTGWNKLATSIACEINPHIRFYNPTFHGKDFKTRIIQLRHLLKEYQRKGKKIKMWKNRLKNTIEYAKGMVAKEIVSKAKKHKLGVAMESLTFKAVSKGYLVPRYKLMIAVKTLCEREGVPFKLVPASYTSQTCPKCGYVDEKNRDGERFKCLKCGYQADADIVGAMNISQKAFDSSSDEEENGVGFKPTSKADRGLPREAGRVASPQASMRDDPIERDATQGVARVACKEHCNFAPEESASQIWENCRSRQRTLQLY

SEQ ID NO: 61885 - protein, 378 aa, Unknown
  Microbial source - Accession No. Ga0373621_007959
VNKNNTDLIKVTATCGIDPRDKGIKILMKEYVIFKKNFITKVKGAIRPIVKDRNVRVYSSQKFLLEKKLHEFVKNLPYHPMPTGNQAYWLEKSYYETKNGKKYPCINLHIKTKDGEAVSKLIVPKKYEEYLLKATKKSCPYLHDEKCEFEYCPFETPKMCKKINPHRGELELIEDLKSGYIRAHITLRFPKSKPYEPTGWLGVDTGWNKLAVSIVAKNNPHLRFYAPSIHGKDFKTRIIQLRHKLKELQRNGKVSEVWENRLQNMIKYATGKTAKEIVSKAKKYRVGVAMEDLNFQAVTKGFIVPRYKLMIAIKTHCEREAVPFVLVPAKNTSITCPKCGFVDEKNRNGERFKCLKCGYEADADIVGAMNISKAGVKI

SEQ ID NO: 61886 - protein, 336 aa, Unknown
  Microbial source - Accession No. Ga0373621_010685
MRVNSQYRTVTVRLLPLPEQEILLRKAEMEVIKFLSLSRYELQSMLYHKMKDYGVEISMRSLNLLVQRFTGSLGEKTIIPFDDNAKFVNDNGLWFVEVQLFKERGNRIRIPIAKSEVPYYEAIGELEGLPLLITRENEDWFAYVSIPVKADPNGLIVGVDFNLRKWVASPYIGTPIFFDVREYNEKIDRLQRLSSRYQSREEEEKVKECFRKMQEIVKLAHGNFLSKIMDKYGICNLAVEEVETIYKLVRKENKMINNWLYSKTALRQFILRAMAKGFNVIEVDPKDTTKLCHKCGNPVKIYGKHERLIACEKCGYRDYNRDLNSARNIAKKGKFK

SEQ ID NO: 61887 - protein, 334 aa, Unknown
  Microbial source - Accession No. Ga0373621_017562
MRVSTQYRTVILQAYPDPKQERVLKRCEQSVLKFLEVGRLQLQKMLYHKLKDLDIGRYSLSLLAQRFTGSMGEKALLPFHTDYNARFVEDGGLWFIDAQLLKGRGERVRIPIAKTEVPYYESIQELVGLPFFLARENDKWFAYVSVPVKADPNGTAVGIDFNLRLWVASPYEDSPLFFDARPYSREVDRLQKLIARAQKNEEDVEEHYQSLRGLIKQAHGNFLSAISEKWGICTLVLEDIETMYGMRGLKSKLTNNWLYKKTALRQFALRAMAKGFDVVEVPPRGTSKECHRCGSQLKIYGRHERLVECDKCGLRDYNRDLNAARNIAKGAVDA

SEQ ID NO: 61888 - protein, 347 aa, Unknown
  Microbial source - Accession No. Ga0373621_020135
MKVNSQYRTVIIRLYPLPEQEILLRKAEMEVIKFLNLSRYELQNMLYHKMKECGVELSMYTLSLLVQRFTGSLGEKALIPFDTDYNAKFVNDNGLWFVEVQLFKGKGNRIRIPIAKTELPYYEAIGELDGLPLVIARENEDWFAYVSIPVKADPNNLIVGIDFNLRKWVASPYEGAPVFFDVREYNEKIDRLQRLRSRYQKRGEEEEVKECFRKMQEIVKLAHGNFLSKIMGKYGICNLAVEEVETIYKLVKKENKMINNWLYSKTALRQFILRAMAKGFNVIEVEPKDTTKLCHKCGSPVKIYGKHERLIACEKCGYKDYNRDLNSARNIAKKGSEVSITNSCMVR

SEQ ID NO: 61889 - protein, 356 aa, Unknown
  Microbial source - Accession No. Ga0373621_023545
MPKVFKVAPTVEGNTLKRCVRGAISPRDIGLRKLMREYAIYKHVLIPRVKQAVRQIVKDKTISVYAQQKWMVDKKLNEYLKNLPFHPMPFHNQSVFIENKSGRFWIHFKTKQGEAVCYLYVPAKYHSLIEKACGEDFTRNPVLGQVELIEDKHYGWVNCHITLRLPKPEPYEPKGWIGVDVGWNKLATSILATVNPHLTFSHPTIHGKNFKTQIIQLRYLLKDYARKGKAWKKWDYRLKNTIKYATGVVAKEIVLKAKRHKAGVVMEKLAFKSVTKGYIIPRYKLMVAVKTLCEWEGVPFKLIPAKYTSITCPKCGYKDEKNRLSERFTCLKCGYQADADIVGAMNIAKTASQMEG

SEQ ID NO: 61890 - protein, 405 aa, Unknown
  Microbial source - Accession No. Ga0373621_050562
LDSETARLCVKAVISPYDLGLDKLLHEYKLYKKMLIPKVQQAVKQIVKDKSIPVYSDQKWLVVKKISEYLRELPLHPMLFGNKSYWIEKRGGEFWIHMKTKDGEAICLLNVPEKYRDVVEKACGETCPYMRNSKCEFTKCPFNTPKMCNRINPHRGEMRLAQDARYGWINCHITLRLPKPEPYEPKGWLGVDVGWNKLATSILATVNPHVRFSNPTFHGKEFKTRIIQLRHLLKEAQRRGRVVKTWRNRLKNTTDYAVKVVAKEVASKAKKFKAGVAMEKLTFKPISKGYLIPRYRLMIAVKTLCEREGVPFKLVPARYTSITCPKCGYRDEKNRNDEWFKCLKCGYQTDADLAGAMNIALRALDGTADGAVNDVRHASRLKPRRLYASKAGCVAQPKAAMRDVS

SEQ ID NO: 61891 - protein, 1477 aa, Unknown
  Microbial source - Accession No. Ga0373637_0010996
MSPNATPPVTQRAYTLRLRRAPGRCPKCQNDTCDCWRDALWATHEAVNRGAKVFGDWLLTLRGGLHHTLADMEVPAKGKGSSRAPTQEERRHRRVLLALSWLSVEDEGGAPNGDGLRVTTGRYSDNDRREAVEAALREILEKRGVQPSEIEEWVRDCGPSLAARIRKDAVWVNRSALFDAVCGGQNVRQAREDARTLLWYLLTDHYLALPKTDKKQSEGSDEDQEDGEEKEPTVDAAAEAVAKSAKGAGQRTRHLFSHIFGRKSTQGFGKPRRKLDLREHWRGYLKPRIETAGIPLSDPDVKAKKKAALSPTEVHREMFSKAASRLAQTWTRQKQQEVARQLGAAADEELNKLEGDKAYCKALELLDAYCRERGQASGSLEEYRINPRAAEGWERVVVAWERINEADRAKATEKRIDEVKRLQSENFDKKFGDINLFVDLAEPEYEPVWQHNGQATPSILKTYVKGWKARTDAARLKVAAFRHPDPYFHPVFCQFGVSRPPIQYGRLGTNWDGDTRTVRMRVWNGSRAVDLPLLAVSKRFDAEIGSASESMEKAEPEVTRRSRLAIAAVPNGRIQGNRFRVASVFDQQDVRSRQKADNGTQEDTDDEDSRNGKDKEKKKEPTWNGTLQADRWALKSIGRLPCSDLQKKQQAKRRLQWRLTVALELQPIGPWYDYVRNAADPFPFQRTIRKNDKGIKRQKEKKYLSINGWPFEEINKPLRDGGAKLVVDKQSVRGRDANVILSRLPGLRILSVDLGHRFAAACAVWEALPKDKFEKEIANLEALAGGSGKDDLYLHVAKPGDDGKTRTVVYRRIGPDDLPDGKAHPAPWARLDRQFLIKLQGEDEEAREASNEEIWAVHQLEAELGRAVPLIDRMVRGGFGQKVEQKWRLEALRGLGWRPAATNVPPGAADEEEGEARKISRSVDELMSAAVRAMRRSLKRHGDRARIAFAMTADYKPMPGDRKYYFNEARDASRGDDAASRRGKRVEFLQDALSLWHDLFSSRGWKDDAAKVLWDEHIATLLGYQTPEETAENLTNVERKKKRKEYRDKLRAAAEALAVDDRRRAELHEAWKKRWESDDAQWNKRLRWFKDWILPRGKAKKDPGIRHVGGISLVRLATLTEFRRKVQVGFFTRLRTDGTRAEIEESFGRSALDALDRLREQRVKQLASRIVEAALGLGRVKTPKKGNTPKRPREAVDASCHAVVIESLTHYRPDDLRPRGENRQLMTWSSSKVKKYLAEACQLNGLHLREVPAGYTSRQDSRTGAPGIRCQDVPVKEFMQSLFWRKQVAQAEKKVTDGKGDACERFLVDLNAKWKDQTEAAWKSAGSVRIPLKGGELFVSADPGSPAAKGIQADLNAAANIGLRALLDPDWPGRWWYVPCKPGTSEPALDRIKGSAAFEGVQVLPADGAAPAGSEAGKRQPKKSKSKAPKKIEYLWRDPSGGVLAAGRWKQTQAYWNDVQYRAVQLLRKRAGLDSYG

SEQ ID NO: 61892 - protein, 1352 aa, Unknown
  Microbial source - Accession No. Ga0373637_0021496
MSNKTTNQKSIWSEFTKQYALNKTLRFELKPVGRTEDFLKQNKVFEKDKTIDDSYNQAKFYFDKLHQKFINESLSLNNAKAIDLKYFAEQFLKLKSQIQKLKSENKKEEVNKKEKEINNLRNDYYKKIKSLLDKKAKEWKEIYKKKEIKFSKSDLEQKGTDFLMKSGILGILKYEFPKEKEEEFKSKDYPSLFVADKANPGNKVYIFDSFDDFATYLIKFQETRKNLYKDDGTSTAVATRVISNFEKFFNNKKIFEDKYINYWKQVGITEEEKKIFEIDYYYSCFTQEGIDEYNKIIGQINQKSKQYRDKNKVEKSELPLFKVLDKQILGEVIKERELIVKTETETEEEVFIKRFKEFIDQNKQRIPKAQNLMNDLINEKFENEYSGIYLKNSAINTIANRWFKNAIEFLRKLPQASKSKENKESPKVKPFVSLLDIKDALDEFEKERESLGSIFKDKYYKTKESDEVPLNNDRESYWKQFLKILGYEFNQLFEDKFNEEGIKTFWGYTKDLEKEAENLNSFSRKKEEITVIKNYCDASLRIYQMMKYFTLEAKKQDDIPLDYSTEFYNRFNEYYQDFKFVHYYDAIRNFVTKKPSNEDKTKLNFESGSLLTGFDKNKESEKLGIILKNKNNNKYFLGIINKKHNKIFELKNENEFIGNPAKDLYEKMELKLFPDPKKMIPKIAFADKNKKYFGWIQEIQNIKKDFENFQKNKKGNQDLKFDKNKLSKLIEYYQNCLEKGNYKKEFDFEWKKPEEYQSMSEFNQDIEKKNYKIKFIPVKDSYIDDKVKNGELYLFEISNKDFIWLNQKKNIHTLYFLSLFSEKNIQKPIFRLGANAEIFYRQKSEKATKEKRGGKEIIKYKRYTEDKIFLHLPIEINYGCPKAPNKNQYNKKVIEFLNKNKDEINIIGIDRGEKNLLYYTVINQKGEILDHGSLNEINGVNYLEKLIEREKERQINRQSWEPVVKIKDLKRGYLSYVVRKIADLVEKYNGIIVLEDLNMRFKQVRGGIERSIYQQFEKQLIDKLGYLVFKDYRDSDAPGGVLNGYQLVAPFTTFKDLGKQTGIIFYTNAEYTSKTDPITGYKRNIYISNSTSQKKIKENLINKFRAIGWDEKEKSYFFTYNQKDFNSPISKEWTLYSKVPRVRREKNNSTGYWEYKPIDLNKEFEDLFKKYEINEKSKDILSEIKELIKNNENKLTQKQEFDKKNKNFYERFIYLFNLLLEARNTISLQIKLDKRGNEIKLDEIDYGVDFFASPVKPFFTTAGVRFVGKQIEGGKIQKEKKEKFAIKNFADFERLFKGCSSDGFDSDGIGAYNIARKGIIILERINQNPKNPDLYISKEDWNDFAIKNALVK

SEQ ID NO: 61893 - protein, 1485 aa, Unknown
  Microbial source - Accession No. Ga0373637_0024972
MSQNPAPPVTQRAYTLRLRRGPGKCPACQKDACDCWRDALWATHEAVNRGAKAFGDWLLTLRGGLCHTLADIDVPAKGKKPARNPTKQEQRDRRVLLALSWLSVEDERGAPNGDGLRIATGKEPADKRGEAVKAALRNILGNRGVNASEADSWVKDCEASLAASIRDDAVWVNRSAAFDAACNGQNLRQAREDARTLLWYLLTDDYLVLPKANKKESEDTGEDQEEGQDEESAVDEAAEAVAKSAKGAGQRTRHLFSHIFGRQSTQGFGKPPCQLDLRDYWQGHLKPLIEAAGIPLSDPNVTAKKGAAPSPTELHREMFSKAASRLAQIWTKQKQQEVARQLRAAADDELKELESDQTYSKALDLLEAYCRERGQITGSLEEYRINPRAVEGWERVVAAWEGIKSSDPTEAQQRRIDEVKRLQDESDDKKFGDNNLFVSLAEPEYEPVWQHKGQATPSVLKTFVKGWKARSDAARLKVAAFRHPDPYSHPVFCQFGVSRPWIKHGRLDPKGNAGTVQMLLWTGSKADKVQISAVSKRFDAEIGSASESTVIAARQVARRHRLAVAAVSTSGAGVNTIRVAHVFDQQEVRSRERAVEHGIEDENGDDESQNARKKGPIWNGTLQADRQALKAIGKLASSQKAPQAYRCLQWRLTVALELQSSGPWYDYVRNATDQSPFQRTVRKDEDKGKKRKKGTKYLFLDGWPFEEVNNPLKVNRVDTLLLADKRSARGREAKIVLSRLPGLRVLSVDLGHRYAAACAVWEALPNAAFKGEVAGLKVRAGGPGEDDLYLHVEKPGDDGKTKTVIYRRIGPDSLPDGQFHPAPWARLDRQFLIRLQGEDEEAREASNEEIWKVHQLEAELGRTVPLIDRMEKGTFGQTEKQKQRLEALRGLGWTPATTNVPPGAAGEEEGETRIVSRSVDELMFAAVRTMRLALRRHGDRARIAFAMTGDHKPLPGGRKYYFDEAKGASASDDEATRRSKRIEFLQDALALWHDLFSSRGWKDDAAKKLWEQSVATLSGCQTPEEIAEDLTAIKRKKKREENRDRLRAAAEARAAAEALAAAEALAADDRRRKELHDAWTKRWELDDAQWKRRLRWFKDWVLPRGKAGNDPGIRHVGGLSLTRLATLTEFRRKVQVGYFTRLHPDGMKRETRESFGQATLDALDRLRDQRVKQLASRIVEAALGIGRIKTPKGGKMPKRPGKAVDDPCHAVVIESLTHYRPDDLRTRRENRQLMTWSSSKVKKYLAEACQLNGLHLREVPAGYTSRQDSRTGAPGIRCQDVRVKEFMQSPFWRKQVAQAEKKRADGKGDARERFLFDLNTKWKSQTEAAWESAGSVRIPLKGGGLFVSTDPRSPAANGIQADLNAAANIGLRALLDPDWPGRWWYVPCKAGTSEPASERIKGSAAFKNVRGLPADGADRAGSEASTGQPRKNKGGASREIENLWRDPSSEGLAAGHWKQTQAYWNDVQYRAVQLLRKRARLDSDG

SEQ ID NO: 61894 - protein, 1289 aa, Unknown
  Microbial source - Accession No. Ga0373637_0031827
VWDILEPFFGTRAAYFAGLEDGEEEDEATHEEEEAKDLVQKAGQWLSARFGTGTGADFDAMAGAYKRIARWAVRASSDYPGKETIHRLATCLKLSGSCDLNGVLRVISGPGYKSATRNHLKTMYGKSKVAREDLDRLKELAEQDAAKCKGNVGRKGQRAWADLVLKDVEKACGFTYLQNDGPARHREFSVMLDHAARRVSIAHSWIKLAEQRRRQFESDAKKLNELRKRAANAVVWLDQFCADRSTATGADTEGGYRIRKRAVEGWTHVLKTWARPSCNTGEERIAAAREVQADPEIEKFGDIQLFEALATDEAVCVWRDQAGKPDASILIDYVVGTTAEHNQKRFKVPAYRHPDALRHPVFCDFGNSRWAIRFAIHDAVGARSKGKRAKTDTNWLQNRHGLRIGLWSGNSVGDVDLQWSSKRLTKDLALDDNPAATATSVTRADRLGRAASGAFGPAAIKNVFEEKDWNGRLQAPRAQLDRIAELEDRGHHAQAEGLRQRLRWLVSFSPRLRPSGPFIEYAASQGIEPNRKGEYYPNAPANKGREGLAKLILSRLPGLRVLSVDLGHRFAASCAVWEAVPNAAFKEEIAGLKVLAGGPGKDDLYLHVAQPGNDSKTRTVIYRRIGADNLPDGKAHPAPWARLDRQFLIKLQGEDEEAREASNQEIWAVHKLEAELGRAVPLIDRMVRGGFGETDNQKRRLEALRGLGWRPAATNVPPGMSDEEEGEARTISRSVDELMFSAVRAMRLALKRHGDRARVAFAMMAEFKPMPGDRKYYFNEARDASAGDDEQSRREKRVEFLQDALSLWHDLFSSRGWKDDAAKVLWDKRIATLPGYQTPEEIAEDLTGAERKKKRKENRDKLRAAAEALAADDQRREELHEDWKKRWESDDEQWNNQLRWFKDWVLPRGKAGDDPGIRHVGGLSLARLATLTEFRRKVQVGFFTRLHPDGTKPEIKESFGQATLDALDRLREQRVKQLASRIVEAALGIGRIKIQKEGKSPKRPRMAVDTPCHAVVIESLTHYRPDDLRTRRENRQLMTWSSSKVKKYLAEACQLNGLHLREVPAGYTSRQDSRTGAPGIRCQDVPVKEFMQSPFWRKQVAQAEKKGADDKGDARERFLVDLNAKWKGQTEAAWKSTGSVRVPLKGGELFVSADPRSPAAKGIQADLNAAANIGLRALLDPDWPGRWWYVPCKAGSSEPSPDRIKGSEAFQGVQSLPADGAAPAGSKAGIGHSKKNKGKTPKEIENLWHDPSSEGLAARHWKQTQAYWNDVQYRAVRLLRKRAGLDSDG

SEQ ID NO: 61895 - protein, 553 aa, Unknown
  Microbial source - Accession No. Ga0373637_0034837
MPFGRTAGPTIVYKYGAKKPTTNAEAILEQLRKAHQYRNKLVEIELQRRKLVEEAVKNIESDVRHLANKLEQLELDIDYTVRKINNHKQKNHTRTTPAELKEHLKSLKTQYREALRQMKEAKKAAYARPETQEALNRIAGKVRAEHKKARNLCGLYWGTYCHVEQITTHIRKGPPPKFRRFAGSGVLAVQLQKGEDIARLESGEDRRIRIEGCGKRRILWLRIGSDENRYPIWATIPFTYHREIPSDAKIKWVKIKAQRIACQTEWEVLFTLERSSGWKKPDLAQDGVVAIDIGWRNFDDRIRVAYWIGSDGCEGEVALPHNMVGKALEQVEHLRSLRDKNFNEIKQQLLDAIGVLQIPEWLKEATKTLHQWRSQGRLAALAIRWRQQRFDGDNDIFALLETWRVRDKHLYEWEAHLRVKAIRRRNDYFANVVANLSRRYKTAIVEDFDLRSVTQVDPTQTEQVGDGRQLYRAHIAAAGGLRQMIKNRFAETQIVSSVLTTQTCTECCEVMNFAAAESVFGKCPHCGHTFDQDRAAAINLMRRYEERLVAANS

SEQ ID NO: 61896 - protein, 1209 aa, Unknown
  Microbial source - Accession No. Ga0373637_0065620
MKHNSTFENFTGKYSLSKTLRFELVPQGKTKETFSKWIKELENQTADEKKNLLHQDIMRAQKYEKVKKILDEYHKDFIEQALSALGKAKLQGLDEYKRLYDIKKKEKKEAEEFENIKTSLRKQISKALKAHSGFTMLNKDDLFKGKKNSDDGRLLQKFLNDNHKVKQDLEATLRENENDHINLFDLLKSFESFTTYFKNFHENRKNLYSDEDKFSTIAHRLVHENLPKFIDNIRIYEKAKTAGLNVDAIQEQLQQERLLDDIFSIEYFNETLTQQGIDDYNYILGGRAVDPGKPNIRGVNSFINNDINQKAENNKDRIPVMKPLYKLPLFERTSSSFRFDPIENDADLIQRIKSFYYHELLQYREETESEAEPLNILARLKELLKSITDFRDGLYVNGGLTLTQISAKIFGNWNYIGNALSDYYDKHVDPPKPDKKGNPKPVTKKQEEAKRKWLKQKQFPVSLIEKALSEYRKKETNEEVKSKITDTTLCDFFKKCGANEDGKNDLFARVEFKLTDKNEKGETLEELLNTDFASDKKLMQDKPKTLLIKNFLDALQGNFDDISAGLLHFIKVLKPREEVSDKNETFYSEFEKYYKALSEVTPLYNKARNYLTQRPYSVEKVKLNFENSTLLDGWDENKEADNSCVLFRKDGFYYLGIMDKNHRNIFKEYPKANHGESSYEKMIYKLLPGANKMLPKVFFADSNLQHFNPPEDILRIRNTASHSKNGNPQEGFVKAPFSQADCHKYIDFCKASIAKHWDWNSFGFVFSPTNQYADSSDFYKEIERQGYKITFAHVPESYINQLVDDGKLFLFKIWNKDFSLNKKVQNRNSKPNLHTLYWRLLFDNRNLSDITLKLNGEAEIFFRKKSIPEDKLTVHEKGKPIENKNPFNKKKESVFDYDIIKDKRFTVDTFHFHVPMTLNFGADGSDNINSEINAFLQNNHDINIIGIDRGERHLLYYSLINQKGEILKQHTLNLLGNQNYRDLLDKREGDRDEARKTWNLIENIRNLKEGYLSHVVHEIAKLMIEYNAIIVMEDLNFGFKRGRQKVEKQVYQNFEKMLINKLNYLVFKDRQPDKPGGVLRAYQLANKFESFKKLGKQSGVVFYVPAAYTSAIDPITGFVNFLQPLKADSIEKSKKFYGKFKSIRFNPEKQWFEFDFDYTDFIDKAVGKTNWVACTTNTERYAWNKSLNNGKGDQELVRVTQELEVLFGD

SEQ ID NO: 61897 - protein, 605 aa, Unknown
  Microbial source - Accession No. Ga0374803_055
MRYRNSRDVVGKVKSVTVSKHAGKWFVSIQTEREVDRPIPQGGAVGMDMGIARLATLSDGTFYAPLNSFKRHEARLRKAQQALSRKVQFSNNWKKAKARLQRIHSQMANARRDFLHKVSTAICKSHAMVCIEDLQVRNMSKLAAGTADAPGKNVRAKSALNKAILDQGWYEFRCMLEYKLAWKGGRLIVVPPQNPSRTCPCCGHVSSDNRQTQAWFECVACGYENNADRGSGPEAFRGSGPEAFRGSGPEAFRGSGPEAFLVGAINILACGIQLLRDEGQDTTDAAVGMRVGEPPVSARMACGSNRTGGRKQEPAETTAQGAIHAQRGRNLQPSGRGGCQHSLPSGSAQVRIKKQRSHPQAHFCLPVNPVRTLSATKAAFFSAYPRPINAVYRRVVEELLVELHLTTVNSTFVYDPFFALGLVTLYDGLMEAYHPPEQREAIFNALCKALHLKPEVLRKNARDLLELMGSGDPRQRLDLLCLKPEAEDVGGLKAILERMTQPPYAYSRVLAVGLYTAYEVVAKSLYEEPEERTRRFLENVVSKLPFSTERVRKDLELYRSSLDRMKQARAVVEEMVKAARRQQERRQSAASLPETSLGDPSKPGS

SEQ ID NO: 61898 - protein, 676 aa, Meiothermus silvanus
LRSGCISSRPQRRWFAWLWPGRWTRRVPSPLPWRQAPRNEPWSKLRGWKEIATTRQPWPTWWPGWPTRATPKPDGTWPRAFWPGFLGTGFARTEGKPPLQRAGEQGAPIELAFQSPTGLLALPDPSIPQRTFGSSKEGGEMPFGKKARHVKAYQFGADAPQEGMEAVLEQHRLRTDYYNALVEMELRQREERTALLANLAAESGLESPNQVYERLKAAGEKGIRKHPEYVAARERQKALYGHPRLLELQSRQREERNALRRSFGAKGLYSSNYLDVERAFDKARQSPELRFRRYSPHEGRLAVLYTEGLPMREIGSDTRVQLPLPDPIIYRDRATRRKHQRVLMKFRVRSVERQPLWITVPVYLHRELPDGVCREVSLHWHRVADRLRWTVSVVVEVEGPPVASPTGRGAVAVDLGWRRVEGGLRAGFWVGEDGAGGEIALSEGDLKQFSKVEDLRSIRDQHLNALKEALAAWLEAPPAPLPDWLAEETKTLPQWRSPARFAALFRRWQSERVHADEAAYGLLEGWHKRDRHLWQYEANLREQMILRRREQYRVLAATLARQYDALIVEDFNLRAAAELDQGGSDLPDAARRYRTIASPSTLRDALVNAFAQRGKPVRKLNPAHTTTDCHACGGALVGDPAKELRLYCPTCERFYDQDENAARNLLRRAQEVQAQV

SEQ ID NO: 61899 - protein, 447 aa, Alicyclobacillus acidoterrestris
MIVKTMPYEIIKPLSCDWAVFGEMLRRLRDESFRIKNSAIQYFYEDDIKRREFKKNNGRFPKKGEFYGSSVSVYNYVRPDVKYSAMGNVTLINQLVKSVWIKYKDDVVKRNMSIPSYRPNNPIEINVQSFNSFDFGQACVNLLSRKGVEELKKKLSEVKKKKNKTGGDDNLKFTQEQLNGISTSVTFAFNPGKNNAKQVLNRIISGEYKLSSSKIIYNERKNKWMLAVAYKFEPKTIELDKNRVLGIDMGVVYPAYMAVNYDKYWRDSIDGGQIEQYRKTVEARRRRLQRQAAVCGNGRIGHGRKKRMQPLEKISDKVANFRNTVNHTYAKKIVQNAVKLGCGTIQMEELSGINEKETFLKRWTYFDLQKKIEYRAKEYGIDVIKINPKYTSQRCSECGYIDERNRPKVPDQSKFKCLSCGYETNADFNAARNIATPYIDKIISLNS

SEQ ID NO: 61900 - protein, 1129 aa, Alicyclobacillus acidoterrestris
MAVKSIKVKLRLDDMPEIRAGLWKLHKEVNAGVRYYTEWLSLLRQENLYRRSPNGDGEQECDKTAEECKAELLERLRARQVENGHRGPAGSDDELLQLARQLYELLVPQAIGAKGDAQQIARKFLSPLADKDAVGGLGIAKAGNKPRWVRMREAGEPGWEEEKEKAETRKSADRTADVLRALADFGLKPLMRVYTDSEMSSVEWKPLRKGQAVRTWDRDMFQQAIERMMSWESWNQRVGQEYAKLVEQKNRFEQKNFVGQEHLVHLVNQLQQDMKEASPGLESKEQTAHYVTGRALRGSDKVFEKWGKLAPDAPFDLYDAEIKNVQRRNTRRFGSHDLFAKLAEPEYQALWREDASFLTRYAVYNSILRKLNHAKMFATFTLPDATAHPIWTRFDKLGGNLHQYTFLFNEFGERRHAIRFHKLLKVENGVAREVDDVTVPISMSEQLDNLLPRDPNEPIALYFRDYGAEQHFTGEFGGAKIQCRRDQLAHMHRRRGARDVYLNVSVRVQSQSEARGERRPPYAAVFRLVGDNHRAFVHFDKLSDYLAEHPDDGKLGSEGLLSGLRVMSVDLGLRTSASISVFRVARKDELKPNSKGRVPFFFPIKGNDNLVAVHERSQLLKLPGETESKDLRAIREERQRTLRQLRTQLAYLRLLVRCGSEDVGRRERSWAKLIEQPVDAANHMTPDWREAFENELQKLKSLHGICSDKEWMDAVYESVRRVWRHMGKQVRDWRKDVRSGERPKIRGYAKDVVGGNSIEQIEYLERQYKFLKSWSFFGKVSGQVIRAEKGSRFAITLREHIDHAKEDRLKKLADRIIMEALGYVYALDERGKGKWVAKYPPCQLILLEELSEYQFNNDRPPSENNQLMQWSHRGVFQELINQAQVHDLLVGTMYAAFSSRFDARTGAPGIRCRRVPARCTQEHNPEPFPWWLNKFVVEHTLDACPLRADDLIPTGEGEIFVSPFSAEEGDFHQIHADLNAAQNLQQRLWSDFDISQIRLRCDWGEVDGELVLIPRLTGKRTADSYSNKVFYTNTGVTYYERERGKKRRKVFAQEKLSEEEAELLVEADEAREKSVVLMRDPSGIINRGNWTRQKEFWSMVNQRIEGYLVKQIRSRVPLQDSACENTGDI

SEQ ID NO: 61901 - protein, 1108 aa, Bacillus thermoamylovorans
MATRSFILKIEPNEEVKKGLWKTHEVLNHGIAYYMNILKLIRQEAIYEHHEQDPKNPKKVSKAEIQAELWDFVLKMQKCNSFTHEVDKDVVFNILRELYEELVPSSVEKKGEANQLSNKFLYPLVDPNSQSGKGTASSGRKPRWYNLKIAGDPSWEEEKKKWEEDKKKDPLAKILGKLAEYGLIPLFIPFTDSNEPIVKEIKWMEKSRNQSVRRLDKDMFIQALERFLSWESWNLKVKEEYEKVEKEHKTLEERIKEDIQAFKSLEQYEKERQEQLLRDTLNTNEYRLSKRGLRGWREIIQKWLKMDENEPSEKYLEVFKDYQRKHPREAGDYSVYEFLSKKENHFIWRNHPEYPYLYATFCEIDKKKKDAKQQATFTLADPINHPLWVRFEERSGSNLNKYRILTEQLHTEKLKKKLTVQLDRLIYPTESGGWEEKGKVDIVLLPSRQFYNQIFLDIEEKGKHAFTYKDESIKFPLKGTLGGARVQFDRDHLRRYPHKVESGNVGRIYFNMTVNIEPTESPVSKSLKIHRDDFPKFVNFKPKELTEWIKDSKGKKLKSGIESLEIGLRVMSIDLGQRQAAAASIFEVVDQKPDIEGKLFFPIKGTELYAVHRASFNIKLPGETLVKSREVLRKAREDNLKLMNQKLNFLRNVLHFQQFEDITEREKRVTKWISRQENSDVPLVYQDELIQIRELMYKPYKDWVAFLKQLHKRLEVEIGKEVKHWRKSLSDGRKGLYGISLKNIDEIDRTRKFLLRWSLRPTEPGEVRRLEPGQRFAIDQLNHLNALKEDRLKKMANTIIMHALGYCYDVRKKKWQAKNPACQIILFEDLSNYNPYEERSRFENSKLMKWSRREIPRQVALQGEIYGLQVGEVGAQFSSRFHAKTGSPGIRCSVVTKEKLQDNRFFKNLQREGRLTLDKIAVLKEGDLYPDKGGEKFISLSKDRKLVTTHADINAAQNLQKRFWTRTHGFYKVYCKAYQVDGQTVYIPESKDQKQKIIEEFGEGYFILKDGVYEWGNAGKLKIKKGSSKQSSSELVDSDILKDSFDLASELKGEKLMLYRDPSGNVFPSDKWMAAGVFFGKLERILISKLTNQYSISTIEDDSSKQSM

SEQ ID NO: 61902 - protein, 1076 aa, Sulfobacillus thermotolerans
MSARNIKVKIDTKGNPELRLGLWKTHQVTNEGVKYYTEWLIKLRQQDIYRQSREDASPRVIISASDLKADLLCHARQLQKERLPRITGSDAEILGTLRQVYELIVPSSVGKSGDSKTLARKFLSPLTDPGSAGGRDQSASGRKPTWMKMKSEGNPRWEETFRKWKDRKDNDPTPLVLNQIADYGLLPLIPLFTDVGENIFDPKSKSQFVRTWDRSMFQQAIERLMSWESWNQRVRREWEALNQKHSAFYREQFTADPDAALYRVAQSLEEEMRKEHQGFASDAPEAFRIRRVALKGFDRLLERWQKTLGKNGQSATLLDDIRRVQSDLGDKFGSAPLYQKLLDERWQRLWAVDPTFLQRYAAFNDLTQRLQRAKRVANLTLPDAVAHPIWSRYEGANASSGNRYHIHLPTKGQPGSVTFDRILWPDGNGGWYERKRVTVFLRPSHQVDRIHEAPTDSVVDNFPLVVEDQSARTILRASWGGAKLEYDRNRLPRQLKKGVPDSIYLSLTLNLDTNKPSGLFHTQQNGRVWIRKDVLMQYYNETPGDNVQFKPLYVMSVDLGIRSAAAVSIFSVQLKAGIEEHRLTYPVADCPGLVAVHERSVLLTMPGERREQWDRRYEQQRQGLRELRTDMRGMNDLLRGAYMDGDRREEFLARLSKLEETSPELWGPVYRSLNDSKVASATEWERLVVYCHRQVEQSLSSRIQNLRSGRSAYRMSGGLSLDHVQDLERIRGIIASWTNHPRIPGSVVRWQQGRSHTVALGRHILELKRDRVKKVANYLIMTTLGYAYDSKRARGEKWVRRYPACHLMVFEDLTRYRFRTDRPRSENRQLMRWTHQELIAVTGIQAEPHGISVGTMYAGFSSRFDAVTKAPGVRGATVRQILRTRGMVRLKEIAADVGIDINTLRPHDVLPTGDGEYLLSVVRHGESYRLKQVHADINAAHNLQRRLWTQDEVFRVSCRLALNSGRVVAMPPPSYNKRYGKGFFEKGDNGVYIWKTGGKIKISDTLEEDMDIPEDTAELLRGNSVTLFRDPSGTIAGGNWLEAKEFWGRVNSLVNKGVRDKILGGIPVDNSSAHAE

SEQ ID NO: 61903 - protein, 1090 aa, Laceyella sacchari
MSIRSFKLKLKTKSGVNAEQLRRGLWRTHQLINDGIAYYMNWLVLLRQEDLFIRNKETNEIEKRSKEEIQAVLLERVHKQQQRNQWSGEVDEQTLLQALRQLYEEIVPSVIGKSGNASLKARFFLGPLVDPNNKTTKDVSKSGPTPKWKKMKDAGDPNWVQEYEKYMAERQTLVRLEEMGLIPLFPMYTDEVGDIHWLPQASGYTRTWDRDMFQQAIERLLSWESWNRRVRERRAQFEKKTHDFASRFSESDVQWMNKLREYEAQQEKSLEENAFAPNEPYALTKKALRGWERVYHSWMRLDSAASEEAYWQEVATCQTAMRGEFGDPAIYQFLAQKENHDIWRGYPERVIDFAELNHLQRELRRAKEDATFTLPDSVDHPLWVRYEAPGGTNIHGYDLVQDTKRNLTLILDKFILPDENGSWHEVKKVPFSLAKSKQFHRQVWLQEEQKQKKREVVFYDYSTNLPHLGTLAGAKLQWDRNFLNKRTQQQIEETGEIGKVFFNISVDVRPAVEVKNGRLQNGLGKALTVLTHPDGTKIVTGWKAEQLEKWVGESGRVSSLGLDSLSEGLRVMSIDLGQRTSATVSVFEITKEAPDNPYKFFYQLEGTEMFAVHQRSFLLALPGENPPQKIKQMREIRWKERNRIKQQVDQLSAILRLHKKVNEDERIQAIDKLLQKVASWQLNEEIATAWNQALSQLYSKAKENDLQWNQAIKNAHHQLEPVVGKQISLWRKDLSTGRQGIAGLSLWSIEELEATKKLLTRWSKRSREPGVVKRIERFETFAKQIQHHINQVKENRLKQLANLIVMTALGYKYDQEQKKWIEVYPACQVVLFENLRSYRFSFERSRRENKKLMEWSHRSIPKLVQMQGELFGLQVADVYAAYSSRYHGRTGAPGIRCHALTEADLRNETNIIHELIEAGFIKEEHRPYLQQGDLVPWSGGELFATLQKPYDNPRILTLHADINAAQNIQKRFWHPSMWFRVNCESVMEGEIVTYVPKNKTVHKKQGKTFRFVKVEGSDVYEWAKWSKNRNKNTFSSITERKPPSSMILFRDPSGTFFKEQEWVEQKTFWGKVQSMIQAYMKKTIVQRMEE

SEQ ID NO: 61904 - protein, 351 aa, Tepidiphilus succinatimandens
MTNIAQRLLVGNGRQHLVRRRLRRRDAAGGKHILDGRDDLFEKPRPAEYVAAAQAHLPLGVRLRRGGHFESDRHDGIEFEKVRDIVDEGQRLAGVDETDRRCIACGKHRRFGDAVERCGGSRQAAIGSVGGLPGFGIVVTMHPAHFVAFGQPLVHFAHARPLDAAKLLDGASLRRLLTEANGEHAAHDFEAQLIVQGELCLIQQPVGTGTARLPGRIEANAGLTHPNEQGTHPRRERAGGMRDARAGLQHQAGHAAHGDMGAHPVDIHDDESAVEYANPAYTSQTCSCCGELGKRSKHRFECPHCGLRAHSDLNASRNLARIGSGAPLSRAVVNTPDVGSVDMGNHVCASQ

SEQ ID NO: 61905 - protein, 352 aa, Tepidiphilus succinatimandens
MTNIAQRLLVGNGRQHLVRRRLRRRDAAGGKHILDGRDDLFEKPRPAEYVAAAQAHLPLGVRLRRGGHFESDRHDGIEFEKVRDIVDEGQRLAGVDETDRRCIACGKHRRFGDAVERCGGSRQAAIGSVGGLPGFGIVVTMHPAHFVAFGQPLVHFAHARPLDAAKLLDGASLRRLLTEANGEHAAHDFEAQLIVQGELCLIQQPVGTGTARLPGRIEANAGLTHPNEQGTHPRRERAGGMRDARAGLQHQAGHAAHGDMGAHPVDIHDDESAVEYANPAYTSQTCSCCGELGKRSKHRFECPHCGLRAHSDLNASRNLARIGSGAPLSRAVVNTPDVGSVDMGNHVCASQY

SEQ ID NO: 61906 - protein, 1144 aa, Alicyclobacillus macrosporangiidus
VAVKSIKVKLMLGHLPEIREGLWHLHEAVNLGVRYYTEWLALLRQGNLYRRGKDGAQECYMTAEQCRQELLVRLRDRQKRNGHTGDPGTDEELLGVARRLYELLVPQSVGKKGQAQMLASGFLSPLADPKSEGGKGTSKSGRKPAWMGMKEAGDSRWVEAKARYEANKAKDPTKQVIASLEMYGLRPLFDVFTETYKTIRWMPLGKHQGVRAWDRDMFQQSLERLMSWESWNERVGAEFARLVDRRDRFREKHFTGQEHLVALAQRLEQEMKEASPGFESKSSQAHRITKRALRGADGIIDDWLKLSEGEPVDRFDEILRKRQAQNPRRFGSHDLFLKLAEPVFQPLWREDPSFLSRWASYNEVLNKLEDAKQFATFTLPSPCSNPVWARFENAEGTNIFKYDFLFDHFGKGRHGVRFQRMIVMRDGVPTEVEGIVVPIAPSRQLDALAPNDAASPIDVFVGDPAAPGAFRGQFGGAKIQYRRSALVRKGRREEKAYLCGFRLPSQRRTGTPADDAGEVFLNLSLRVESQSEQAGRRNPPYAAVFHISDQTRRVIVRYGEIERYLAEHPDTGIPGSRGLTSGLRVMSVDLGLRTSAAISVFRVAHRDELTPDAHGRQPFFFPIHGMDHLVALHERSHLIRLPGETESKKVRSIREQRLDRLNRLRSQMASLRLLVRTGVLDEQKRDRNWERLQSSMERGGERMPSDWWDLFQAQVRYLAQHRDASGEAWGRMVQAAVRTLWRQLAKQVRDWRKEVRRNADKVKIRGIARDVPGGHSLAQLDYLERQYRFLRSWSAFSVQAGQVVRAERDSRFAVALREHIDNGKKDRLKKLADRILMEALGYVYVTDGRRAGQWQAVYPPCQLVLLEELSEYRFSNDRPPSENSQLMVWSHRGVLEELIHQAQVHDVLVGTIPAAFSSRFDARTGAPGIRCRRVPSIPLKDAPSIPIWLSHYLKQTERDAAALRPGELIPTGDGEFLVTPAGRGASGVRVVHADINAAHNLQRRLWENFDLSDIRVRCDRREGKDGTVVLIPRLTNQRVKERYSGVIFTSEDGVSFTVGDAKTRRRSSASQGEGDDLSDEEQELLAEADDARERSVVLFRDPSGFVNGGRWTAQRAFWGMVHNRIETLLAERFSVSGAAEKVRG

SEQ ID NO: 61907 - protein, 601 aa, Tepidibacter thalassicus
MIRTIQVKLHNLSNYKQNLLDNLFQNYTKAYYEMLNYAKENLDVIEKDYKLKNGSYKGETIAKFFKGTEIHKKYNLEPLGDSLKKDVGCSIASYLELKQANADVSFPETNKDRINVLYEKINELLNEISFNTSLSKEQCHNLEQEIKNLYRKINNINKYRPISFARYDFNRDACLLYNPKKNSYYAKLYVFNKITSKEHVKLYKQKSIKHKDDIKLYYLPTLEIYKENRSIAYIIVPLAFGKWHERFLKQARKRKMKFCAMKLIKRGEDFYLDIPLNEDIETRAEKKKRYEEQNKNGEVLRKIKKKKKEFKNKLGIDLGITNIATIAVLDKDNNLLFSKQFNGNEYKEKFEIFVKKLAIMQMHGSSKYPRDKKYISGILHRVANEIIDLSKKYEAQIYLEDLNIDKSHERIKSTKKFENLPNKLVKRVVKNINRWAYGQMYRILVEKCEREGLPKLIRLNPRYTSENCSRCGHNEKVVSKGERVNRESQERFVCKNCGLQINADVNAAINIATKYSKVVSFKSKEVNGYKVINHELFDFKGIGKDNIEALNDFINKLREYKKEYDKIPFEIRKSDKKLRGQYKILKDVDREDYENYYNVED

SEQ ID NO: 61908 - protein, 660 aa, Unknown
  Microbial source - Accession No. JGII2383J13903_1002647
PKATSERTYRKINYKLLPGASKMLPKVFFSDKNTSYFSPDEEIQRIRNHGTHTKNGDPQEGYEKLDFNLNDCHKMIDFFKSSIQKHKDWKNFGFRFSPTYTYDSIDAFYREVEAQGYNITFTEIDESIIDRFVEEGKLYLFRIHNKDFSPFSKGRPNLHTLYWKAIFSPENLKNVIYKLNGQAEVFYRRKSIQPEQMVIHKSGEAIDNKNPLTGKKQSTFHYDLIKDKRYTVDKFQFHVPITLNFKASESNIINYEVLQYLRTQPDVHIIGLDRGERNLIYLSLINQKGELLYQEPLNALKSDKFNVVTNYQELLARREKERDMARKSWGTIENIKELKEGYLSGVVNKIATLMVKHNAILVMEDLNTGFKRGRFKIERQVYQKLEKMLIDKLNYLVFKDKSEDEPGGLFKALQLTNKFKSFKEIGKQNGFIFYVPAWNTSKIDPTTGFVNLFYIHYENMEKARAFFGKFQSISYNHDKGYFEFAFDYNDFTTKAEGCRTNWTVCTHGDRIRAFRNPEKNHQWDYKTIHITEEFMALFRKYGIEFSGNKDLREIITGQKDAAFYKSLLDLFRLTLQMRNTNQDWDYLISPVLNENGEFYDSRKADNHLPQDADANGAFHIAKKGLMWLKQIQQFEGDNWKKLDLDKTNKGWLRFAQGYQF

SEQ ID NO: 61909 - protein, 1151 aa, Unknown
  Microbial source - Accession No. JGI24108J20142_1001595
MPQQDKPPVTRRAYTLRLRGTDPSNTSWRKALWQTHEGVNKGAKKFGDWLLTLRGGLDHTLADAKVKVGKGKPDRDRTDEERKARRILLALSWLSVESKIGAPVGHIIASGEEVAEDRNSKVVAALEEILKSRGLANSEIKEWKNDCSASLSAAIRDDAVWVNRSKAFDDAVKSTVGSSLTREEAWDMLERFFGSRDAYLAPVKISEDESSEVEQEEKAKDLVQKAGQWLSSRFGTGKGADFSHMAKVYERIAAWTDNAQVGTTGNEAINNLAVALSEFIPASEDLKGVLGLISGPGYKSATRNLLKGLDTKTAVTQQDLESLKDKATTDSLKCEQNTGSKGQRPYSDAILNGVEAACGFTYLQDGGSARHSEFAVMLDHAARRVSLAHTWVKRAEAERRRFEEDAKKIAKVPTPARNWLDSFCLERSLASGALEPYRIRRRALGGWKEVVAAWAKSSCSSCEDRISEARKLQDDPEIDKFGDIQLFEALAEDDALCVWHKDGYPAKATDPQPLIDYVLATEAEFKKRDFKVPSYRHPDALLHPVFCDFGNSRWDICFEIHKNRQSPNPNALSVTLWTGSEIKPVSLRWQSKRLARDLALDQEAQGNGASEVTRADRLGRAASNVTKNDEVNIAGLFEQKDWNGRLQAPRQQLEAIAAVRDNLSLSAEERNRRMSGMMDHIRWLVTFSAKLQPKGPWLDYATTNDLKLDQKNGEIVATPSNSKNEWRGLAYPFWHSDNQEGRKGLAKHCLSRLPGIRVLSVDLGHRHAAACAVWEAVSAEQVKKACQIAGHEAPKASNLYLHLKRKATKQKKDNQVVIEETTVYRRIGADTLPDGTQHPAPWARLDRQFLIKLQGEEEGVRKASDEEVREVYQLEAEVGRTAPMDADDGEVRKPSLPVDELMSSAGRTMRLALKRHGDRARIAHYLITNEKIKPGGIKEKLDEEGRVDLLLDTLVMWHNLFSFHGWQDDEARQLWDNHVAKLSGYKAPERIGEECSGKSRKNKQQENREKLRDAAKALAKDITLRKALHEAWKKRWEDDDERWKKQLRWFKDWILPRGKHASDPTIRKVGGLSLTRLATLTEFRRKVQVGFFTRLQPDGTKAEIKERFGQSALDALEHLREQRVKQLASRITEAALGIGRMRRPAGGKDPK

SEQ ID NO: 61910 - protein, 625 aa, Unknown
  Microbial source - Accession No. JGI24721J44947_10029740
MLALKLKIMPTEKQAEILDAMFWKWASICSRIAKMKKKVSVKENKKELSKKIPSNSDIWFSKTQLCQAEVDVGDHKKALKNFEKRQESLLDELKYKVKAINEVINDESKREIDPNNPSKFRIKDSTKKGNLNSPKFFTLKKWQKILQENEKRIKKKESTIEKLKRGNIFFNPTKISLHEEEYSINFGSSKLLLNCFYKYNKKSGINSDQLENKFNEFQNGLNIICSPLQPIRGSSKRSFEFIRNSIINFLMYSLYAKLFGIPRSVKALMKSNKDENKLKLEEKLKKKKSSFNKTVKEFEKMIGRKLSDNESKILNDESKKFFEIIKSNNKYIPSEEYLKLLKDISEEIYNSNIDFKPYKYSILIRKPLSKFKSKKLYNLKPTDYKYYLQLSYEPFSKQLIATKTILGIDRGLKHLLAVSVFDPSQNKFVYNKLIKNPVFKWKKRYHDLKRSIRNRERRIRALTGVHIHENQLIKKLKSMKNKINVLYHNVSKNIVDLAKKYESTIVLERLENLKQHGRSKGKRYKKLNYVLSNFDYKKIESLISYKAKKEGVPVSNINPKYTSKTCAKCLLEVNQLSELKNEYNRDSKNSKIGICNIHGQIDADLNAARVIALCYSKNLNEPHFK

SEQ ID NO: 61911 - protein, 1317 aa, Unknown
  Microbial source - Accession No. JGI24721J44947_10039167
  misc_feature (1191)..(1191): Xaa can be any naturally occurring amino acid
  misc_feature (1193)..(1193): Xaa can be any naturally occurring amino acid
MPQQPTTQRAYTLRLRGADPNETSWREALWQTHEAVNKGAKVFGDWLLTLRGGLDHALADTKVKGKKGKPDRDPSAEERKARRILLALSWLSVESKLGAPADFIIASGEETAEARNAKVIAALEEILRSRDVAEEAIGDVTKKPEDQPGTWIGDCAPSLTAAIREDAVWVNRSKAFDEAVKSIGSSLTREEAWDMLERFFGSRDAYLAPAKGSEDESSETEQEDKTKDLVQKAGQWLSSRFGTGKGADFCRMADVYKKIAEWADNAQADTTGNDAINNLAAFLSEFNPASNDLKGVLGLISGPGYKSATRNLLTQIAAKATVTQQDLARLKDTATEDARKCYQNTGSKGQRRYADSILKDVESVCGFTYLQEGGPARHSEFAVILDHAARRVSLAHTWIKRAEAERRKFEEDAKKIGQVPKAAKDWLDQFCLERSGVSGAQEPYRIRRRAVDGWKEVVTAWSKADCKTAEDRIAAARALQDDPEIDKFGDIQLFEALAEDDAVCVWHKDGDAAKTPDPQPLIDYALAAEAEFKKRHFKVPAYRHPDALLHPIFCDFGKSRWDICFDVHKNTKTPFPRTLCLTLWTGSEMVSVPLCWQSKRLARDLALDHGRQDLGSPKVTRADRLGRAASNVTENDEVKIAGLFEQADWNGRLQAPRQQLEAIARYVAKNGWDEKAKKMRDAIQWLVTFSAKLQPNGPWCAYAEEHNLNKDPQYWPHADTNKDRKSHARLILSRLPGLRVLSVDLGHRYAAACAVWEALSDKAFKEDLEGKKIIRGGTSDNSLYCHTEHEVNGKKHITIYRRIGADTLPDGTPHPAPWARLDRQFLIKLQGEEEGVREASNEEIWQVHQMECTLGRKTPLIDRLVAAGWGSTEKQKARLDALKNLGWKPVEKAETSEDADTEEEELSFRPSLSVDELMSSAVRTMRLGLKRHGDRARVAYYLITDEKTKPGGIKEKLDENGRIDLLQDALVIWHDLFSSRGWRDDAAKRLWDENIARLCGYKAPEEIGENASGVERKTKQKENREKLHGVAKALAQDVTLRKALHDAWKKRWEEDDGRWKKQLRWFKDWVLPRGKHASDPTIRKVGGLSLTRLATLTEFRRKVQVGFFTRLHPDGTRAETGEKFGQSALDALEHLREQRVKQLASRIVEAALGIGRMKRPAKGKDPKRPEVRVDEPCHAIVIEDLTHYRPXEXRTRRENRQLMDWASSKVKKYLSEACQLHGLHLREVSAAYTSRQDSRTGAPGIRCEDVPVKDFLNLPFWKKEVKSAESKDDAQSKYFIALCEKASVMTEEEKKKTSFRIPRRGGEIFVSADETSP

SEQ ID NO: 61912 - protein, 430 aa, Unknown
  Microbial source - Accession No. JGI26463J51803_1000081
MGRVNRYRVLREAQGFRALRILADRVSRLWNAAQFLSRQRYLAGEPVPSYAELCATFQAHESYKALPSDVAQETLKKVRESWKAYFEALRAYREGRVHNPPGLPGYWKDRKTGHRLVRCIPIKHPRSYRVADGILEIPLPPDLRGPEGTRLRLRIRGAKRWHGKEGRLELVWDSARRAWYASQSVEVQCTAHTERPRKFAAVDRGARVPVALAVEGSQEAWVFRSRELWKDYRNLAGRIYRLQALLATRGQHTSRKLRRLFGRRRERVLAAYRALARTVVRILQKTKVTDLLVGDLTGIREDMDFGKLNELVHNFWSFRELASALLDACERAGIRVHLVPEQGTSSHCAVCGQNVVRPLRSRVRCPAGHEIHADVNGALNLLYREPEVRARAEGRPRWCTYRWNGHRWVPTESARRSAQDPGSLQAAPAA

SEQ ID NO: 61913 - protein, 1489 aa, Desulfatirhabdium butyrativorans
MPLSNNPPVTQRAYTLRLRGADPSDLSWREALWHTHEAVNKGAKVFGDWLLTLRGGLDHTLADTKVKGGKGKPDRDPTPEERKARRILLALSWLSVESKLGAPSSYIVASGDEPAKDRNDNVVSALEEILQSRKVAKSEIDDWKRDCSASLSAAIRDDAVWVNRSKVFDEAVKSVGSSLTREEAWDMLERFFGSRDAYLTPMKDPEDKSSETEQEDKAKDLVQKAGQWLSSRYGTSEGADFCRMSDIYGKIAAWADNASQGGSSTVDDLVSELRQHFDTKESKATNGLDWIIGLSSYTGHTPNPVHELLRQNTSLNKSHLDDLKKKANTRAESCKSKIGSKGQRPYSDAILNDVESVCGFTYRVDKDGQPVSVADYSKYDVDYKWGTARHYIFAVMLDHAARRISLAHKWIKRAEAERHKFEEDAKRIANVPARAREWLDSFCKERSVTSGAVEPYRIRRRAVDGWKEVVAAWSKSDCKSTEDRIAAARALQDDSEIDKFGDIQLFEALAEDDALCVWHKDGEATNEPDFQPLIDYSLAIEAEFKKRQFKVPAYRHPDELLHPVFCDFGKSRWKINYDVHKNVQAPFYRGLCLTLWTGSEIKPVPLCWQSKRLTRDLALGNNHRNDAASAVTRADRLGRAASNVTKSDMVNITGLFEQADWNGRLQAPRQQLEAIAVVRDNPRLSEQERNLRMCGMIEHIRWLVTFSVKLQPQGPWCAYAEQHGLNTNPQYWPHADTNRDRKVHARLILPRLPGLRVLSVDLGHRYAAACAVWEAVNTETVKEACQNVGRDMPKEHDLYLHIKVKKQGIGKQTEVDKTTIYRRIGADTLPDGRPHPAPWARLDRQFLIKLQGEEKDAREASNEEIWALHQMECKLDRTKPLIDRLIASGWGLLKRQMARLDALKELGWIPAPDSSENLSREDGEAKDYRESLAVDDLMFSAVRTLRLALQRHGNRARIAYYLISEVKIRPGGIQEKLDENGRIDLLQDALALWHELFSSPGWRDEAAKQLWDSRIATLAGYKAPEENGDNVSDVAYRKKQQVYREQLRNVAKTLSGDVITCKELSDAWKERWEDEDQRWKKLLRWFKDWVLPSGTQANNATIRNVGGLSLSRLATITEFRRKVQVGFFTRLRPDGTRHEIGEQFGQKTLDALELLREQRVKQLASRIAEAALGIGSEGGKGWDGGKRPRQRINDSRFAPCHAVVIENLANYRPDETRTRLENRRLMTWSASKVHKYLSEACQLNGLYLCTVSAWYTSRQDSRTGAPGIRCQDVSVREFMQSPFWRKQVKQAEAKHDENKGDARERFLCELNKTWKAKTPAEWKKAGFVRIPLRGGEIFVSADSKSPSAKGIHADLNAAANIGLRALTDPDWPGKWWYVPCDPVSFESKMDYVKGCAAVKVGQPLRQPAQTNADGAASKIRKGKKNRTAGTSKEKVYLWRDISAFPLESNEIGEWKETSAYQNDVQYRVIRMLKEHIKSLDNRTGDNVEG

SEQ ID NO: 61914 - protein, 1142 aa, Tuberibacillus calidus
MNIHLKELIRMATKSFILKMKTKNNPQLRLSLWKTHELFNFGVAYYMDLLSLFRQKDLYMHNDEDPDHPVVLKKEEIQERLWMKVRETQQKNGFHGEVSKDEVLETLRALYEELVPSAVGKSGEANQISNKYLYPLTDPASQSGKGTANSGRKPRWKKLKEAGDPSWKDAYEKWEKERQEDPKLKILAALQSFGLIPLFRPFTENDHKAVISVKWMPKSKNQSVRKFDKDMFNQAIERFLSWESWNEKVAEDYEKTVSIYESLQKELKGISTKAFEIMERVEKAYEAHLREITFSNSTYRIGNRAIRGWTEIVKKWMKLDPSAPQGNYLDVVKDYQRRHPRESGDFKLFELLSRPENQAAWREYPEFLPLYVKYRHAEQRMKTAKKQATFTLCDPIRHPLWVRYEERSGTNLNKYRLIMNEKEKVVQFDRLICLNADGHYEEQEDVTVPLAPSQQFDDQIKFSSEDTGKGKHNFSYYHKGINYELKGTLGGARIQFDREHLLRRQGVKAGNVGRIFLNVTLNIEPMQPFSRSGNLQTSVGKALKVYVDGYPKVVNFKPKELTEHIKESEKNTLTLGVESLPTGLRVMSVDLGQRQAAAISIFEVVSEKPDDNKLFYPVKDTDLFAVHRTSFNIKLPGEKRTERRMLEQQKRDQAIRDLSRKLKFLKNVLNMQKLEKTDEREKRVNRWIKDREREEENPVYVQEFEMISKVLYSPHSVWVDQLKSIHRKLEEQLGKEISKWRQSISQGRQGVYGISLKNIEDIEKTRRLLFRWSMRPENPGEVKQLQPGERFAIDQQNHLNHLKDDRIKKLANQIVMTALGYRYDGKRKKWIAKHPACQLVLFEDLSRYAFYDERSRLENRNLMRWSRREIPKQVAQIGGLYGLLVGEVGAQYSSRFHAKSGAPGIRCRVVKEHELYITEGGQKVRNQKFLDSLVENNIIEPDDARRLEPGDLIRDQGGDKFATLDERGELVITHADINAAQNLQKRFWTRTHGLYRIRCESREIKDAVVLVPSDKDQKEKMENLFGIGYLQPFKQENDVYKWVKGEKIKGKKTSSQSDDKELVSEILQEASVMADELKGNRKTLFRDPSGYVFPKDRWYTGGRYFGTLEHLLKRKLAERRLFDGGSSRRGLFNGTDSNTNVE

SEQ ID NO: 61915 - protein, 454 aa, Azospirillum sp.
MAEASPNRTVMRTFKFRLYPTAEQDARMRSWCGAVRAVYNAALQQRQWYGRPAGTDWHRRDCRFNANRQSLDLKHARAEFDCLADCPADILMAGLRDLDKAFQNFFAGRARYPSPRRKHQNESFQFRVFQHRKSETHPFYMLVVFGRDSVKLPKIGRIEWVKHAHIRGEAKTATVVREGDRWFICVAAEIVLTPRPAPGGAVGIDVGVAVPLMTSEGEALAVDRTPPHLEKRRRRLQRELSRCRRGSRRRAKRREKLAVIARRISARRKAQLHQVTTDLASRYGLVAIEDLRVRNMTASAAGTVEQPGCNVKAKAGLNRSLLDVSPGQFRLLLTYKVTARGGMVVAVDPRDTSRTCPACGHVDAENRRSQAEFRCVRCGHEDNADANAARNILRRALATLSSATVSGRRKAPSEPRRRSATPKPSVSPSRAGQPSESQVQPKGMIVPDQLLVPG

SEQ ID NO: 61916 - protein, 1501 aa, Oscillatoriales cyanobacterium
MPQQAKPPVTQRAYTLRLRGADSNDPSWRDALWQTHEAVNRGAQAFGDWLLTLRGGLDHTLADTPVKGGKGKPDPDPTDEERKARRILLALSWLSVESKLGAPAGLIIAFGTEAAEERNRKVVAALEEILKSRGVDQNEINAWKKDCSASLSAAIRDDAVWVNRSKAFDEAVESIGSSGSSGSSLTREEPWDMLERFFGSRDAYLAPAKGSEDESSEAKQEDQAKDLVQKAGQWLSSRFGTGKGADFRRMATVYEAIAKWDGKASLEMAGDKAIADLATALSEFNPASNDLQGVLGLISGPGYKSATRNFLNQLAAQTTVTQQDFVSLKDKANNDAQECKQNTGSKGQRPYSNSILEKVESVCGFTYLQDGGPARHSEFAVILDHAARRVSLAHTWIKLAEAERRKFEEDAKKIDQVPEAAKDWLDRFCLERSGVSGALEPYRIRRRAVDGWKEVVAEWSKSDCKTVEDRIAAARALQDDPEIDKFGDIQLFEALAEDDAVCVWHKDGDAAKAPDPQPLIDYALAAEAEFKKRHFKVPAYRHPDALLHPIFCDFGKSRWDICFDVHKNMQTPFPRALCLTLWTGSEMKRIPLCWQSKRLARDLALGNNTGDAGASEVTRADRLGRAASRAASNVTKSDVVNIAGLFEQADWNGRLQAPRQQLEAIARYVEKHDWDQKAEKMRNAIQWLVTFSARLQPQGPWCAYAKIHGLKEDPQYWPHADTNKNRKGHARLILSRLPGLRVLAVDLGHRYAAACAVWEALSTEAFQREIKGRTILRGRTDGNALYCHTRHKANGKERVTIYRRIGADTLPDGKPHPAPWARLDRQFLIKLQGEEEGVREASNEEIWAVHQLEAALGRPVSLIDRLVASGWGGSDKQKARLEGLKQLGWDPADKPSLSVDELMSSAVRTMRLALKRHGDRARIAHYLITDEKTTPGGIKETLDEKGRIDLLQDALVLWHDLFSSRGWRDDTAKQLWNAHVAKLHGYKAPEEPGEDSSGAERKKKQRENREKLYDVAKALAQDVTLREALHDAWKKRWENDDERWKKQLRWFKDWVFPRGNHASDPTIRKRQLINPSGGNGRRGNHASDPTIRKRQLINPSGGNGRRGNHASDPTIRKVGGLSLPRLATLTEFRRKVQVGFFTRLKPDGTRAETKEQFGQSALDALEHLREQRVKQLASRIAEAALGVGRVRRPVEGKDPKRPDVRVDEPCHAIVIEDLTHYRPEETRTRRENRQLMTWSSSKVKKYLAEACQLHGLHLREVSASYTSRQDSRTGAPGVRCQDVPVKEFMRSPFWRKQVKQAEAKQAANKGDARERLLCDLNARWKDRTAADWEKAGAVRIPLQGGEIFVSADANSPAAKGIQADLNAAANIGLRALTDPDWAGKWWYVPCDPASFRPVRDKVDGSAVVNPDQPLRQSAQAQSGDAAKDKNGNKGAGKSKEVVNLWRDISSSPLECIEFGEWKEYAAYQNEVQCRVIRILKEQIKGRDKQPHEGSKEDDIPL

SEQ ID NO: 61917 - protein, 1188 aa, Unknown
  Microbial source - Accession No. 49155357
MPQQDKPPVTRRAYTLRLRGTDPSNTSWRKALWQTHEGVNKGAKKFGDWLLTLRGGLDHTLADAKVKVGKGKPDRDRTDEERKARRILLALSWLSVESKIGAPVGHIIASGEEVAEDRNSKVVAALEEILKSRDLANNEIEEWKNDCSASLSAAIRDDAVWVNRSKAFDDAVKSTVGCSLTREEAWDMLERFFGSRDAYLAPVKISEDESSEAEQEDKAKDLVQKAGQWLSSRFGTGKGADFSHMAKVYERIAAWTDNAQVGTTGNEAINNLAVALSEFIPASEDLEGVLGLISGPGYKSATRNLLKGLDTKAAVTQQDLENLKDKATTDSQKCEQNTGSKGQRPYSDAILNGVEAACGFTYLQDGGSARHSEFAVMLDHAARRVSLAHTWVKRAEAERRRFEEDAKKIAKVSTPAKNWLKSLEVERSLTSGALEPYRIRRRALGGWKEVVAAWAKSSCTSYEDRISEARKLQDDPEIDKFGDIQLFEALAEDDALCVWHKDGDPAKATDPQPLIDYVLATEAEFKKRNFKVPSYRHPDALLHPVFCDFGNSRWDICFEIHKNRQSLNPNALSVTLWTGSEIKPVSLRWQSKRLARDLALDQEAQGNGASEVTRADRLGRAASNVTKNDEVNIAGLFEQKDWNGRLQAPRQQLEAIAAVRDNLSLPSEERDRRMSGMMDRIRWLVTFSAKLQPKGPWCEFAEKLHLKIDPQYWPHADINKNRKGLARLMLSRLPGLRVLSVDLGHRHAAACAVWEAVSAEQVEKACRIAGHESPKASDLYLHLKRKATKQKKGNQVVVEETTVYRRIGADTLPDGTQHPAPWARLDRQFLIKLQGEEEGVRKASNEEIWKVYQLEAEVGRTAPIIDRLFKAGWGRSGQQRVRLEALRELGWRPASEAEISDDMDAEEGEVRKPSLSVGELMSSFVHTMRLALKRHGDRARIAHYLITDEKIKPGGIKEKLDTEGRVDLLLDALVMWHNLFSFHGWRDDEARQLWDKHVAKLSGYKAPERISEECSGKSRKNKQRENREKLRDAAKALAKDITLRKALHEAWKKRWEDDDERWKKQLRWFKDWILPRGKHANDPTIRKVGGLSLTRLATLTEFRRKIQIGFFTRLKPDGTRAEIKERFGQSTLDALEHLREQRVKQLASRITEAALGIGRMRRPAGGKDPKRPGVSVDEPCHACCRNLL

SEQ ID NO: 61918 - protein, 449 aa, Candidatus Staskawiczbacteria
MAKGEKNNDVLYRAVKFEIRPTLNQETILQRISSNLRLIWNEAWKERQDRYEIFFKPIYERIYNAKKKALEKGFTDLWEKEVAKFSQQVLVKRGFPLQLVLEQKSLFAELKKAFEEHGITLYDQINALTAKRSLNTEFGLIPRNWQEETLDALDGSFKSFFALRKRGDKDAKPPSERTNEDSFYKIPGRSGFKVTDDGKVIVSFGKLSETLVGRIPEYQQEKLSHAKNLKKFEIVRDERDMAKSGCFWISIAYEIPKPPELPFNPSKAVFLAIGASWIGIISPRGEFCWRMPRPDFHWKPKINAVDERLKRVSKGSIKWKRLIFARSKMFAIMARQQKQHGQYEVIKRLLELGVCFVVTDLKVRSKEGSLADSSKAERGGSPFGANWSAQNTGNIANLVAKLTDHVSALGGMVIKRKSPELLVEEKRLPQEKRKILLAQKLKDEFLSLN

SEQ ID NO: 61919 - protein, 352 aa, Candidatus Staskawiczbacteria bacterium
MQLVSEKESLLQELSIAFQEHGVTLYDQINGLTARRIIGEFALIPRNWQEETLDSLDGSFKSFLALRKNGDPDAKPPRQRVSENSFYKIPGRSGFKVSNGQIYLSFGKIGQTLTSVIPEFQLKRLETAIKLKKFELCRDERDMAKPGRFWISVAYEIPKPEKVPVVSKQITYLAIGASRLGVVSPKGEFCLNLPRSDYHWKPQINALQERLEGVVKGSRKWKKRMAACTRMFAKLGHQQKQHGQYEVVKKLLRHGVHFVVTELKVRSKPGALADASKSDRKGSPTGPNWSAQNTGNIARLIQKLTDKASEHGGTVIKRNPPLLSLEERQLPDAQRKIFIAKKLREEFLADQK

SEQ ID NO: 61920 - protein, 1152 aa, Unknown
  MTKY01071110.1_o | Anaerobic digester metagenome soeholt_digester_71110
LALSWLSVESKLGAPAGFIIASGTEAAEDRNGKVVAALEEILKSRNLAENEIDEWKNDCSASLTAAIRDDAVWVNRSRAFDDAVESVGCSLTREEAWDMLERFFGSRDAYLAPAKVTEDESSEEEQEEKAKDLVQKAGQWLSSRFGTGKGADFSRMAAVYGKIAAWADNAQAGTTGNQAINKLAADLSEFTPASNDLQGVLGLISGPGYKSATRNLLNGLATKTTVTQQDFGSLRDKAADDAQKCKQNTGSKGQRPYSDAILKDVEAVCGFTYLQQDGGAARHSEFAVILDHAARRVSLAHTWIKRAEAERRRFEEDTQRLANVPGPVKAWLDSFCSERSATSGALEPYRIRRRAVDGWKEVVTAWSKSSCSTSADRIAAARALQDDPEIDKFGDIQLFEALAEDDAVCVWHKDGDAAKAPDPQSLIDYALAAEAEFKKRHFKVPAYRHPDALLHPIFCDFGKSRWDICFDVHKNVQTPFPRALCLTLWTGSGMVSVPLCWQSKRLARDLAIGSNATNAGYVEVARADRLGRAASNVTKSDEVKISGLFEQADWNGRLQAPRQQLEAIAVVRDNLSLSAQERERRMSSMKDRIRWLVTFSAKLQPQGPWCEFAKTNQLRIDPQYWPHADSNKTRKGQARLILSRLPGLRVLSVDLGHRYAAACAVWEAVNAEQVKKACQVAGHEAPKASDLYLHLKRKATKRKKGNQVVVEETTIYRRIGADTLPDGTQHPAPWARLDRQFLIKLQGEEEGVREASNEEVLKVYHLEAELGRTAPIIDRLVKAGWGQSGKQRTRLEALRELGWKPASEAVVSDGMGADEGEVRKPSLSVDELMSSAVRTMRLALKRHGDRARIAHYLITDEKTRPGGVKEKLNENGRIDLLQDALLMWHDLFSSRGWRDDVARQLWDNHVAKLSGYKAPEEIGEESSGPERKKRQKENREKLHDVAKALAQDVTLREALHDAWKKRWKDDDERWKKQLRWFKDWVLPRGKHASDPAIRKVGGLSLPRLATLTEFRRKVQVGFFTRLQPDGTRAETKEQFGQSALDALEHLREQRVKQLASRIAEAALGIGRMRRPMGGKDPKRPNGRVDEPCHAIVIEDLTHYRPEETRTRRENRQLMTWSSSKVKKYLAEACQLHGLHLREVSASYTSRQD

SEQ ID NO: 61921 - protein, 412 aa, Microcystis aeruginosa
MKLVQRHLIKFNKKNYLAFDKLAFLSKNLYNCAVYLNRQAFFSHQPFLTMTELHHALKTSADYQALPAKVSQLVLKQVEKTFKSYQKAEEQFKKSPNKFTGEPKLPRYKDKKKGRNVLTYNYQAISKKALKQGLIKLSGTNLEFKTNLKEVLEVRIIPKSGAYYLEIVYEQPSPPSQEGERYAFVDLGLNNLAAVTSNIPEFQPTLLCGKALKSCNQKYNKTLAKLKSELPSLQKTSKRIQGLTLKRNCQVDYYLHTASRYIIDKLLAHQINLLVIGQNQGWKQNLNIGDRNNQSFVNIPHSRFIEQLTYKAILVGIKVITTNESYTSKCSFLDLEPIGKQEKYLGKRVKRGLFRSSSGYLYGADINGSLNIGRKVVGEVAFSKNPIERLVVSPVRVKAYKADSKCDVCVQN

SEQ ID NO: 61922 - protein, 421 aa, Unknown
  NICF_comb_assmDRAFT_10010420 | GENOME_ACCESSION
MFTKVMRYQIVKPIDVDWDIFGHILRELQHETRIALNKTIQLAWEYHGFSSEYKEKFGKSPNNREVLGYTYLHGYAYDRIKSECWKLSTSNLTQTVKRAADKWRADLPEIIRGEKSIPSFRRDVPIDIVSQSLDISKEEDDYFLDISLISTQYRKQLGRKTGKFRVLIHTGEKSKRAILDRLIDGTYKLGVSQILYHKKKWFINITYQFEGKSLPLDPDTIMGVDLGVTNAVYMAFNNSLHRYKIVGGEIEQFRKQIERRRRELLIQSKYAGEGRSGHGTKTKIAPIEVLEKKAANFKSTVNHKYARYIVNMALKHRCGTIQLEDLSGIREENTFLANWPYHDLQQKIEYKAKEVGIRVVKINPEFTSQRCSRCGHISKENRPDQATFECTKCGLKTNADFNAAKNIATRGIEDLIRQAKS

SEQ ID NO: 61923 - protein, 480 aa, Archaeoglobales archaeon
LQPDKLEREQAIKITVKGVISPRDEGIRTLLQEYKVYKKVLISRISESIKTVIKDKNIRVYSLQKYLLQKKIIEYLKNLPYHPMPYGNQSYWIEERDGKFLIHIKTKNGESVCYLQVPNKYRTLMKKASGKVCPHMNEGKCEFTICPFKTSKMCNKINPYRGEMKLIEDKKYGWINCHITLRLPKPEPYEPKGWIGVDVGWNYLAVSAYVSNEGKISHVTFHGKEWKTRIIQLKYLLKMFQRTGKSTKVWRHRLRNVTNYTVGVIAKEIVRKAKKLKAGVAVEKLTFQAHTKRWLIPRYKLRCAIKNLCERKGIPFVEVSAKNTSIKCNKCGYIDEKNRNGKIFKCLKCKYTCNADFNAAVNIAKKAIEKYKKEKLKAAGKTAIPASYTDAGKDPHAKMTHPQKDVDGVAGRGMLRAPKAPMTNDQPIDDPYKREGNPSIIEDHTQRKAIKTTKQQKLTKYLHLQKQQKITKNRSRKTIE

SEQ ID NO: 61924 - protein, 505 aa, Unknown
  Microbial Source - OGCG01005283.1_o | hot springs metagenome genome assembly
MNTDSKRVLIVRLNPTRDEQIYLISLIKAYTSIAKKLHTDAYAKFKELTANGVIENIKQLKDVKKKFYSWYNEYFKTQRKWITDALGSNVTDQLFQFLRGQYENFFANYENFFKHKIEGRPSFPNLPELFQIRDRGVAIDFDRKILTIKLKGKRLSLRFQADRLLYRGEPGSVTIKQQDGRFYAYIPFDFTPKFEEGKKGAIDIGLVNFFATVTEDGDVILVKAKEYAYVYKKYKEKIKELDRLIGKIKKHILRMYFTPPKSFRRYPFLGFTNNRQVSKIITSLYTSWYDVGRAKKKRLRREDMTSIVKKIRKVDYRLRITKLNFVKSDGSVKLFPKKSPFVRDVYKDLPILHKLEYEKKKLFEKRDRTLTHIRRTAINALLRILRERGVTHVVVGHPYNINKNRNELTVNLFQYRKTINDLKIIGERYGIKVDEIVEYNTSIRCSICGEVHKNGRIERGLYRCEKTGKVINADVNSALNIFYKAFSKMPKQLKKIETIKLHFFT

SEQ ID NO: 61925 - protein, 537 aa, Unknown
  Microbial Source OGCG01007631.1_o | hot springs metagenome genome assembly
VPAKTPSDKNNGKQSRKKENDNKRALTVKLNPTRDDQIYLTSLIKTYTAIANKLNKDAFAKFKELTSNGEIRNIADLKDIKKEFNWWFNEYYKTQRRWITDNLGSNIADQLFKFLTAQYSNFFANYENFFKHKMEGRPSFPSLPELFQIRDRGVEVDFDKKILIIKLKGKQLRLKFQSDRLLYQGDPGSVTIKKVDGKFYAYIPFDFNPKIEEGKKAAIDIGLVNFLATVTEDGDVILVKAKQYTYTYSKYKDRIKELDRMIGNIRKHTLKMYVYPPKSFTYYHFLGFTNDRRIRKIIISLYTSRYDDKRGKKKKLTREDMTNIVKEIHKVNYRLRVRRLNFMKTIGHIKLFPKKSRYMNDVFQDLPILHKLEYERRKLYEKRDRTLRHIRRTAINALLRILKQRGVTHIVVGYPRYINKNRNELTVNLFQYRKTINDLKIIGQRYGMKVEELEEYGTSITCSICGQEHKSGRIERGLYKCEKTGKTINADVNGALNIFYKAFSKMPKQLKKTETIKLTFTPLQRNVTLSPLYYRKL

SEQ ID NO: 61926 - protein, 413 aa, Unknown
  Microbial source - OKRQ01000045.1_o | freshwater metagenome genome assembly
MMKLVQKHLIKFNHKNYSVIDKLGFLSKNLYNCAVYLNRQVFFSHQPFLTMTELHHALKMSPDYQALPAKVSQLVLKQVEKTFKSYQKAKEQYKKSPDKFTGEPKLPRYKDKEKGRNVLTYNYQAISQKALKQGLIKLSGTNLEFKTNLKEVLEVRIIPKLGAYCLEIVYEQPSSSSQEGERYAFIDLGLNNLAAVTSNIPEFQPTLVCGKALKSCNQKYNKTLAKLKSELPSLQKTSKRIQGLTLKRNCQVDYYLHTASKYIIDKLLAHQINLLVIGHNQGWKQNINIGDRNNQSFVNIPHSRFIEQLTYKANLVGIEVKTTNESYTSKCSFLDLESIQKQKSYLGKRIKRGLFRSSSGYFYGADINGSLNIGRKVVGEAAFSGNPIERFVVNPVRVKAYKANSRCNICVQN

SEQ ID NO: 61927 - protein, 1592 aa, Unknown
  Microbial Source - OQOO01000421.1_o | human oral metagenome genome assembly
RSTLFPYTTLFRSGRREVRRRLNERSRALTSRILNALRRVHQRPKHRAGLPRAAKRRQLRDDRHDRERNRQRAARGGRRNSRRNPAEASSGRRREHVEEQLPHGMRDVDTTKGQERVGMFDRRIGRRLTMPKQDKPSVTQRAYTLRLRGADPSDTSWRDALWRTHEAVNKSAKAFGDWLLTLRGGLDHTLADARVKGGKGKPDRDPADAERKARRILLALSWLSVESKLGAPEGYIVASGEEAPENRNGKVVAALEEILKNRNLADNEIGEWKKDCSSSLSAAIRGDAVWVNRSKAFDEAVKSIGCSLTRDEVWDMLERFFGSRDAYLAPAKGSEDESSETEQGNKAKDLVQKAGQWLSSRFGTGKGADFCRMADVYGKIAAWAGANKSNGSATVDDLAKELQKELQIEESKATDGLDWIIKLSSYPGHSPNPVHELLRQNPKLARSNLDDLEKTANTRAESCRSKIGSKGQRPYSDAVLKDVEAVCEFTYLQKDGPARHSEFTVILDHAARRVSLAHTWIKRAEKERSKFEEDAKKIGQVPKAAKDWLHKFCTERSQASGALEPYRIRRRAVDGWKEVVAAWSERSCNTSADRIAAARALQDDPEIDKFGDIQLFEALAEDDAACVWHKDGDAAKAPDPQPLIDYALAAEAEFRKRHFKVPAYRHPDALLHPVFTDFGESRWKICFDVHENLETASPHALSLKLWTGSEVVPVPLRWQSKRLARDLALGQDAQKDGALEVARADRLGRAASNVTKSDEVKISGLFEQADWNGRLQAPRRQLEAIAVVRDNLSLSDQERERRMSGMMDRIRWLVTFSAKLQPQGPWYEFAKTNQLRIDLQDWPHADSNKTRKGHARLILSRLPGLRVLSVDLGHRYAAACAVWEAVNAEQVEEACKDAGHEAPNANDLYLHLKRKATKKQKKDKKIEVEKTTIYRRIGADTLPNGTPHPAPWARLDRQFLIKLQGEKEGVREASNEEVWKVHQLETELGRTTPLIDRLVASRWGGSDKQIARLEELKKLGWNSAEKSDPNGESDEGESRRPSLSVDELMSSAVRTMRLALKRHGDRARIAHYLITDEKTKPGGTKEKLDESGRVDLLQDALVMWHDLFSSHGWEDKAAGQLWGEHVAKLSEYKAPEEIDEGSSVIERKKKQKENREKLYDVAEALAQDETLRKALHDAWKKRWEEDDEQWKKRLRWFKDWILPRGKAANDPAIRKVGGLSLPRLATLTEFRRKVQVGFFTRLHPDGTRAEAKEQFGQKTLDALEHLREQRVKQLASRITEAALGIGSEGGKGWDGGKRPRQRIDDPRFAPCHAIVIEDLTRYRPEETRTRRENRQLMSWSSSKVKKYLAEACQLHGLHLREVSASYTSRQDSRTGAPGIRCQDVPVDEFMRSPFWRHQIAQAEKKQSGGKGDARERFLCDLNARWKDKSEADWKKAGAVRVPLKGGEIFVSADPASLAAKGLQADLNAAANIGLRALIDPDWPGKWWYVPCDPVSFRPIKDKVAGSAAVKLDQALRQPAQAQSGDAKAKKKREKKDAGKPQEVVNLWRDISSSPLGESGEWKEYAAYRNQVQVRVVDILRRAVCSKNNREKQ

SEQ ID NO: 61928 - protein, 521 aa, Unknown
  Microbial Source - OQUW01.1 | hot springs metagenome genome assembly
MKTFKVKLYPTESQSRRMEQWLITLQRHYNRVLAITLWTQRRYNLPVSKSICGGLKTPKKDGDKRPYIYGIYVAAKRRNQFLNDIPADTVNQTIQSRIEAAFDKWAAACKGKKGEDFFKGQPKFANRDRFTSFQFRTRPPRPLFTYDHKGRRYLNIPNAQGADKIGPILCSLSPDTPSDFTKSFCAIQREPDGWYACIVINLENQVRWDKAPHGVVGIDVNIGSIDLSDGTRIPMPFFADRYRDEVLRLTQKLARTRRENKDWRSSKRYADAKKRKAVLEARITRERKAWHANVVAWLVSRYDRIYVENLEPKNMVKNKHLAKAISSQAWGHFFEMLEMKCAEHGRIFGRVPPSYTSKTCSSCGWVNKAKPGEKGYMGLHVRQWVCPECQTHHNRDVNAAKNICAKGEEAFATGNYEKQELGKRKAKSNSKVLLTERTEAKAGTIIIPCPTLDLPTPPNLPAHKRRSKAEWSAKQRAERARRRNKNAKKEKLTSVDLNGQKKNFNGRKEKLANSTQLSLFC

SEQ ID NO: 61929 - protein, 1434 aa, Unknown
  Microbial Source - OQUW01000094.1_o | hot springs metagenome genome assembly
MDKQVAVTQRAYTLRLQGADPQDQSWREALWQTHEAVNKGARAFGDWLLTLRGGLDHTLADAKVKGGKGKPDRDPTNEERRDRRILLALSWLSVESAPKDGDTRKPFVTATGQDSQAIREEKVLCALRGILEKRGVRGADLEGWIKDCTPSLSAAIRDDAVWVNRSEAFDKAVDSIGSSLTRDEVWDMLERFFGSRQAYLAPAEGAEDESAEAEQEDKAKDLVQKAGQWLSSRFGTGKGADFSRMAAVYEKIADWAGKARAGMTGDAAVAGLAAALSEFSPASNDLQGVLRLISGPGYKSATRNLLNQFAARPSVAQEDLENLRDSACDDAEKCKANTGSKGQRAYADAILKDVESVCGFTYLQDGGPARHSEFAVMLDHAARRVSLAHTWIKRAEAERRRFEEDARRMDKVPASVKAWLDGFCLERSEASGALEPYRIRRRAVDGWKELVAAWSNADCRTAEDRIAAARALQDDPEIEKFGDIQLFEALADDEALRVWHKDGDSAKAPDPQLLIDYVLATDAEFKKRQFKVPAYRHPDALLHPVFCDFGNSRWDISFDVHEAVKTGGRNRKNMMVPQDPHALSMTLWTGSTVEPQRLRWQSKRLARDLALKGRQGSNAPEVTRADRLGRAAADVPARATVRIAGVFEQEDWNGRLQAPRAQLDAIAARVARHGWDDKARQMRDHLRWLITFSAKLQPSGPWLDYAAAFPDDAPAKPFVSRKGGYAVRHQDNDAREGHAKLSLSRLPGLRVLCVDLGHRYAAACAVWETLSATQVGDACRAAGREPPRDSDLYLHLKKKVKKQKKGTEVEVEETTIYRRIGADILPDGKPHPAPWARLDRQFLIKLQGEDREARKAGPAELEAVQRVEKEVGREPPDQRALRVDELMSETVRTVRLALQRHGRRARIAFNLTAHKKLLPGGREEVLTAEERVGLLADTLADWYALFTGKGWNDHWARQQWEAHITPLLQGAALPQMPHDAEDMPKARREYEADLMKRLSPVAKSLAGNESLRRQLHCLWATRWRDDDVTLQKCLRRLRDWILPRGRKAKADGAIRHVGGLSLTRIATIKSLYQVQKAFYMRPQPQDLRKNIPSKGDDALVGFGRRILDAMEHMREQRVKQLASRIAEAALGIGRVKRLAGGKDPKRPRQRVDRPCHAVVIENLTHYRPEETRTRRENRQLMSWSSSKVRKYLAEACQLHGLHLREVQAGYTSRQDSRTGAPGVRCQDVPVKQFMQSPFWRKQVAQAEKKRAEGKGDARERFLCDLNAKWNDKLEADWEKAGAVRIPLKGGEIFVSADRDSPAAKGLQADLNAAANIGLKALLDPDWPGRWWYVPCDPATFKPAEDKVAGSAAICLDKPLKNASVAQSTDRRVKKGGKTEARSREVVNLWRDVSSQPISADDNWREFAPYWNDVQARVVRILRQSAGLATDQEER

SEQ ID NO: 61930 - protein, 1256 aa, Unknown
  Microbial Source - OQUW01000235.1_o | hot springs metagenome genome assembly
MTKRKSSLAGYRLHRERILFSGGQVIRTIKFPLTPLNPSKETALFLKDFEKAIIADDLKIRGDLNINDYFVYTAKWKPPYTLFDFWVDSLRAGVIWMPKVTKLIDFLTSQYNITSPFDMVWEKASHRIAVIFQKDKFKDIFLSAPIRNTSTRNSFYERILKSLKDDLVRKNDIISTDAKKEVDLIVNSFFNDDGKLILKGKDQLDFWKREYNLDRSTIESLKPKGAYTDITFVNIPELMHNLDAKQSFEELINKREIWISDKKLLSSILGLSDNFNGFSNYLGVVLKGLQKKDGDIEALYEAQKTIFPRLGNYEDEILNALDFLSQKAKLLGETSLPLVNGWHDYRSVFGGKLQSWFTNSQNRKKELNGQISQFREGLSQVKNYLQKGNFGEEADKEKKDILSFLSLLENFFTDEQKSIKVEVNYQLFESLLALIRRRLNFFYQKYIQKEGNETKVNKYKEFEGLYKTIYKPVAFYGYTAKRANEKFVNKTIPILEDGVENTIKLISYLRDSFSVQKTFESVKQEKEKVDDLYRKFLQFFWNKYVDASINSRLFLEKYEKIIKENIEDSKWKEISDKNRKGRYVFYKSPYAKGSLEKIQIKTNDYLQQLQASVLELAEFILSFKKDTLLSDAILLLDWIELSKNTISLLIRFNTKETYKLDGLLLDIFSQAKRYKELFRRENYPRNEFSFIIQSLILSEIRGAATLYSKKEYIASYSVQVIGADDRYKLYYIPKKEISINADTIKSKPSSIERKQLMKSHNFAIALDKVYEKNKNKTFNAILLSKSGITAVYLPSESLQKLFRLSSSPYQLQFLDKYIYLPDGWENIDISLSEWSFIVEKRYKIDWDLQTKKPTLLPITGSEQAKKNKIYLAIPFNLIPNKQAVQSAPLKVIAKGKETIEKDFSRLNFPILGIDVGEYGIAYCLVRFIFDKNTYKITGVELGSYKEEILGFIEDKNIGNIKDKFAEIQQKARQGAFDEEDNVVARIRENAIGHLRNKIHVIVTQEKSSSVYEDSITNFETGSGRTTKIYNSVKRADTESNTEADKQIHNHVWGEKTKWIGRNIGAYASSYTCLSCLKSLYQIKKEDLAKMIINQKEGRVVTISSRHGNIKGYVSKEEKYDMGYQFKGTDEDLKKIRKIVQDFARPPVTNHSEVLEKYAKKILETGRIEEWRKSRGNSSIFVCPFCQYVADADKQAAFMMAVRGYLRFSGIVPSQSSKKKQGQEEEKTTGESFLEQTQKQLKDIDRSGIKNAFSVRI

SEQ ID NO: 61931 - protein, 1518 aa, Unknown
  Microbial Source - OQUW01001775.1_o | hot springs metagenome genome assembly
MTELQTQRAYTLRLKGIDEKDQSWRDALWKTHEAVNKGAKVFGDWLLTLRGGLDHTLADAEIPGEKGKPDRAPTQEERKHRRILLALSWLSVESERGAPEEFIVATGKEPAATRNDKVIAALKDILRGRNLTEEKISEWTEVCTPSLSAAIREDAVWVNRSRAFDEAVKRIGSSLTREEVWDMLECFFGSRNAYLAPVKISEDESSDGEQEEKAKDLVQKAGQWLSSRFGTGEGADFAKMAAVYAKIAAWAGNAQAGTTGNEVINNLATALREFTPKSNDLKGVLDLISGPGYKSATRNLLKQIANTKTVTREDISKLQETAGEDSEECATKTGSKGKRAYADAILKDVESVCGFTYRIDKDGQPVSVADYSKYDEDYKWGSSRHKEFAVMLDHAARRVSLAHTWIKRAEAERRKFEEDSKKIMQVPQAAKDWLDAYCAQRSEASGALEPYRIRKRAIQGWKEIIASWNKPDCKTAEDRIAAARQLQDDPEIEKFGDIQLFEALAEDDAQCVWKKEDGTLDPEILINYTLASEAMFKKQHFKVPSYRHPDAFLYPVFCDFGNSRWELDFSIREAATKLKEIEAKIEKQRQEVHKVQQALEKCENDEKRPKMEERLKEAQKKLQESQNYGEYLHSNNKITMVLFDGTFVKKHIFAWQSKRLTKDLALYQEPSADPKNVVSRADRLGRAVASVGINDAVKVAGLFEQENWNGRLQAPRQQLEAIAQYVEKHGWDNKAEKMRASIKWFITFSAKLQSKGPWNEFARKHGLKEDPHYWPHAEKNENRTAHSRLILSRLPGLRVLSVDLGHRYAAACAVWEALGSEAFKKDIEGKRIIRGDTDENALYCHTEHEANGKKHITIYRRIGADTLPDGAHHPAPWARLDRQFLIKLQGEDEQAREASNEEIWKVHQLENTLGRRTPLIDRLIAGGWGYTEKQKARLEVLTNLGWCPTNKTDNQEEGDEEETAILSKPSLLVDDLMFSAVRTLRLALKRHGDRARIAHYLITDEKTKPGGVKEKLDKNGRVELLLDALGLWHDLFSSPGWHDEKAKQLWNAYIAGLLPEGELQQAKSVTTSAALGGQQKKEKKEKLRAVAEALYLNSDLCHSLNEVWRKRWEEDDKQWRIYIRWFKDWIMPRGANAKSPAIRHVGGLSLTRLATLTEFRRKVQVGFFTRLHPDGTKTETREDFGQKTLDTLEHLREQRVKQLASRIVEAALGIGSEDKRHWDGKKRPRQRIADPRFVPCHAVVIENLTHYRPEETRTRRENRQIMEWASSKVKKYLSEICQLHGLHLREVSAAYTSHQDSRTGAPGIRCQDVSLIEFMKSPFWRKQVAQAEKKQKEGKGDAVERYLCELNQKWKGASEEEWRKAGFVRIPLRGGEIFVSAAGHDSPAAKGIHADLNAAANIGLRALLDPDWSGKWWYVPCNSSTMCPARDKVTGSAAVNPGQPLQVSAQLESDDAAKDTKKRKKKGDGKSKEIINLWRDISSYPLEDTRGGTWSNKTVYWNRVQSNVVHILQNQMKG

SEQ ID NO: 61932 - protein, 383 aa, Unknown
  Microbial Source - ORXB01007227.1_o | sediment metagenome genome assembly
METVKLCVKGVISPRDAGLRKLMREYVNYKKILIPKVQQAVRQVIKDRGISVYAQQKWMVDKKLSEYLKNLPLHPMPFHNQSVFIEHKDGRFRIHFKTKKEEAICRLSVPAKYHDLIKRACGKDNPVLGQVELMEDRKYGWVNCHIVLRLPRPEPYAPKWWMGVDVGWNKLATSILATANPHLTFSHPTVHGKDFKTRIIQLRHLLKDYARKGKAWKKWDFRLKNTIKYAVGTVAKEIVAKAERHRAGVVMENLTFKSQTKRWLIPRYKLMVAVKTLCKIRGIPFRLVAAKNTSISCPKCGCINAKNRSGERFNCKSCGYQADADITASMNIAKEAIDMGLAPMSTEAADLSAASGDVATPLSADEPMTFIKAGANPRKLKMR

SEQ ID NO: 61933 - protein, 681 aa, Unknown
  Microbial Source - OVXJ01001238.1_o | sediment metagenome genome assembly
LKLTKTILKLELKGDPTSLNSLNDLFNKYDQLVKIADSFIYNVYPIYVSAEQKSLKRLRLKDLVESLDKKAIRKNKRRKERNGIEGEDQQEQDKHKYTCSDLLKTLLHRFIKYADKYYGIDIKYAYLEMQSGLADLMHSNAENAYRFRTLPVLRKLSDTMPIRVSKRPLQENRKNNNDKYYQRTGEFIINGSNIIFRIGGKRNGLYFPIALSFNDAERLKMLSDAIQGNNGLTIGDPCYLVRKRVKGGNSYRYYIQVSVSKNVDKRTIEEAIKNKSVIRIVGVDLGLSKYIATLFCIEVDKANKTYKLIDALGIEGTKEYINAIRKYEEEKKRLQQGKMRGKANSAKISRYKDSEDYTIKNANGDSKRIDLRRQQIGYLCNQIIKFADKNKADIIVVEELKGLNRRLKDLKKIKKVLGKLYNDVNSNGIKSIDEYIKNEAKGKTKDILEILNKIKEYANNHNHNHNHNIRKVTKYILKQRDRIEKRIFLLSVFAYYQFKNELETEALWHDKLLYEVKPSYTSQQCLACRNIDKLNRLTQRQFRCIKCNFKMNADFNASANIALRYVEKLLKIELIPMRNNNDNNDNSSSSSSKQGKGSGTMTITSATTPLHASINASSKAGVVCNNTDGIVAHTMSNVTSTLQGNGEGRPLRVRGQTELPCSVRRLVTLDEFIYEKRGNGG

SEQ ID NO: 61934 - protein, 512 aa, Thermodesulfobacteria bacterium
MITLQTRLQIENKEDLEKLYNLMRRYCSAYRYAYNRLLEKKKETDIRKEIQNLFNINSQYAQSAIWEAKALIRSCKERGQNPKKVIFGGRLLFEKLSKKHLTGKRRRKLKEKWKEKRQKVLYTVGGKYKKGNTNLRLIKNDDNWYLRINVGKKEWIYAKIIRKVKREKDKWIDFIRNLETAENSKGSYAERYFPYTVRVLSKNGKLYAHISYEEKVPEKFKIIKENGIIGIDVNASPFHLALAISSKDGNLLDYKKISLHELINANKNKRKYLEWLIAHEVINYALENNKAIAIEKLEGLKNEKRGSGRAKFRKRLQQFCYRNILEKIKILAKREGIEIIEVNPFYTSVIGKLKYSPIYNIDKDTSAAFVIARRALGFREEIPKNYEKLINDEDYLSYAITELEEKVEEIKKKKNKEKNKYKRNAIKTELKKLKNELNLLKKHLENLKSGKCKPATNNLLIGRNRGVSFQACKAGKYFPQPSLSLTLKNSYKLIVFVGIFLPNQFQGTGGQI

SEQ ID NO: 61935 - protein, 907 aa, Unknown
  Microbial Source - UOVV01006324.1_o | compost metagenome genome assembly
VLGDALNFYYDNVMHPGYEMEYKSANERKKKKLEEEKQAFIQQDYLSIGQLQDALDKYIPEIDDSVDWKRNYTTSCIADYFKNHFNAEKKEGEEKEFTLPANISAKYSCVKGLLENYPKDRELYQDKKAIDNIKLFLDALLELLHFIKPLILRADIALEKDAAFYGQLEPWYDSLKELIPLYNKVRNYATQKPYSIEKFKLNFENSTLLDGWDVNKEKDNSGVLFIKDGHYYLGIMDKKHNKIFRDIPKATSERTYRKINYKLLPGASKMLPKVFFSDKNTSYFSPDEEIQRIRNHGTHTKNGDPQEGYEKLDFNLNDCHKMIDFFKSSIQKHKDWKNFGFRFSPTYTYDSIDAFYREVEAQGYNITFTEIDESIIDRFVEEGKLYLFRIHNKDFSPFSKGRPNLHTLYWKAIFSPENLKNVIYKLNGQAEVFYRRKSIQPEQMVIHKSGEAIDNKNPLTGKKQSTFHYDLIKDKRYTVDKFQFHVPITLNFKASESNIINYEVLQYLRTQPDVHIIGLDRGERNLIYLSLINQKGELLYQEPLNALKSDKFNVVTNYQELLARREKERDMARKSWGTIENIKELKEGYLSGVVNKIATLMVKHNAILVMEDLNTGFKRGRFKIERQVYQKLEKMLIDKLNYLVFKDKSEDEPGGLFKALQLTNKFKSFKEIGKQNGFIFYVPAWNTSKIDPTTGFVNLFYIHYENMEKARAFFGKFQSISYNHDKGYFEFAFDYNDFTTKAEGCRTNWTVCTHGDRIRAFRNPEKNHQWDYKTIHITEEFMALFRKYGIEFSGNKDLREIITGQKDAAFYKSLLDLFRLTLQMRNTNQDWDYLISPVLNENGEFYDSRKADNHLPQDADANGAFHIAKKGLMWLKQIQQFEGDNWKRLDLDKTNKGWLGFAQGYQF

SEQ ID NO: 61936 - protein, 852 aa, Unknown
  Microbial Source - UPSJ01002360.1_o | activated sludge metagenome genome assembly
LKENSHPVVDYFINHFKAKKKEETDKDFDLIANIDAKYSCIKGLLNTPYPEDKKLYQRSKEDNDIDNIKAFLDALMELLHFVKPLALSNDSTLEKYENFYSHFEPYYEQLELLIPLYNKVRNFAAKKPYSTEKFKLNFDNATLLNGWDKNKETDNTSVILRKDGLYFLAIMPQDNKNVFKDSPDLKANEICFEKMDYKQMALPMGFGAFVRKCFGTASQLGWNCPESCKNEEDKIIIKEDEVKNNRAEIIDCYKDFLNIYEKDGFQYKEYGFDFKESNKYESLREFFIDVEQQGYKITFQNISENYINQLVEDGKLYLFQIYNKDFSPYSKGKPNMHTLYWKALFDPENLKDVVYKLNGQAEVFYRKKSIEQKNIVTHKANEPIDNKNPKAKKKQSTFEYDLIKDKRYTVDKFQFHVPITLNFKATGNDYINQDVLTYLKNNPEVNIIGLDRGERHLIYLTLINQKGEILLQESLNTIVNKKYDIETPYHTLLQNKEDERAKARENWGVIENIKELKEGYISQVVHKIAKLMVEYNAIVVMEDLNTGFKRGRFKVEKQVYQKLEKMLIDKLNYLVFKDKDPSEVGGLYHALQLTNKFESFSKIGKQSGFLFYVPAWNTSKIDPTTGFVNLFNTKYESVPKAQEFFKKFKSIKFNSAENYFEFAFDYNDFTTRAEGTKTEWTVCTYGDRIKTFRNPDKVNQWDNQEVNLTEQFEDFFGKNNLIYGDGNCIKNQIILHDKKEFFEGLLHLLKLTLQMRNSITNSEVDYLISPVKNNKGEFYDSRKANNTLPKDADANGAYHIAKKGLVLLNRLKENEVEEFEKSKKVKDGKSQWLPNKDWLDFVQRNVEDMVVV

SEQ ID NO: 61937 - protein, 479 aa, Unknown
  Microbial Source -YNPsite07_CeleraDRAF_scf1119010704098 | GENOME_ACCESSION
MLEYKLAWKGGRLIVVPPQNTSRTCPCCGHVLSDNRQTQAWFECVACGYENHADRGSGPEAFRGSGPEAFRGSGPEAFRGSGPEAFRGSGPEAFRGSGPEAFRGSGPEAFRGSGPEAFRGSGPEAFRGSGPEAFLVGAINILARGIQLLRDEGQDTTDAAVGMRVGEPPVSARMACGSNCTGGRKQEPAETTAQGAIHAQRGRNLRPSGRGGCQHSLPSGSAQVRIKKQRSHPQAHFCLPVNPVRTLSATKAAFFSAYPRPINAVYRRVVEELLVELHLTTVNSTFVYDPFFALGLVTLYDGLMEAYHPPEQREAIFNALCKALHLKPEVLRKNARDLLELMGSGDPRQRLDLLCLKPEAEDVGGLKAILERMTQPPYAYSRVLAVGLYTAYEVVAKSLYEEPEERTRRFLENVVSKLPFSTERVRKDLELYRSSLDRMKQARAVVEEMVKAARRQQERRQSAASLPETSFGDPSKPGS

SEQ ID NO: 61938 - protein, 1108 aa, Unknown
  Microbial Source - Ga0065721_10050166 | GENOME_ACCESSION: BioRi_2199352012_$F_3300005286 GENOME_ID: 23829 CONTIG_ID: 14524
MAIRSIKLKLKTRTGPEAQNLRKGIWRTHRLLNEGVAYYMKMLLLFRQESTGGQTKKELQEELIRHIREQQQKNRADKNMQALPLDKALEALRQLYELLVPSSIGQSGDAQIISRKFLSPLVDPNSEGGKGTSKAGAKPTWQKKKEANDPTWEQDYEKWKKRREEDPTASVITTLEEYGIRPIFPLYTNTVADIAWLPLQSNQFVRTWDRDMLQQAIERLLSWESWNKRVQEEYSKLQEKMTQLNEQLEGGQEWISLLEQYEEQREQELIENMTAANDKYRITKRQMKGWNELYEQWSTVLPNASHEQYREALKRVQQRLRGRFGDAHFFQYLMKEEHHLIWKGNPQRIHYFVARNELKKRLEEAKQNATMTLPDARKHPLWVRFDARGGNLQDYYLTAEADNPRSRRFVTFSQLIWPNESGWMEKQDVEVELALSKQFYQQVTLQKNDKGKQEIEFKDKGSGSTFSGHLGGAKLQLERGDLEKEEKDFEGGEIGSVYLNIVIDFEPLQEVKNGRLQSPYGQVLQLVRRPNEFPKVTTYKSEELVEWMKASQNHSSGVESLESGFRVMSIDLGLRTAAATSIFSVEESNDANAAGFSYWIEGTPLVAVHKRSYMLKLPGEQVEKQVREKRDERQDQQRRVRFQIRILSQVIRMAKKQNRERADELDHLSQALEKQKSLLDQTDRTFWNGIVCDLTDALREKEGGWEQAVVQIHRKAEEHVGKVVQAWRKRFDADERKGIAGLSMWSIEELDSLRKLLISWSRRTRNPQEINRFEQGHTSHQRLLTHIQNVKEDRLKQLSHAIVMTALGYVYDEKKLEWFAKYPACQVILFENLSQYRSNMDRSTKENSTLMKWAHRSIPKYVHMQAEPYGIQVGDVRAEYSSRFHAKTGTPGIRCKMVKGQELQGKRFENLQKRLVNEQFLTEEQVKQLRPGDIVPDDSGEWFMTLSDGSEGKEVVFLQADINAAQNLQKRFWQRYNELFKVSCRVLIRGEEEYLIPKAKSVQAKLGKGLFVKKTDTVMKDVYVWDSQAKLKGKTTFTEESESPEQLEDFQEIIEEAEEAKGTYRTLFRDPSGVFFPEFVWNTQKDFWSEVKRRLYGKLRERFLMKTR

SEQ ID NO: 61939 - protein, 1355 aa, Unknown
  Microbial Source - Ga0255812_10583625 | GENOME_ACESSION: IMG_3300023203_$F_3300023203 GENOME_ID: 30040 CONTIG_ID: 32030
LTIQCAQGGRERIPSGALCRGKPRTPVTWRELVQCHSAEYNPARGGGKFFSDSEDINMATRSIKLKLALGKSKNEAEEARRAQLRSAVWTTHCLFNEGVAYYMNWLMLMRGEAFHKGQTEDELELIGISDGENYFFDKKQMNEEFLRRLKSQQKENGGDEENMPCSEKDPSKTLFADLYEIIVDMAGKKKAQDKKEEDKKAKDRGKKPQESSDTPPDNAENNEDETTEDARDEASLKKAASLAGTYLGFLTKKDSAAGERARIAVEKAPNWANALLANKKNEDRKRLVADWRNAILEWAGGKKDQSTSINGGGRTAAWPEAMKKWIERQNDPNAIEWKTALESKGWLTGYLNWLKGQKKHHDEFGPVGAKLRAAKLVPLFHKFTEHAKVDVKGNAEILDKSCFAEAIRRMGQFETNRIKMEKRKNELENKQKGRDQERNRIPQCLRDCLKEYEKERTRDLGRESLEPKEQYRIMPTGVRRFRQVVYAWNDCLSQNPAAPEDDLKRAAGNVHGRFRRRGFGDPKMFRTLAEAKFRPIWHFDEQNQFPPNWAQADKDTRRNLAQRQADALVKWAEANEADRDAQEARERPRLTIPDPINHPAWMRYEGAGGTNFSPVWFEQTGEGKDARTQLHLDLLEPLDPPKSDATWHVRRVASQSAGKKRKPQPNGSDTTIPIRNTEQIVLTKIGALKKDGKWAYQRLTLQDPSTREQFEGELKGSQLEFGAKGPRLNEENFIKQGFPPCFFSVVVNINTQKSESRPQSYADPIKNGPFKCKNMKPSEWNPDFLREGRRVLSLDLGIRHFAAYSVFRLTQTRPASNRQLFFMVWQRSDWYAVHEVSGCLKLEGEDETPDIIRRREALRNRRLELARAINLLHDLFSLGRLANSKEKQEELMELRNALSENNLPDKIRTMFPQDDLKALDDLAKEQNAPGWWKQEDDGPGECQGVCRIHRKWEETLGKEISEWRRERARFHHEIKEGKVPSGMGGLSFWRLEELDAERRLLLRWSLHSRKYGRRREDGTRPAIFVKSRARGIISGKQNVEWVDTDQRLLEHINNFKEDRRKVGANMIVMAALGYEFHDDRKGKKKDEAKWGQLRDECAHLPKPERARCDLILFENLGGYGFRKDRPRRENSKLMKWAHRSIPKEVMMQGQLFGLRVYDVLAQYSSRVYARNLSPGIRCHLVREVDLEPGSYYHAKWKEEINDTENQSVNKRTNLPKIGELVPEPLGEWFVTLAKDSNKIRICRVNADINAAWNLQRRFWTQEYINPFFQKNGRMFRDSSEIVVPHSEGENGWLPEEKFWEKANEIITDQLARQRATIYRCEQPSGDNCDPFEAEDLANSDGDMSSDDDATDQIRF

SEQ ID NO: 61940 - protein, 1089 aa, Unknown
  Microbial Source - Ga0265297_10015673 | GENOME_ACESSION: Munlanlwell13791_2_$F_3300029288 GENOME_ID: 280701 CONTIG_ID: 15672
MSVKSIELKLHIPYTEDGRKIVNAAGFTHYLHNKGVRYFMEKLLLLRQRDIYEDRGSNAPTRHMDDLKKGLLCYARARQLQNTGRHAGTDEEVLTLLQRMYEALIPAALREKGNTQSIAREWLNSLVSKDSNAGMGKSKSGRSPAYMKKGLTAERKALLKEKYENRQKEKIANEIRPSLKELGLLPFINTFRVDSCYTWLGEEKNGKVTPWDNSSVSCWERDMFQQALERLSTWESWNANADKEYEKAEAELSAWRQNNQDYLNNWQPKFTAYESKRKKEHDDVGFVSEQTFRINGRMLRGWDYIKDKWKNKLKSKPDMSQEDLLAIAKEYQAKRPRECGDMPLLEFLASIDMRGTWQGESDIVLRHLKHNTLIARFEIKHRYTIMTLPDPLKHPLWPRLDVPEGSNMNDYRLLPDGKKGWQVEFRLLFLRGNSQLVEQKLQLPVAPSGQLKFASLTAKPDAKGKHEDIRKISLIDQGTKEQFAAQFGGGRICLKRTLIENFRKAQDLFSKDVSPVYLNITLTVEDKQSISAKAFKWHRSNPAEPWYIVDIKDDTELVKPEYAGMGCLSVDLGVRQMAACSVFRLSKDRADEKRVSFSVVGAKDLYANSERSFLLALPGEKSDKAVKEARNSLWTKLRRLKYSLKLINQLIRLSGESTQKREEIYKGLVNAFTNPEENADPFLDKRLLINIESKISTPDEDWRNAVINIHMQWEVQFAKELAGWRKQFARDAKGRSRYKGIWGLSLDGIEYLESTRRLLISWTTHPRNAGEVKRLPKDKLFAVRLHRHIDGLKEDRIKKSADAIVMSTLGYTTGKEKKHEKCSLILFEDLSRYRFRTDRPRYENKRLMQWAHRAVVKETANQAGMYGIHVGLVGAGFSSRYYSRNMCPGIRCKALDKDDFASPGIAEILAEDKIDIKLLKPGNIVPWNGGELFAALDGKKPMLLHADINAAINLQRRFWTYYADQFRIVCGRLPQGTEVWFKPLRIGKRNERFFQKKSILQLPANTGSGLIGILRPFTAQKLQVIEENAVADLDGLNESEEDEAQASGHYIFFNDPSGNILPKERWYESKIFWTQVKQRLSAALLKKNS

SEQ ID NO: 61941 - protein, 1078 aa, Unknown
  Microbial Source - Ga0315280_10014676 | GENOME_ACESSION: YL17G06_40_MG_2_$F_3300031862 GENOME_ID: 281631 CONTIG_ID: 14675
MSVKSIAVKLVIPRSPGGVAIRRACAETHIIHNAGVRYFMENMLWLRQEDIYEDRDSVRPTRTRSFCQERLLRLAREVQRRNGFGKKASDPEILRLLRGVYEQIIPAAIGESSDNQAIARDWLGSLVSKASEAGLGKSARGRKPAWTELPDSDPRKSQRKHAYEERKKEQKSSQLRPRLKELGLLPLIPMFRSHSGYEWARVETKGKIQPWKDDNVSNWERDMFQQALERLSGWESWNKNAVERHRKAKETLTAWDRAHLQDSETWRPIFARYEASRRGELELGPLGLKRPFRIGRRMLRGWDRIREKWIDVLKKNHSISETDLLDFAKRWQQAHPREIGDMHFIAYLARPQNRAVWSGDHDYVVSQVHHNLLLIDSEEAHPWTILTLPHACIHPLWPRLDVPMGTNMNDYLIARGEDGGWHLTFSLLFPDGKRLTEKRLTLPVAHSGQLDYVRPVADSGRNLILRDPGTDEEFQGKWGGASVRRDRNLLQKLEDESAMRKAACGPVYISLTVDLMDRKGPSTKGFKKTPRGLAGEQFLIGIKEDSSANEILAIQNLGCLSIDLGLRQAAACSVFRMRTKPAQGRSSVPIAGLKRSMEHERSFLLALPGEQADEAVEDKRQKLWDELKKLSDSLGQLNRLIRLSGADGDSRSEGLAALEETETSIFDLKALAALKPKMDLGAVAWRGEVKRIHRCWEKDFAKALAGWRKSGTRDQKGRSRQFGIWGLSLEGIAYLERVRRLLIRWTTHPRKAEETNRLEKNRPFAARLQRHIDALKEDRIKKAADAVVMAALGYITEGEERKEKFEPCSIILVEDLERYRFRTDRPRQENSKLMQWAHRALFREIARQAGIFGIAVGKVGAGFTSRFHAATGAPGLRCAAVTKGLLRKPWFLKRLEEDGLDASSIQVGDIIPWERGKLFCTIDRAGKPVMIQADINAAQNLQKRFWANYDEPFRVVCAAGAADTFVPLPGKRLARFFASKMLAAVKPGDSPAYELVQAKVGRVEKQAVEEEGSMREEFPERLHEEDEAASARKTIFFRDPSGALLPAIRWYESKVFWSQVKQKVRQALLRPRKTAVTL

SEQ ID NO: 61942 - protein, 1127 aa, Unknown
  Microbial Source - Ga0206102_1000160 | GENOME_ACESSION: 1B1Ametagenome_2_$F_3300020149 GENOME_ID: 20785 CONTIG_ID: 159
MPVRSIKLKLMTHSGDNAAMLRKALWQTHKLHNEGVAYYMKLLIMLRQRDVYKQDLKEPAESFRLDLLAHVRQQQQRNGSAHIVIPEMELTAALRELYELLVPSHNGGKGDSQQLSRAFLSPLTDPNSQGLEGTAKAGAKPRWQKMQAEGHPDWEAEKERAEREKEADPARKIMKQLREWGLKPLFSLFTNEQTHIQWAPAKKDRDFVRTWDRDMFQQALERLLSWEQWNHKVIEERALVIARREAYESEHFASEAQQAWLQRMRGYELERAAKLAEQSLGLTGPFRIKSRQLRGWKRVHDLWRKLDKKGQRSLDHCWEAVAKIQGAQPKDFGDPELYRFLAEPANHDLWLEEPERLFHLVTYNALLEKEELSKQQTTLTLPDAVEHPLWVRFDPKGGNLHSYELQSEDDKSPQKHLSVTFARLIWPDSTGDGTPLWIESGPIQVGLATSAQFYRQFRLLPMGDDNRLGKALEVQDYSAADTKTTGLLGGAKLQFERPYVEKHWQTVSEGDIGRAYFNVTIDMEPIQPMKNDRLISGLGKAFKTFKRDFMEVTQYKPADLEAWMATQPAKTELTGTKALQEGLRVISVDLGQRTAAAVSVFEVVRGKPDADKLFYPIRDTESLYAVHRRSHLLQLPGEAVTPEAVSERQSRNRAMYGIRMQVRLLSGILRLYGKEEAASRRKSITRTMDMIRSTDNLSMDDKTRWSSVYQRLADAAELDVPLWQSTVITAHRELEAIVSQAFSTWRTSSRHRGRGVGGKSMWSLEELDQTRKLLISWSKRAREPHAINRLDRNERFAQRLLTHLQRLKADRLKETANLIIMAALGYKYDSPEKGWLPVFPACQLILFEDLSRYRFKMDRSRSENSKLMNWAHRSIPREVYMQGQVFGLMVGHVPSEFTSRFHARTGAPGIRCHVVTQADLDGRTAMLKLVDQDFLAEVRDELQPGDLLPFRGGEIFVSLNGSTEKERALNRLHADINAAQNLQRRFWSRYPQDPIRISAQRITADQEIAYEPKTTKMKESMGKGFFQEFEISKSHHVYKWNSSGKLGGKKRIADSKDMEETDDLAEEAAAAEELMDGYVTLFRDPSGYYRASDLWVPQVDFWGMVTRRLESLLKAAINERPGRALSR

SEQ ID NO: 61943 - protein, 1101 aa, Unknown
  Microbial Source - Ga0207869_1001742 | GENOME_ACESSION: HigsolAR5DSPAdes_$F_3300025517 GENOME_ID: 27181 CONTIG_ID: 1741
MSVKSIKLKLKTRSGTNSLSLRKGLWKTHELMNQGIAYYMEWLTLLRQEPVGSRSKEELRQELIGRLQEQRKRNGYSDSATELPDEVFLLLRELYECIVPSSVGESGDAQLLSRKYLSPLTDPDSEGGEGKSKAGRKPGWLLKKEAGDPTWEAEFLRAQKRKEADPTPRIMQALREFGIKPLFPLFTNLQSDITWLPPANKKQFVRTWDRDMFQQAIEKLLSWESWNRRVKDEREKLEQRKAKFEQEYLQDADGWLAPLQQFEKDREKELAEVAFAPGSVYLITPRQIRGWEKLYEKWEKLNTTTEADYIARIAEVQSSMPKEFGDPVVFRFLAKAENHHIWKGHKDRLFLLASYNQIKKQLQQAKEQAAFTLPDPVEHPLWIRFDARDGNLHDYVLWQESKRTRSRRTVTFSSLIMPSENGWCEQANVEVELALSRQFYRQIELCDNPKGKQEITFKDYSSGIPLKGHLGGAKIQFDRCHLEKNRDTLAEGNVGPVYLNVTVDIQPSQEIKNGRLQSPLGQALKVLAKDWPKVTEYKPSELESWILQSGQLQQTGIQSLTSGMRVMTVDMGIRTSAAVSIFEAVKEPPANSKKLCYKLPHCELYAVHRRSFLLNMPGERPDRRVKEQREKRTAERYAIRSQIRLLAQVNRLYAKETVFEQKQAIDEMVDAIQRNKNLAESVRNTWVKELGRLSACAGYQQDVWEKEVSEVYKRLEYITGEIVGKWRRSFGKGRKNLAGLSLWNIEELDSLRKLLISWSKRSRRPGEVNRLQENEKFAVELLEHIRQVKDNRLKQMANLIVMTALGYVYDETQREWIEKYPACQLILFENLQRYRFKQDRSRKENSQLMKWAHRSIPKTVWMQGEPFGLQVGDVNSEFSSRFHAKTGAPGIRCHMLTEPETRDSFLKEMIVKKGFLNEQEVELLKAGDIIPMQGGELFVTLKEKAGEELLIVHADINAAQNLQRRFWHQNAEVFRVVCQAGKTAKGEEVYIPKYKLAEKHLGKGLFRKQSETEDEHVYIWDNKAKIKGKTLSDDSLELEDEDEGLESLEEAKEARGEYKTLFRDPSGFFFPQDTWRPQVEFWSIVKSRLEKRLKMMILQKR

SEQ ID NO: 61944 - protein, 1129 aa, Unknown
  Microbial Source Ga0209347_1001125 | GENOME_ACESSION: AutmicBR23SPAdes_$F_3300027640 GENOME_ID: 23478 CONTIG_ID: 1124-
MTVRSIKLKMKTQTDPESLQLRKALWKTHQLLNEGVAYYMYWLILLRQDSYINEEGREYKKEEIQKELLEKVSGQQKRNDWQGDLGSLDILIPLRKLYELIVPSSIGEKGDSQISARKYLSPLVDPDSQGGKGTAKSGRKPRWQKMKEDGNPEWEEEYKKDMTKKESDPTTSILTELENYGLKPLIPLFTEEIKDIAWLPRKRGFVRTWDRDMFQQAIERLLSWESWNIRVKEEKQKIEQAIEDYRNKYLQDGEEWISKLREIEKIREAEITDVSYATKQGYLITRRELKGWEKVYEKWSKLIDAPLYDLKKVVTDVQNSMRREFSSAIFNILAEKKNRDIWVGQPNRLLHFAAYNVLLRKLQKAKDQATLTLPDPVNHPLWIRYDARGGNIHSYTIFQVDKMEVKVNLERMVWPNDSTWIEKEDITVHLAPSEQLYRQIAVQDNPSGKQEIDFIDYSSRVPLKGELIGSKIQFDRRYLENHTEELLAGNIGPVYLNLGVEVKHYQEMKNGRLRTPIGQSFTVKSLEWQKVIGFKAKELAEWMEQTAETNEKGIDSITEGLRIMSIDMGIRTSATVSVFEVVKNQPDNNKLFYKIQDTDLFAVHCRSILLNLPGEQVSKDIIKERDERYTERRFIKSQIRLLSKILQLNNQETQDGRKNILIGMIDTIESNKSLLNDQKQAWISKFNILAKNAYLDQVGWKQKLIEIHHEIEPVVGKLVSEWRRSFSKNQKNNKNRKNLAGLSMWNIDELEDTRRTLSSWSNRTRNPGEPKPIDPKFGINLLTHIQNLKDDRLKQMANLIVMTALGYKYDPGEKQKEERWKKAYPACHVILFEDLSRYRFNLDRTRLENSKLMKWGHRSIPKMVQMQGEIYGLLVGDVYSAFSSRFHAKTGAPGIRCHSLDEEDVNMLKNVSEIGGFDKLEDFKDLKREYYKLFGSVDKDYLAKMIERSDLIKSGTIIPKEGGELFITLAGHYKSNPKLSIIHADINAAQNLQRRFWQSNSEIFRVSCKLVKMSDGEYYIPKYSSKTFEKAMGKGRFIKNLDSEVYKWGNSSKMRIKTISTDKEIEFEEMEDFEQALEDAQEIQDGFKTMFRDPSGFFLATDKWLPQKEFWSMVKTVIHSRLRESSFSK

SEQ ID NO: 61945 - protein, 1147 aa, Alicyclobacillus kakegawensis
MAVKSIKVKLRLSECPDILAGMWQLHRATNAGVRYYTEWVSLMRQEILYSRGPDGGQQCYMTAEDCQRELLRRLRNRQLHNGRQDQPGTDADLLAISRRLYEILVLQSIGKRGDAQQIASSFLSPLVDPNSKGGRGEAKSGRKPAWQKMRDQGDPRWVAAREKYEQRKAVDPSKEILNSLDALGLRPLFAVFTETYRSGVDWKPLGKSQGVRTWDRDMFQQALERLMSWESWNRRVGEEYARLFQQKMKFEQEHFAEQSHLVKLARALEADMRAASQGFEAKRGTAHQITRRALRGADRVFEIWKSIPEEALFSQYDEVIRQVQAEKRRDFGSHDLFAKLAEPKYQPLWRADETFLTRYALYNGVLRDLEKARQFATFTLPDACVNPIWTRFESSQGSNLHKYEFLFDHLGPGRHAVRFQRLLVVESEGAKERDSVVVPVAPSGQLDKLVLREEEKSSVALHLHDTARPDGFMAEWAGAKLQYERSTLARKARRDKQGMRSWRRQPSMLMSAAQMLEDAKQAGDVYLNISVRVKSPSEVRGQRRPPYAALFRIDDKQRRVTVNYNKLSAYLEEHPDKQIPGAPGLLSGLRVMSVDLGLRTSASISVFRVAKKEEVEALGDGRPPHYYPIHGTDDLVAVHERSHLIQMPGETETKQLRKLREERQAVLRPLFAQLALLRLLVRCGAADERIRTRSWQRLTKQGREFTKRLTPSWREALELELTRLEAYCGRVPDDEWSRIVDRTVIALWRRMGKQVRDWRKQVKSGAKVKVKGYQLDVVGGNSLAQIDYLEQQYKFLRRWSFFARASGLVVRADRESHFAVALRQHIENAKRDRLKKLADRILMEALGYVYEASGPREGQWTAQHPPCQLIILEELSAYRFSDDRPPSENSKLMAWGHRGILEELVNQAQVHDVLVGTVYAAFSSRFDARTGAPGVRCRRVPARFVGATVDDSLPLWLTEFLDKHRLDKNLLRPDDVIPTGEGEFLVSPCGEEAARVRQVHADINAAQNLQRRLWQNFDITELRLRCDVKMGGEGTVLVPRVNNARAKQLFGKKVLVSQDGVTFFERSQTGGKPHSEKQTDLTDKELELIAEADEARAKSVVLFRDPSGHIGKGHWIRQREFWSLVKQRIESHTAERIRVRGVGSSLD

SEQ ID NO: 61946 - protein, 1115 aa, Alicyclobacillus hesperidum
VTVRSIRVKLAVGSPQYRDVRRGLWKTHEIMNQGVRYYCEWLVLMRQEPIYDEDEHGLTVVQRTREDIQAELLSRLRTLQSAHQHSGDMGTDEELLSLMRQLYEQLVPSSVDKNKSGDARMIARNFFNPLTNPNSQGGLGISNAGRKPKWLLKKLSGDPTWEEDYKKAMEQKQESSVSFLLLELRRFGLHPIFLPYTDTVLEVSWAPKKARQWVRKWDYDLFQQSIERMLSWESWTRRVKERFEKLVESEKKFYDENFATDPEFIKLAETLEGELQASSQGFVAVDEHAFQIRPRSMRGFDRVADEWCKLADDAPIEEYEAAIKRVQARLGRNFGSYVLFAHLAKPEYWSLWRSDPTKILRFARLRALQRAVARAKRHARLTLPDAIHHPIWIRYDAKGKNIYSYRLLIPEKRSKRYYVEFSSLIMPDGENRWAEHRNIRVPLAFSRQWERLHFSIMEDGSLCVQYRDPGVDEPLRAELGGAKIQFDRRYLIRRSSTLSAGECGPVYLNVSVDVNPAHRPDVQVLQSAKLVSVSRDTNRIYLRPENLSAYWKSQGDGTLPLRVMSVDLGVRSSAAVVICRLEHRDSVVSSGRRTATIYRIAGTDEFVAVQERAFLLRLPGEGKGTNEDAPLRDVYAQLGTIRQGIQILRSLLRLCDTKTPDERQEALHGLAQSLEPSGAWKDELHPHLVMLQGVVHDSVDNWKQKVISVHRQMERILGHAVREWKVARKNAGKPPIRRGAGGLSLRRIRQLEQERRTLVAWSNHAREPGQVVRIKRGTQVAQWLVERVNHLKEDRLKKLADLLIMTALGYVYDETKPSGHKWDKRYPPCQIILMEDLSRYRFQSDRPPSENSQLMAWSHRRLLEILKLQADLHKLIVGTVFPAFSSRFDAQSGAPGVRCRSVKKQDIENAAQGKGWLARELQRLNWTLEWLQPNDLIPTGDGELFVTPACCDRQKGIKIVHADLNAAQNLQRRFWGGHAESLCRVTCDVVERDGRRYAVPRISNAFADSFYKVFGQGVFVSTDEEDVYRWMVGEKISSRGRSRGRTSDEEAEAETWIDEAREQQGKVIALFRDASGQIHGGDWLVAKVFWGWVERLVTARLLSRMSEREAAAHKE

SEQ ID NO: 61947 - protein, 1463 aa, Unknown
  Microbial Source - GENOME_ACESSION: OQOO01.1 GENOME_ID: 9995 CONTIG_ID: 420
MPKQDKPSVTQRAYTLRLRGADPSDTSWRDALWRTHEAVNKSAKAFGDWLLTLRGGLDHTLADARVKGGKGKPDRDPADAERKARRILLALSWLSVESKLGAPEGYIVASGEEAPENRNGKVVAALEEILKNRNLADNEIGEWKKDCSSSLSAAIRGDAVWVNRSKAFDEAVKSIGCSLTRDEVWDMLERFFGSRDAYLAPAKGSEDESSETEQGNKAKDLVQKAGQWLSSRFGTGKGADFCRMADVYGKIAAWAGANKSNGSATVDDLAKELQKELQIEESKATDGLDWIIKLSSYPGHSPNPVHELLRQNPKLARSNLDDLEKTANTRAESCRSKIGSKGQRPYSDAVLKDVEAVCEFTYLQKDGPARHSEFTVILDHAARRVSLAHTWIKRAEKERSKFEEDAKKIGQVPKAAKDWLHKFCTERSQASGALEPYRIRRRAVDGWKEVVAAWSERSCNTSADRIAAARALQDDPEIDKFGDIQLFEALAEDDAACVWHKDGDAAKAPDPQPLIDYALAAEAEFRKRHFKVPAYRHPDALLHPVFTDFGESRWKICFDVHENLETASPHALSLKLWTGSEVVPVPLRWQSKRLARDLALGQDAQKDGALEVARADRLGRAASNVTKSDEVKISGLFEQADWNGRLQAPRRQLEAIAVVRDNLSLSDQERERRMSGMMDRIRWLVTFSAKLQPQGPWYEFAKTNQLRIDLQDWPHADSNKTRKGHARLILSRLPGLRVLSVDLGHRYAAACAVWEAVNAEQVEEACKDAGHEAPNANDLYLHLKRKATKKQKKDKKIEVEKTTIYRRIGADTLPNGTPHPAPWARLDRQFLIKLQGEKEGVREASNEEVWKVHQLETELGRTTPLIDRLVASRWGGSDKQIARLEELKKLGWNSAEKSDPNGESDEGESRRPSLSVDELMSSAVRTMRLALKRHGDRARIAHYLITDEKTKPGGTKEKLDESGRVDLLQDALVMWHDLFSSHGWEDKAAGQLWGEHVAKLSEYKAPEEIDEGSSVIERKKKQKENREKLYDVAEALAQDETLRKALHDAWKKRWEEDDEQWKKRLRWFKDWILPRGKAANDPAIRKVGGLSLPRLATLTEFRRKVQVGFFTRLHPDGTRAEAKEQFGQKTLDALEHLREQRVKQLASRITEAALGIGSEGGKGWDGGKRPRQRIDDPRFAPCHAIVIEDLTRYRPEETRTRRENRQLMSWSSSKVKKYLAEACQLHGLHLREVSASYTSRQDSRTGAPGIRCQDVPVDEFMRSPFWRHQIAQAEKKQSGGKGDARERFLCDLNARWKDKSEADWKKAGAVRVPLKGGEIFVSADPASLAAKGLQADLNAAANIGLRALIDPDWPGKWWYVPCDPVSFRPIKDKVAGSAAVKLDQALRQPAQAQSGDAKAKKKREKKDAGKPQEVVNLWRDISSSPLGESGEWKEYAAYRNQVQVRVVDILRRAVCSKNNREKQ

SEQ ID NO: 61948 - protein, 1122 aa, Unknown
  Microbial Source - GENOME_ACCESSION: OWPA01.1 GENOME_ID: 12159 CONTIG_ID: 246
MTNSDSVELRKGLWATHELLNKGVAYYMEWLILLRQDTIKMPEGVIKPKEAIQSELLQRVKAQQLLNNHQDKAEEESEVLAVLRQLYELIVPSSVGGTGDAQMLARKFLSPLVDPNSEGGKGTSKAGRKPRWKILKEQGDPRWEEEYEKDCARKEADETSKVLFKLEELGLKPLFPLFTDTRKDINWLPKANRQFVRNWDRDMFQQAVERLLSWESWNRRVADAKSKLEEKATEYYDKYLSSVTETVQKLKRYERERAVELEQTTGNKSDSYRISIRSVRGWDRIYPLWLKRSVNATPTELRDILKSVQREMSEGFGDPQLFIYLAQPENRDIWYGSNEKARILNHYAIYNGILTKLEQAKEQATFTMPDPIDHPLWVRFDARGGNLYTYILEEDEGWRVQFERLLWPNERGWEEREKVNVKVAPSKQLVRKAKNGYQKIIELVNNPKGKQEVIYRDYSTMLPFDGVLGGAKIQLNRYYLEKSKEKIARGQIGSVYLNISLEVTPIQEVKNGRLQTPLGKALTIVKSDWPKIVDFKSEQLQQMLTEQNSNKGDLKGVRSLAEGLRVMTIDLGQRASAAVSIFEVTAERPSDEKTKLFFAIPDTPLYAVHRRSLLLNLPGESPDKETEQRRKDRYSSYRAIRFQVRMLAQILKLHTKETSEERLTELQSFLKAVTEYELWDDEIKSLWKQELNKLRKSVNQSNEEWVQEIVLTHRSLESRVAKNISNWRKSLSNKRGGFLANSRYKIAGLSLWNVDDLTRNRRLLLSWSKRSRIPGKMNHLQHEERFGLHQLVHLQNVKNDRLKQLANLIVMTALGYTYDQERKVWLETYPACQVILFEDLSRYRFKLDRPRRENSQLMKWAHRSIPKTVAMQGEIYGLQVGDVYAAFSSRFHARTGTPGIRCKQLKECDLNDSFIKEALIRDKFITEEKWSSLKAGDIVPWKGGELFATLEKNASDKNGSKLLLIHADINAAQNLQRRFWNHRSELFRIACRRTKINDGEVYVPTSQSERWKKQMGKGYFVKDNNYSGRDNELEKVEAYEWNNMERIRQEVVSIDETIELEDMEEINQAIEEELESKGDYVTLFRDPSGVIFPDYLWIPQVQFWSVVKNKIQKELHKRIFGN

SEQ ID NO: 61949 - protein, 1112 aa, Bacillus sp.
MAIRSIKLKMKTNSGTDSIYLRKALWRTHQLINEGIAYYMNLLTLYRQEAIGDKTKEAYQAELINIIRNQQRNNGSSEEHGSDQEILALLRQLYELIIPSSIGESGDANQLGNKFLYPLVDPNSQSGKGTSNAGRKPRWKRLKEEGNPDWELEKKKDEERKAKDPTVKIFDNLNKYGLLPLFPLFTNIQKDIEWLPLGKRQSVRKWDKDMFIQAIERLLSWESWNRRVADEYKQLKEKTESYYKEHLTGGEEWIEKIRKFEKERNMELEKNAFAPNDGYFITSRQIRGWDRVYEKWSKLPESASPEELWKVVAEQQNKMSEGFGDPKVFSFLANRENRDIWRGHSERIYHIAAYNGLQKKLSRTKEQATFTLPDAIEHPLWIRYESPGGTNLNLFKLEEKQKKNYYVTLSKIIWPSEEKWIEKENIEIPLAPSIQFNRQIKLKQHVKGKQEISFSDYSSRISLDGVLGGSRIQFNRKYIKNHKELLGEGDIGPVFFNLVVDVAPLQETRNGRLQSPIGKALKVISSDFSKVIDYKPKELMDWMNTGSASNSFGVASLLEGMRVMSIDMGQRTSASVSIFEVVKELPKDQEQKLFYSINDTELFAIHKRSFLLNLPGEVVTKNNKQQRQERRKKRQFVRSQIRMLANVLRLETKKTPDERKKAIHKLMEIVQSYDSWTASQKEVWEKELNLLTNMAAFNDEIWKESLVELHHRIEPYVGQIVSKWRKGLSEGRKNLAGISMWNIDELEDTRRLLISWSKRSRTPGEANRIETDEPFGSSLLQHIQNVKDDRLKQMANLIIMTALGFKYDKEEKDRYKRWKETYPACQIILFENLNRYLFNLDRSRRENSRLMKWAHRSIPRTVSMQGEMFGLQVGDVRSEYSSRFHAKTGAPGIRCHALTEEDLKAGSNTLKRLIEDGFINESELAYLKKGDIIPSQGGELFVTLSKRYKKDSDNNELTVIHADINAAQNLQKRFWQQNSEVYRVPCQLARMGEDKLYIPKSQTETIKKYFGKGSFVKNNTEQEVYKWEKSEKMKIKTDTTFDLQDLDGFEDISKTIELAQEQQKKYLTMFRDPSGYFFNNETWRPQKEYWSIVNNIIKSCLKKKILSNKVEL

SEQ ID NO: 61950 - protein, 1108 aa, Brevibacillus agri
MAIRSIKLKLKTHTGPEAQNLRKGIWRTHRLLNEGVAYYMKMLLLFRQESTGERPKEELQEELICHIREQQQRNQADKNTQALPLDKALEALRQLYELLVPSSVGQSGDAQIISRKFLSPLVDPNSEGGKGTSKAGAKPTWQKKKEANDPTWEQDYEKWKKRREEDPTASVITTLEEYGIRPIFPLYTNTVTDIAWLPLQSNQFVRTWDRDMLQQAIERLLSWESWNKRVQEEYAKLKEKMAQLNEQLEGGQEWISLLEQYEENRERELRENMTAANDKYRITKRQMKGWNELYELWSTFPASASHEQYKEALKRVQQRLRGRFGDAHFFQYLMEEKNRLIWKGNPQRIHYFVARNELTKRLEEAKQSATMTLPNARKHPLWVRFDARGGNLQDYYLTAEADKPRSRRFVTFSQLIWPSESGWMEKKDVEVELALSRQFYQQVKLLKNDKGKQKIEFKDKGSGSTFNGHLGGAKLQLERGDLEKEEKNFEDGEIGSVYLNVVIDFEPLQEVKNGRVQAPYGQVLQLIRRPNEFPKVTTYKSEQLVEWIKASPQHSAGVESLASGFRVMSIDLGLRAAAATSIFSVEESSDKNAADFSYWIEGTPLVAVHQRSYMLRLPGEQVEKQVMEKRDERFQLHQRVKFQIRVLAQIMRMANKQYGDRWDELDSLKQAVEQKKSPLDQTDRTFWEGIVCDLTKVLPRNEADWEQAVVQIHRKAEEYVGKAVQAWRKRFAADERKGIAGLSMWNIEELEGLRKLLISWSRRTRNPQEVNRFERGHTSHQRLLTHIQNVKEDRLKQLSHAIVMTALGYVYDERKQEWCAEYPACQVILFENLSQYRSNLDRSTKENSTLMKWAHRSIPKYVHMQAEPYGIQIGDVRAEYSSRFYAKTGTPGIRCKKVRGQDLQGRRFENLQKRLVNEQFLTEEQVKQLRPGDIVPDDSGELFMTLTDGSGSKEVVFLQADINAAHNLQKRFWQRYNELFKVSCRVIVRDEEEYLVPKTKSVQAKLGKGLFVKKSDTAWKDVYVWDSQAKLKGKTTFTEESESPEQLEDFQEIIEEAEEAKGTYRTLFRDPSGVFFPESVWYPQKDFWGEVKRKLYGKLRERFLTKAR

SEQ ID NO: 61951 - protein, 1108 aa, Brevibacillus gelatini
MAIRSIKLKLKTNTGPEAQNLRKGIWRTHRLLNEGVAYYMNMLLLFRQESTDKKTKQEIHEELIRHIRAQQQRNHADEKTQALPLEKALEALRKLYELLVPSSVGQSGDSQIISRKFLSPLVDPNSEGGKGTSKAGAKPAWQKKKEANDPTWKQDYEKWKKRREEDPTASVITTLEEYGIRPLFPLYTNTVAEIAWLPLKSGQFVRTWDRDMFQQAIEGMLSWESWNRRVQEEYAKLEGKMAQLNEQLEGGEEWIRLLEQYEEKREQELRENMTAANDKFRITKRQMKGWKELYEVWSTFLPSASQEQYKEAIKRVQQRLRGKFGDFHFFQYLSEEENRLIWKGNPQRIHYFVARNELTKKLEKAKQSARRTLPDANKHPLWVRYDARGGNLQDYYLTAESDKPRSRRFVTFSQLIWPSESGWLEKKDVQAELALSRQFYQQVTFLKNDKGKQEIEFKDKGSGTTFSGHLGGAKLQLERSVLENKERKFEEGEIGKAYLNVAIDFKPLQEVKNGRVQAPYGQVLQLIRLPNAFPKVRTYKSEELVEWIKASPQHLSGVESLASGFRVMSIDLGLRAAAATSIFSVEESSDKNATKLAYWIEGTPLVAVHQRSYMLRLPGEQVEQHVWEKRDERGDQHKRVRFQIRRLAEIIRLANKQYGDRWDELNRLDEAVSKEKSPLDQADRTFWEGIVSDLTTALPLNDADWTEAVVQIHRKAELYVGKVVQAWRKRFNADERKGIAGLSMWSIEELDGLRKLLISWSRRTRNPQEVNRFEPEHTGHKRLLTHIQNVKKDRLKQVSHAIVMTALGYIYDEKKQKWCAKYPACQVILFENLSQYRSNLDRSAKENSTLMKWAHRSIPKYVHMQAEPYGIQIGDVRAEYSSRYYAKTGTPGIRCKKLREHDVKGWRLDHLKKRLVNEQFLTEAQVEQLKAGDIIPDDSGELFMTMTDGSGGKEIVFLQADINAAQNLQKRFWQRNSELFKVSCRVIVRDEAEYLVPQAKKVQEKLGKGVFVKKSDTAWKEVYVWDSQAKLKGKTTFTEESESPEQLEDLQEMIEEAEEAKGTYRTLFRDPSGVFFPDFVWNTPKDFWGEVKRKLYGKLRERLLTKVR

SEQ ID NO: 61952 - protein, 1129 aa, Unknown; identical to SEQ ID NO: 61900
  AacCas12b

SEQ ID NO: 61953 - protein, 1129 aa, Unknown
  AapCas12b
MAVKSMKVKLRLDNMPEIRAGLWKLHTEVNAGVRYYTEWLSLLRQENLYRRSPNGDGEQECYKTAEECKAELLERLRARQVENGHCGPAGSDDELLQLARQLYELLVPQAIGAKGDAQQIARKFLSPLADKDAVGGLGIAKAGNKPRWVRMREAGEPGWEEEKAKAEARKSTDRTADVLRALADFGLKPLMRVYTDSDMSSVQWKPLRKGQAVRTWDRDMFQQAIERMMSWESWNQRVGEAYAKLVEQKSRFEQKNFVGQEHLVQLVNQLQQDMKEASHGLESKEQTAHYLTGRALRGSDKVFEKWEKLDPDAPFDLYDTEIKNVQRRNTRRFGSHDLFAKLAEPKYQALWREDASFLTRYAVYNSIVRKLNHAKMFATFTLPDATAHPIWTRFDKLGGNLHQYTFLFNEFGEGRHAIRFQKLLTVEDGVAKEVDDVTVPISMSAQLDDLLPRDPHELVALYFQDYGAEQHLAGEFGGAKIQYRRDQLNHLHARRGARDVYLNLSVRVQSQSEARGERRPPYAAVFRLVGDNHRAFVHFDKLSDYLAEHPDDGKLGSEGLLSGLRVMSVDLGLRTSASISVFRVARKDELKPNSEGRVPFCFPIEGNENLVAVHERSQLLKLPGETESKDLRAIREERQRTLRQLRTQLAYLRLLVRCGSEDVGRRERSWAKLIEQPMDANQMTPDWREAFEDELQKLKSLYGICGDREWTEAVYESVRRVWRHMGKQVRDWRKDVRSGERPKIRGYQKDVVGGNSIEQIEYLERQYKFLKSWSFFGKVSGQVIRAEKGSRFAITLREHIDHAKEDRLKKLADRIIMEALGYVYALDDERGKGKWVAKYPPCQLILLEELSEYQFNNDRPPSENNQLMQWSHRGVFQELLNQAQVHDLLVGTMYAAFSSRFDARTGAPGIRCRRVPARCAREQNPEPFPWWLNKFVAEHKLDGCPLRADDLIPTGEGEFFVSPFSAEEGDFHQIHADLNAAQNLQRRLWSDFDISQIRLRCDWGEVDGEPVLIPRTTGKRTADSYGNKVFYTKTGVTYYERERGKKRRKVFAQEELSEEEAELLVEADEAREKSVVLMRDPSGIINRGDWTRQKEFWSMVNQRIEGYLVKQIRSRVRLQESACENTGDI

SEQ ID NO: 61954 - protein, 1090 aa, Unknown
  BrCas12b
MPVRSFKVKLVTRSGDAEHMLQLRRGLWKTHEIVNQGIAYYMNKLALMRQEPYAGKSREVVRLELLHSLRAQQKRNNWTGDAGTDDEILNLSRRLYELLVPSAIGEKGDAQMLSRKFLSPLVDPNSEGGKGTAKSGRKPRWMKMREEGHPDWEAEREKDRAKKAADPTASILNDLEAFGLRPLFPLFTDEQKGIQWLPKQKRQFVRTFDRDMFQQALERMLSWESWNRRVAEEYQKLQAQRDELYAKYLADGGAWLEALQSFEKQREVELAEESFAAKSEYLITRRQIRGWKQVYEKWSQLPEHAAQEQFWQVVADVQTSLPGAFGDPKVYQFLSQPEHHHIWRGYPNRLFHYSDYNGVRKKLQRARHDATFTLPDPVEHPLWIRFDARGGNIHDYEISQNGKQYQVTFSRLLWPENETWVERENVTVAIGASQQLKRQIRLDGYADKKQKVRYRDYSSGIELTGVLGGAKIQFDRRHLRKASNRLADGETGPVYLNVVVDIEPFLAMRNGRLQTPIGQVLQVNTKDWPKVTGYKPAELISWIQNSPLAVGTGVNTIEAGMRVMSVDLGQRSAAAVSIFEVMRQKPAEQETKLFYPIAVTGLYAVHRRSLLLRLPGEKISDEIEQQRKIRAHARSLVRYQIRLLADVLRLHTRGTAEQRRAKLDELLATLQTKQELDQKLWQTELEKLFDYIHEPAERWQQALVAAHRTLEPVIGQAVRHWRKSLRIDRKGLAGMSMWNIEELEETRKLLIAWSKHSRVPGEPNRLDKEETFAPQQLQHIQNVKDDRLKQMANLLVMTALGYKYDEAEKQWKEAYPACQMILFEDLSRYRFALDRPRRENNRLMKWAHRSIPRLVYLQGELFGIQVGDVYSAYTSRFHAKTGAPGIRCHALKEEDLQPNSYVVKQLIKDGFIREDQTGSLKPGQIVPWSGGELFVTLADRSGSRLAVIHADINAAQNLQKRFWQQNTEIFRVPCKVTTSGLIPAYDKMKKLFGKGYFAKINQTDTSEVYVWEHSAKMKGKTTPADPAEEGVFDESLTDEMEELEDSQEGYKTLFRDPSGFFWSSDRWLPQKEFWFWVKRRIEKKLREQLQ

SEQ ID NO: 61955 - protein, 318 aa, Unknown
  Microbial Source - Accession No. GA0272445_1000517
MLRRCEEEVVKFLNLSRLELQKMLYHKMKDAGVETSAYTLALLVQRFTGSLGEKAVIPFDTSYNAKFVSEDGVWFVEVQLLKGRGRRVRIPVAKTELPYYEALEELKDLPFIIVRENKDWFAYVSIPVQNSVNGEIVGVDFNLRRWVASPFEGPPLFFDAGEYMRGIDRLQRLRSRYQRRGEEDKWNECYREMRGIVKLAHGNFLARIREKYGVCTLAVEEVEVMYKLIRKDNKMINNWLYSKTALRQFTLRAMAKGFNVVEVDPKDTTKLCHKCGGQVKIYGKHDRLITCEKCGYKDYNRDLNSARNIAKKAQYVKE

SEQ ID NO: 61956 - protein, 1129 aa, Alicyclobacillus sp.; identical to SEQ ID NO: 61953

SEQ ID NO: 61957 - DNA, 91 bp, Artificial Sequence
  Synthetic
gtctagaggacagaatttttcaacgggtgtgccaatggccactttccaggtggcaaagcccgttgagcttctcaaatctgagaagtggcac

SEQ ID NO: 61958 - DNA, 91 bp, Artificial Sequence
  Synthetic
gtctaaaggacagaatttttcaacgggtgtgccaatggccactttccaggtggcaaagcccgttgaacttctcaaatctgagaagtggcac

SEQ ID NO: 61959 - DNA, 91 bp, Artificial Sequence
  Synthetic
gtctagaggacagaatttttcaacgggtgtgccaatggccactttccaggtggcaaagcccgttgaacttctcaaatctgagaagtggcac

SEQ ID NO: 61960 - DNA, 91 bp, Artificial Sequence
  Synthetic
gtctaaaggacagaatttttcaacgggtgtgccaatggccactttccaggtggcaaagcccgttgagcttctcaaatctgagaagtggcac

SEQ ID NO: 61961 - DNA, 91 bp, Artificial Sequence
  Synthetic
gtctagaggacagaatttttcaacgggtgtgccaatggccactttccaggtggcaaagcccgttgaacttctcaaatctgcgaagtggcac

SEQ ID NO: 61962 - DNA, 91 bp, Artificial Sequence; identical to SEQ ID NO: 61957
  Synthetic

SEQ ID NO: 61963 - protein, 1090 aa, Artificial Sequence; identical to SEQ ID NO: 61954
  Alicyclobacillus sp.

SEQ ID NO: 61964 - DNA, 125 bp, Artificial Sequence
  Synthetic
tgcaggttagtggaaatatagatagccgttgtgactgagtgacgtgttaggtcaccgtagcacatgacacaactgcactggtcagcctgtagctaaccaccttcattatatctagtttttccaac

SEQ ID NO: 61965 - DNA, 98 bp, Artificial Sequenc
  Synthetic
gttgtgactgagtgacgtgttaggtcaccgtagcacatgacacaactgcactggtcagcctgtagctaaccaccttcattatatctagtttttccaac

SEQ ID NO: 61966 - DNA, 61 bp, Artificial Sequence
  Synthetic
tgacacaactgcactggtcagcctgtagctaaccaccttcattatatctagtttttccaac

SEQ ID NO: 61967 - DNA, 99 bp, Artificial Sequence
  Synthetic
gaaggtggttagctacaggctgaccagtgcagttgtgtcatgtgctacggtgacctaacacgtcactcagtcacaacggctatctatatttccactaac

SEQ ID NO: 61968 - DNA, 120 bp, Artificial Sequence
  Synthetic
gttggaaaaactagatataatgaaggtggttagctacaggctgaccagtgcagttgtgtcatgtgctacggtgacctaacacgtcactcagtcacaacggctatctatatttccactaac

SEQ ID NO: 61969 - DNA, 73 bp, Artificial Sequence
  Synthetic
gtgcagttgtgtcatgtgctacggtgacctaacacgtcactcagtcacaacggctatctatatttccactaac

SEQ ID NO: 61970 - DNA, 63 bp, Artificial Sequence
  Synthetic
  misc_feature (37)..(63): n = any nucleotide
gtccgtttcgttagtggaaatgtagatggttagcacnnnnnnnnnnnnnnnnnnnnnnnnnnn

SEQ ID NO: 61971 - DNA, 52 bp, Artificial Sequence
  Synthetic
  misc_feature (26)..(52): any n = any nucleotide
tagtggaaatgtagatggttagcacnnnnnnnnnnnnnnnnnnnnnnnnnnn

SEQ ID NO: 61972 - DNA, 54 bp, Artificial Sequence
  Synthetic
  misc_feature (28)..(54): Any n = any nucleotide
gttagtggaaatctagatggttagcacnnnnnnnnnnnnnnnnnnnnnnnnnnn

SEQ ID NO: 61973 - RNA, 25 nt, Artificial Sequence
  Synthetic
gggaacaaagcugaaguacuuaccc

SEQ ID NO: 61974 - DNA, 18 bp, Artificial Sequence
  Synthetic
gggtagggcgggttggga

SEQ ID NO: 61975 - RNA, 12 nt, Artificial Sequence
  Synthetic
  misc_feature (1)..(1): Biotin tag = /5Biosg/
  misc_feature (12)..(12): Iowa black quencher = /3IAbRQSp/
ucucguacguuc

SEQ ID NO: 61976 - RNA, 24 nt, Artificial Sequence
  Synthetic
  misc_feature (1)..(1): biotin tag = /5Biosg/
  misc_feature (24)..(24): Iowa black quencher = 3IAbRQSp
ucucguacguucucucguacguuc

SEQ ID NO: 61977 - DNA, 55 bp, Artificial Sequence
  Synthetic
gaaattaatacgactcactatagggaggtttcaaactttacttgctttacataga

SEQ ID NO: 61978 - DNA, 30 bp, Artificial Sequence
  Synthetic
tcctaggttgaagataacccacataataag

SEQ ID NO: 61979 - RNA, 64 nt, Artificial Sequence
  Synthetic
gauuuagacuaccccaaaaacgaaggggacuaaaacgcagcaccagcuguccaaccugaagaag

SEQ ID NO: 61980 - DNA, 55 bp, Artificial Sequence
  Synthetic
gaaattaatacgactcactatagggcgaagttgtaggagacattatacttaaacc

SEQ ID NO: 61981 - DNA, 31 bp, Artificial Sequence
  Synthetic
tagtaagactagaattgtctacataagcagc

SEQ ID NO: 61982 - RNA, 64 nt, Artificial Sequence
  Synthetic
gauuuagacuaccccaaaaacgaaggggacuaaaacccaaccucuucuguaauuuuuaaacuau

SEQ ID NO: 61983 - DNA, 18 bp, Artificial Sequence
  Synthetic
gctgctgaggcttctaag

SEQ ID NO: 61984 - DNA, 21 bp, Artificial Sequence
  Synthetic
gcgtcaatatgcttattcagc

SEQ ID NO: 61985 - DNA, 40 bp, Artificial Sequence
  Synthetic
gcggccaatgtttgtaatcagtagacgtggtccagaacaa

SEQ ID NO: 61986 - DNA, 39 bp, Artificial Sequence
  Synthetic
tcagcgttcttcggaatgtcgctgtgtaggtcaaccacg

SEQ ID NO: 61987 - DNA, 22 bp, Artificial Sequence
  Synthetic
ccttgtctgattagttcctggt

SEQ ID NO: 61988 - DNA, 18 bp, Artificial Sequence
  Synthetic
tggcatggaagtcacacc

SEQ ID NO: 61989 - RNA, 111 nt, Artificial Sequence
  Synthetic
gucuagaggacagaauuuuucaacgggugugccaauggccacuuuccagguggcaaagcccguugagcuucucaaaucugagaaguggcaccgaagaacgcugaagcgcug

SEQ ID NO: 61990 - protein, 1129 aa, Alicyclobacillus acidiphilus; identical to SEQ ID NO: 61953

SEQ ID NO: 61991 - DNA, 35 bp, Artificial Sequence
  N6-F4 Probe
  misc_feature (1)..(1): FAM molecule
  misc_feature (35)..(35): 3' Inverted dT
gtgcgcattggcatggaagtcacaccttcgggaac

SEQ ID NO: 61992 - DNA, 24 bp, Artificial Sequence
  N6-Q4 Probe
  misc_feature (24)..(24): IABkFQ
tgtgacttccatgccaatgcgcac

SEQ ID NO: 61993 - DNA, 35 bp, Artificial Sequence; identical to SEQ ID NO: 61991
  N6-F4 Probe one RNA base
  misc_feature (1)..(1): FAM
  misc_feature (19)..(19): RNA base
  misc_feature (35)..(35): 3' Inverted dT

SEQ ID NO: 61994 - DNA, 24 bp, Artificial Sequence
  N6-Q4 Probe one RNA base
  misc_feature (6)..(6): RNA base
  misc_feature (24)..(24): IABkFQ
tgtgacttccatgccaatgcgcac

SEQ ID NO: 61995 - DNA, 35 bp, Artificial Sequence; identical to SEQ ID NO: 61991
  N6-F4 Probe two RNA base
  misc_feature (1)..(1): FAM
  misc_feature (18)..(19): RNA base
  misc_feature (35)..(35): 3' Inverted dT

SEQ ID NO: 61996 - DNA, 24 bp, Artificial Sequence
  N6-Q4 Probe two RNA base
  misc_feature (6)..(7): RNA base
  misc_feature (24)..(24): IABkFQ
tgtgacutccatgccaatgcgcac

SEQ ID NO: 61997 - DNA, 35 bp, Artificial Sequence
  N6-F4 Probe three RNA base
  misc_feature (1)..(1): FAM
  misc_feature (18)..(20): RNA base
  misc_feature (35)..(35): 3' Inverted dT
gtgcgcattggcatggaagucacaccttcgggaac

SEQ ID NO: 61998 - DNA, 24 bp, Artificial Sequence
  N6-Q4 Probe three RNA base
  misc_feature (5)..(7): RNA base
  misc_feature (24)..(24): IABkFQ
tgtgacutccatgccaatgcgcac

SEQ ID NO: 61999 - RNA, 31 nt, Artificial Sequence
  RNA Molecular beacon
  misc_feature (1)..(1): FAM
  misc_feature (31)..(31): IABkFQ
ccuagcucuaaaucacuauggucgcgcuagg

SEQ ID NO: 62000 - DNA, 31 bp, Artificial Sequence
  DNA trigger
cctagcgcgaccatagtgatttagagctagg
